United States Patent Application Publication US 2011/0014706 A2 - sequence listing, part 14

SEQ ID NO: 28278 - DNA, 1873 bp, Arabidopsis thaliana landsberg
aaaagcaggccccgagatcggtttcctgggcctaatctttattaaacggataaggtggaaatcattccctgacctcggtgaaacagccgagctcttgaaagagactcctctatcgttcggaggtcctgtagtggatccaggaataccactattagctctgacccgagagcgagactcttccacaaaccatgatcacccggaaatctcaccaggcgtgtatttcctagatcatcaatctgtggcccgtcgaatccaagagttgaaatctagagagctaaatccaagtgagtactggtttttcttgggatactcaagctggagttatgagcagttgtttgatgagatcggtcttggagtgtgggatgttgataacagtgacattgactttgcttggccttagaagctcttgcgttgcatctcttgcaatgtttttcttttacgttttgttttagaaagaagacgaaaaagagtagaagatagtaaaacccatcatgtgggtagaagaaatgtttaaactgtaagaataacacttgaaaatgtcttctaaacaaatacaacacagaattagatatcttcttttgagatcattcctcttgcagattacttcaataggaaaacattttaataagcaaaagcaaaggtcagaatcataacaaagtcattcatctctctttttgccagtcttgttttctaagtagcaaatcttatcctcaggatcagaaaatgccaagaaggcctctctatgagtaacatcagcctgaaaatgagtcaacgatgcacggtataaaggcgaccacatcctaacaccaggtagatcatggagtgccttcattgaatcaaacacaatactagtcttgttggaatctgagggttgcttattgctggttcgtagagcgctaagtgaagggattctagcagcaagaatatcatcgagtccgtctgttaaatcatcatacatctcatcataccactcattaatcatttcagacattagagaatccacaaggttttcttcatcgcttgattcttccgatccgctcgcatcagacatatcatcatcatgctcttcagactctatagaatccaaactgttttccccaacgcttgatcctttcgatccgcttgcatgatcattgtcagcttcctcttgagaaataaccatattgagtgagaatctaccaatttaacaattcaatgttacaacagcatacatatctctaacataacatggaaaatcaaaggggattattcagaaaaaacaaaatctgggactagaattccataatgaaaatctcaaaagccgattacctgatttttttcgggaatggttgtcaattcatcctcttgttgttgaaatctgaaacaaaaaattgggaagatgttaaactatttgagcagaaactgattgtgttgtatagcaatcaacgctaaaagagtagatgagtgactagaatggaatctaatgttcgttcgaattactaataaggactcaaaattcaaatcaaaactcagagaagcaaaatgtggaaaaggagacgaagaagaagatatatcagattaccttttcagagaagcgatggagagaagcttttctgggtccgagggttttaagaattgcgcaggtctctttttgtgggttcccagataaaggtaagggtattttggtcataatctcagcttacatacttgtttgacttttttagtatgacttacgacttttgtttcttttttgtaaatttactaataatataagtatgagaagaagacacgtgaagcgccaaaagacttgtggggagtgtataccggataaggtttgcatggtctctaagacctcaggttcttcctcacagtcctttctaaagaatcatcaacc

SEQ ID NO: 28279 - DNA, 764 bp, Arabidopsis thaliana landsberg
ggccgcggatttcgttcatgtgtacgtcgagataccttagagaacgcatctcacatatggaattggggaagaaacggattttgttcagctggatcgatagcctttcgagattgagtaatccgtatccgaagtttgcaggcaaagaagtcaagttgttgaagctggcatctaactctaccagtgacctaatcacaagaacatatctctcttcagaattaggtaataggctaagctgaaacgaaagatgaacaaacgtaaaagcacaaaacctgcattgcgcaatgctttctgggagtaaagttagcttgttccccgtcacatttaagatcctcaaattaagtaacagtccaatagagtcgggaagaaacacgagacggtttgaagataaatctagctcctccagtttctcaagtcctgagattgtatcaggtagaaactgcaaaagaacaaaaaaacagcttaactcaatgaatccgatcaagatctcctcatgtttaactcaatgttcacaacagctgattactaatcactaaaagaaaaaacattcacagatttctaaagtcttgaaagacaaacaaatggatcaccaaaatcatgagtcatcatgcaactctaaagatgatcatcgattccatagtctaaagccagtctacataatactcacacattccaaattccataacttagtttcgtgctttttcacaacctctactaatcagagaactcgttgagatttatgaggtctgtgaaactataatcgagag

SEQ ID NO: 28280 - DNA, 2014 bp, Arabidopsis thaliana landsberg
gaagatacaaagtgattcatatattcaaagcctagaggcaagaagactatacgtaaaagatcaatctctagcagattatctccaacgttagtgttgttgttgccgccatcacttgtggaattcataggtttgtgaagtatagctcacgaaatatgaatcttttttacaacatattgttcctgtacgcatgacctagcaaatcatgatagacgaatacaaatttatttataattcttttgccaatcttggggacgcttttacgggcaagaaaatttcttactcatcgtacttagtttcaaatcctaagtaagagttaatccaaatttttaccccccaaaaaaaacagttaatccagttagaaataactaatatccaattgcgtcagcttcacgtgattttgtattgaacgcatgtcctccaatttgtgtctagacacttgagtgatgtcagtgatgacattatgtcacattacttttgttgcttatttgaaagatactattacatcagtatgatggttaaaatgaagaaacttgaagcactacatatgacgacatcaacgttcttttcctgacaacattttcttttatcatccctaactttttttgggatgctttcacctacacactcaatgactcaaaccaaaccacacaagaacacttcccactacttatggctcatgatgggctttggtttagcctaaacccaatcaagataacttaaacagaaaacatcatcactagggatgttagattttttatcaaaaccggttccaagagaatgcaacgggacttctcacttcgtgctgcggattgctccaagtgatggaaccaaactcagccttgttcgtcatactcactcctttcttgctaacaaacgtgactgtgtacctcttcttctctcccacgcttttaaacgaaagtttcgatggtttaacagagattccgacactaggagctccattaaccgtcactttgtaaaccgagcttgctgcaccaacatttgttacttcccgagtgtaccgcacaactcttttacccccaaacaaaaccgagaaacttgggtagttgagctgaccaggatctgagaacttcttcgagcagttaacgctaggtcgcttcacaatcgcaacaatgtgatcgactgtgtagtctagagagcacaaaaacctgatgtattcctcggttgagatgtcgtagacaagacctggtgagagagccttttggggatctacatggcccgagccgtgagcatatgggttagataggctgttgtctgcagcatcatggagaggagcgttggtgttgtcaagaacgtaagctgtagtcatgagagctgatttgatagcactcggactccactcagggtgagctgctttcaaaagacccgatataccactgatgtgtgggcatgacattgacgtacctaacaataatcagacactttttcatgtgtgacaaaacaaacccctctctacaatcatagattaatccataacaaaaatatgtaatcaaaatcaagtcttcaaagctgagtacctgacatgatgttgaactgagacctcttatagtccttgtcaagaccagtaggaccaatagcgtcagaccaaccagccaaaatgttcactccaggaccaataacatcaggcttcaagatttcaggagtaacagtattaggacctctcgagctaaaagcagcaaccacaggaaacggcttaacgtcaagaaccgttcctttaaaaacaagaagagcagttggattagaatctgacttaacatactccctaggtaaatcaccagtgttcttccctacagcgatcgcggtaagcaaatgactatgcgccacaagctcctctgcactcgcagcagtattcgccattatcatccctaaaccaccagcatctctaaccacagctgctttctcaactctagcattaacacctctatgacaaacaacaatcttgccacgaccattcttgaatcaagcggaccaagtaaacaaagattactcgaactac

SEQ ID NO: 28281 - DNA, 2275 bp, Arabidopsis thaliana landsberg
  unsure (1)..(2275): unsure at all n locations
atgttgcaccagctccgactaaactttttaaaaatctaggacgtccaagctaactggacccaattctttttatagaaatcatatcgctatgactatgattgaaaaaatgttatagttcaagattttttggtatggccaaaattttttaccacatataaatctttagataccttaccatagaagagacttagtcagacttttagtcatccaactagagcgacgaacaaactatatcgcaaaccgggtaggatatgtgcatagaacttttaattttttatcgagacttacaatttttttttttgttagttggcacattggaaaaaagagtgaatgaatagtnnnnnnnnnnnnnnnnnnnnnnnnnnnnactatattgtttcaattggttcatgttattcatatacaaagattgttcacctaaaacttagttgcctaattaaataattaattgggtccaccatttgaagttctttctaaacaaagaaggcgtaagcttgttaataaagtgattagcaaaaaatacattttaagagctaataattaaggaaatgttggttaagactccttccttagcaagaagaatctgctacataaacagaaaaaaaaaactacaaaactttaaggccaaaacatagaaggaaaaaaaaaacaagaagatataaaagaatcattcaatatacatattgaaatggatacctcatttttctatttgatattgaaataaataattgttgttagaacgatacattaaaaatatagattatgcaaaatgataagtaacattaatcacaatatactcgtatgatccaaacaatctatggagcaagtttaatttcttaaaaagctccaaacaatttcttcttacggatttagcttttatgatctccaccaaatagtaatcaattcacattttagaagttatcatatattaattgaagagtagtttggaattgtgtgatgacaactactattttgttgttggattaattttctagaaatgaaaaataaaaataaaaatactgattttattcgacaatctaattatttattagttcaaagtcaattttcaattctaaaagaaaccaacctcttaactcttaagatagagatggtaaggtaaacaacaaaaacacttttcttaaagttgattagattgcacacttaactcaattaattattcattaagcattatgcattccccactaatcactaatcactctttcaatgaaaaatcagcttaaaatgtttaaatattagaattccgaggtcatgaaattcataaacatgtttcccttaaaatacaaagttttttcattagtgatataaaatattgtacgatccaacgttcattaagcgtacgtggcccatttcgatcagatcctacccgacacatcctctctctacacacggtctcactctccctctaaagttgttttaactctttttcttccttaaccattttcatttgtcttcttcatttcctctttctctgtttttatagtctccagtgttgtgttcttggagaggatcggttaagtattggttaagaaggtgaggaaagttttgatcttttctaatggggttttcttcaaatcttctaaatgtggctagataaaaaagatgactttattgtgattcgtcatgggtttctatttaaagtcttaaactttatgaattggatttttcttctttttactgtattgtgcatgtataagccattgatggagattagctcatgctttctatttatacatttttagggggaatctgtttgttctgatttgggatttttaagacaatgagagtttttttgttctcaatcttggatttgagtcacattcacttgtaaatgttggtccattttgagaaatgtgggattggagaaatcaaacaaatcaagatgttctaaagttttttctgctttttttttgctttctgtgtaataggatgttgtgaaaagtttcaagagtagttgtgtgtggcttgtggaggtaataaatggaccataaagcatggccttggaagaagaaatcaatggagagaaccgttgttgaaagcaatggagaggttagtggatatgatgttgataacattaatgtttgatgttaggttggggaatggatcttctttgctcatttatgtatcttttagagatatgttaggtttagtatcagagtgtcatctgtttgacattcatgtgttgttaagctcatattgtttgagtttaagcttgtcaagaaaaatccctcaagctttgtgatgtaatttgagacac

SEQ ID NO: 28282 - DNA, 1240 bp, Arabidopsis thaliana landsberg
ccgtgcagacgggcatccgggaccgtacaggcatccaaattctttttctggagttaagaataagagcaatgttcggaatgattgtctgcattggtgcttacctggtccaattgattcatggaatgatgtgatggtggaaaccacgcttaaccgggaacgggaactatacgatttaaccggttaatgtaccacgatatcgcttgtagctagttacagtcaatagccattccacttgtcaatgtctcgtatatgatagttctatattttaattttgtaatggttctaaacaagaataaacgatgcaaaattttgcagtgtgaattttgtttaaggtgttgttctgtggaaagctaataatgatcttactaggacttgtgatgtaaaaacaaacttgtaatggatgctctgcattttctttaatcagtagcttgttacacctgttatgtgagtggagagaccaagtagggatcacatactgaaaataaaaccgacttggggcttggaaaactaacttagcaccactacgaggacatgaatctaatctaaattcaaccatataacctcggcaaatacacacaaggcaggagatcgataacaagaagcaagcagtgactgtaatagtatgctgaataaactatgtcaagaataaaagcatgagacaagagcagctacaaacatttggattagccaatatgtacttggaaggtggacgacatacatggagaaatacctccaacaaaaattggtatccaaaccagacaaatagaatggaaggaaatagctcgaaagcatatatcaacatacgtagtgagacaatgatttgcttaaatcctgtctgtttcaaacataggatattatgaaacacaaaactgtcaagaatttatccattgcagacatcatcagatctcaaaagtgatgcaaattattttcaaaatgaaacacaagaccagtcacaatctgataaaagggaaaacaaagtgcatgagaatgagaggtctctccataaaaggtcttcctggtgacaatgaaactcattgtgtactctccacaggcgtctgcaaaaaaaactatgtataagggaaggaacccgaagcctctaggcaatggaagaagagcaagagctgaagagcaagagtaagtactcttttttcccccagtggcgagcttgtatccctgtagaaaagtaagcccagccagacagagaaataagccaaactgcagattggtcaggtaacagaag

SEQ ID NO: 28283 - DNA, 2678 bp, Arabidopsis thaliana landsberg
aactaattgtataaccttaatgatgagttttcacctttgttctaaacgttttggattgattatttcatacaatatggaaaatgacgcttagactaatattgaccctataatgtttttcaatatacaactaaattgcttcgacgtaataaaaaaaaaatcataaaatgaaagcgtagatgtggatagacacaaaaacctcaacaaaaaaaaataaaaaaaattgaagttttattcgagcaaaacacttaacaagcaaagtaggaccaaccagactttcaagtttcaacgttcaacgaatctcgtgacatcaaaaataaacccactcgcatgtgataactcacgcgctgagaccaaactcagatattatcgagatgatgagaaaatatcgagatggtacgagtctgtcgcgcgtgagagtgacactgagcgagaagaaaacgaaaggacttaaaaacctgaaattccagctggcgagagattaacgcgtttagatcatcagaatagtgggtcctgccttcacgtggcacccatctaaggtgattgattccacgtgtgatgagatcgagctcttaagacacgtgtcaagatcgaagagactattgcttttgtctttctcttggaactggggaagggagaaagtgaaaccgaccccaccctgagtcacgacatatacttgaatcaagttatggttttttatgaaaattgatattttagagatgtacagtacgaagaagaatctatattatccaataaattttcaaaaatatttataatttttgtttcattaggagattactgcgaaccaaaaaaaaaaaaatcttggttcacaaatttcttttttagattttatacttacatttttgtccaattcatttttgcttcattaataagaagtcggtatgcttttgtttttgttgaaactacctaagattctcctattttttattttttgttccagaagaaacaagagacttgcatcagcatgatccggtagttttgaaataataataaaaaaatcataatgcaaattggcttagacagcagcaaaaaaaaaaaaagatacaaaatagcaatagtaaacaacatttgctcgtgataaccactaaagtaacaggctctactctatcataattaattgtagtaattagtcacaacattaagtaatgcatggctagtcatttagtttaatattttcttagtgtgaaatgtggaagaatctgtatgcaaaatgaggaaaaccagagatgaaagtctgaaagactgactatagaacgagaggagaccctaatcctaaacaaaatagtccacataattagtagtttaataataatatgttacagggaaataaatacattaaataagtaataccacgagagaaagtaaagcacgagtggtaagctttgtgcagagtgttttcattgggtaaggaaagatgactaaagacataaaaaaaatagagtgtggaacggctaaaaataacgagccatgatgtaatcttcgacggttctggttccccgcgccgatcacaccgaccaacctcgtaagtttccaaacggtcgagagccttctattattatactattatatattccataatattctccgtccatgcaatctgaatttttttatcaatttcttcaagtattcttgtataatcttaatatttaaaattgtaactatataataactccaaaacaacagtctttcactccgatgaaaaatcattcaaccattgtgccataatgtagaatgatattattgaccacatatactaaatgaaaaaagtgtggattacaatttcttgagtgaaactttttgattttccttcatacaaagacaattactttcggtagtagaaaatccatttagatataatagtggcaaaaatttaaagtctagatacttactttttcgagagacagatgaattaaaagttttgaagtggtaaagaatatgccaaacacgacacatgtaatattctccaactccgaaaaaaaatccatcgcaattcgtggcatttttcgacacttcattaaaatctcatttaaaacccaaggggtatttacgtactttcacaactgacggaaactagaagttaagggtcccttatccagtttatccaaaaaacctgtataaaaccaaagactccctcacgactaattcttcttcttcattagcagattaaacaaatctcaacattcgaatttttaaaaattaaacaaaatctcttcttcaatggcgacgggaaagagttactacgctaggcctagctatcgatttctcggcaccgatcagccgtcttacttcaccgcttccgattcaggtctcgaattcgacgaatccgatctctttaatccaatccactccgattcgccagattcttgccgtaaaatctcttcatcagacagatccggtaaaaaatcgtcgaatcgaccctccgccggttcctccgccgcaggagagtcgacgcttcctgttaacgtgccggactggtgcaagagtctccgcggagaataccgcgataaccgacggagaagcatcgaggataacgacgacgatgacgatgataacgaagacggtggcgattggttaccgccgcatgagtttctggcgaagacgagaatggcttcggtctcggttcatgaaggagtagggaggacattgaaaggaagagatcc

SEQ ID NO: 28284 - DNA, 2258 bp, Arabidopsis thaliana landsberg
ttttcacacaaaaattaacttttttttttgttcaaacaaattattacgtaggacatgtaccttcctttattgcgtggatgaaattattggagtggtaccggccgtgtgtcaattattacgtatagaagttcatatagacacgtatgtctacgtacaactatacatctcaatcttgaatgaaattatcttaaggtaaatttgtcgcagctttgattataggaaagagcaaatgtaaaaagaaaaagaattaccgaggatgtgatgagccatgtcacggaagcggaggtaacggctgccgagagaagcgtggtgttcgagagtaagagaaagaagagtgtacgagtagaaagtaacggctgctcctccgaccagacagtatatcccggcagcccatcctaagaacttgaaggcgtacggtagactcagtagcgcaggcgccactatagacgtcgtcaagtggaatccgcagtgccaccatgtccctagtttccatcatcatcatcatcatatcttcttcaaatgggttataatagtatacgttaagtttcatagatttcataattaataaaacgtacctttggatttaaggacgaagagagaaccagcatcaactacttcttcccctcttttttctccatctcctgatctctcttctccacccatctctttatcgctctctttgtttctctttctctctctctccccccactaggtgctactcacttttataagtccaaaaaacacacttgctatcatatcatcttttacttaaaagcatttcgtaataatattaaacattgcagatttatagtttatcgattctcttctgtgtcaaacgatttatgaagttataaaatgtgtatatcttgattattttctttaaaaaatatatgatagaatatgaaaataaatggagaattcaaaatattttggaaacaaatctcttaaatcttattttttatatataatttcaaaataatcgattttggagacaatcttaaattttcaatacatccaacaaacagtaatagaaaaagcaaattggataatagtaataacatatcaatataacatgttaatatgtatattaaatccttattacagttttacattttcattataactgacagaatttttaaaattgaaagaaatttctttcggttaataataataatactagattttcacccgcggtataccgtagggacaatttatattttaaaattagtatatataaaagtttgtaatttgtaatttgtaacaatttatgtaactatctataaaatatttttattttatagtttagaattgttattaagtaacgtcctgccaaactcgtcccgccaacccatcccgtaaaaaaaactcatttattttattaatgttgatcttctttatcatatgtttatgaatcattgtctaaatattttgtaattttgtagtaattaaatgttatcaaatatctctgcggtttgatgattataattgaattgtaatagtcatgaagaaaaacaatctcaataatcacaattttgtagtaattaaatgataataaatattaaaaaagtcttattttagtaaccaatcgtgtagttaatgtggagagatttagggaagattgttaaatgtcaaatttttaattcgaagttttttttctaattatcaaaaacaaacattaaaatccagtggtagccattgtaaataagttccaactacatgatttatttcacaaaatggctgcaaaaatgtatatgtagatattcttttagtaattagtttagacgaagggtagccttaaaactctatagttagcttttcagtgagaggcaagtaatattttacaattctgttccacttggcactgataattgttggtgtatacattttgttaaccggactggattgtatcacataaccgagtcaaaattgtaagtatcataattctattgggtcaaaaactactcttttaatttatttcgcaaggaaataagtcaataaccaaagatgatgtcacagccctaattacttaccaacatcgatcttgacaaaaattctgaattgccaaatcgtgtcctagggttccttaattttctttccccggcgatgactcccacaccgatcattgaattaacggcagaccgtggctccatgatgagttcatcggtcacgcagcaggttatctctaaagtcgacagagcaggttacatagtcattgctattttcaagttaaaaagatttttaaataattaagttagacc

SEQ ID NO: 28285 - DNA, 649 bp, Arabidopsis thaliana landsberg
  unsure (1)..(649): unsure at all n locations
ttgagtccaatattaagaatctttttgctgtagattttaatctgatgggcttgggcctcacttttctttgttgcacaatcgttgtatccttggtttaataggaaaaaaaaaaaaaactaataaaagaagaccaaagtcaaagccaaatctttctaagaacgcttcgtatttccttcttaaccaagctacttgtctccgtagtctattcgaaaccctaannnnnnnnnnnnnnnnnnncgaagtctcagtgatactcgaagaacagcgtgaagaaatcatggcggctaaaaccctagcccaagaccacgatttagctttcaatctccaaatgcaagaagccctagcggtttctaaagcagcccacacttcctctgtaccaaactctcccaccggagatgccggaatcgtcgatttcaccggcgaggaggaagaattcgacttcacgtctctgattctacaagacattgctcgagtcgatcaggagaggagagatcgtgagtttggtgaacaggaaatgaagagactcaaagttgatctggaccgtcggattcatgatcagaagaatgctaaagagcttatgaatgtccctgaaggagattggagcaaacacggtgacaattaccaaaagccgtactcccttagtgctggg

SEQ ID NO: 28286 - DNA, 1702 bp, Arabidopsis thaliana landsberg
cgtattgtgctagtaatcggtgacgggaaccacataaaacgacagtttatcaacataaaaaaaaatcacattctcatagaagactctagttttgttataaacttgtgctaaataattaacacgatacataatactcttcattattatatatacttttcatgtataataatgcatggacattacacaaatggaatgaatagtacaattgtatgtgcatgaatgtttttctaaaaactgacatccgtttgtatgctattttatccttgtttgttatttaatagtagaaaacttgcgaggaccaaaataattagcatgcaaagaaccagaagaaatcgtgagaactaaaacgtaaagaactcttgtgacttgtataatatatagtttgtatgcatgtttgatgttgacacaacatatctccatcattaattcgtcccttgcagtctctcaaacttattaatctcaaataatcgatgtttatagattaagtccctcgagattaataatgtaaatccaatgatacaatgtggttccttcgacgacgaatcatattctgatttctgtatatctgtaatataaagtacgattattattatatttgaatacaatcatacttaataaaatattgtgtcatatatatttatctccataaatgtttctcttgactgaaatgtgaatacccaaacataaaaacatatacagtaaatactttgttcaattcccattaaatttctctttgaatctaaaatcagacatagaaatactgttgtttagagaaagattttgaatatatagaacattaaatcgccgcagaactttgttgtttagagaaagattttaaatatgataagaactcaactaaagaaaaagacaacaaattatgacgtctcaatttagagttttattggttcttttgtacagttctgtaatgttaggaatcgttttatacacaaaggtaacttaaatctttcaaacgtctacggtagtggacggtcattaaaatcagagttaagaaaacgaacaaaccaaatttaatcatatcttatacactcgagaccttgattatatattactcttttatatattaacagaactagaaataaaaactatacattattagaatatcgtaacgtatactaatatcccatcgaccagtatataaacgacacaagtcacagtacattctcatcacataccacaaaatatctcataaagatcaaataaacactaaacctgaaagcaaaaaaatggcagcacgagcaacattcatattctatgctctcttcctaaccacactccaattccttctaacacaccatgtgtcatccgccgcccgaggattatggaaatacatcgcccccaacgtcggaatctccgcgatgcatatgcaacttctccataacgaccgtgtcgtaatgtacgaccgaaccaacttcggaccatcaaacatctctctacctaacggtaactgccgtgacaacccccaagacgccgtctccaaaatcgactgcacagctcactcgatcgaatacgacgtcgcaacgaacaccatccgacctttaacggtacaatccaacacatggtgctcatccggttcggttcgaccggacggtgttcttgtccaaaccggtggagaccgagacggagaacttaagacaagacgcttttctccttgtaatacaatcaatgtgattgggtcgaaatg

SEQ ID NO: 28287 - DNA, 1734 bp, Arabidopsis thaliana landsberg
ttagttctctcatctcaggcttcataacccaaagcttggatttccaggctctcatttctcgttggcctacaggggtccccattgaccatgggaaattgttatgatctctttctttatcaagaaatgaagcgaggaaatcgatatcatatgaaaatccattcttccacatattatatctcttcgatactccattcacatcctcttcgcggttatcagactctccacctccattcattcgtgtcctcttctctttcctggtaagggctgaatagctcaaagtattatcttcttcatcgtgtgtttcttcttccaaatcttcagaattttcatcatcaagagcaagaagcccagcacggcaaactcctttgtgatggtaaccaggcgccatatccaagcacacgaacccaaagttttctttgttcacaaaattctgggtaacagccactgttggttcaagattaaggatacagtgccaccaaccacttggaacataaatcgtttcgccaggtagtagtgtgcactcaatcggtttgtcttcgtccgcaagaaggggataatagtctagccaccactgtacagggattgaaaacattaagagggatacagtaaagacgaatcaaaatggcagtgcttaaacagtttagcaatatacctgcagagatgagggtgtatcaatgctgacatcaccatcatcttcattgacatggactgtaacacctagaggcacttttccagggggatacaatgcccacctatttaaaacattatgacatcatcatcagaatgagaataatattgcaggaaaggaagaaaaattatttgtatttttgtccataaaggtgtctaccttttccgaccgcaaagcagggtgttccaggcgctggtaagagctgggtcaacatgccaagatgcaccagacctctccggaccaactataagccatctgtatggaggacgactttccttgtctaagatctcaaaccaatcttcttgaaacaaatggggcacactatagtctttcaataattctggagcagcttctccaaactacatgagatgttgaatccttcaaatattatcaccacaaagtttcggtactactacaactctatcactgacgtgaatgaagtctaatataaatggcaaaactgtttctcgaaccttgtcatcgaaagcgtatagaggatcttcatcccgctgagttttcatatatgcgatgtaatccttgaacttcatggaaattttgttggggctcctctgagatattctaaacgggacttcaccatatttctctgagagttggtcgatagtccacgtattactggctggccaagaatcagcaaggccagaaagcaaaacctaaatcatagacaggaacaacatcacatatctgaaaatgttttaacagatcaaaatctcatgtactagcaaagattggaactttacaggtttcttggcgtcgtattccttagaaaactcatccaaggagatatttctcctacgttccacattcccattatcaaaagagaacccgtcaagagatgtattacacctatagaatcgtttatacaagtacaacgacatgaatcctgtaaaagcgcagagtaagtgagcaaaaaaaaaaaaacgatcatatcataagagtatggaataaaccaagtatataccatcaaaatgaaaacattttctgtatgcgtcattttcttgagtaactccttctctgtatatcagaaa

SEQ ID NO: 28288 - DNA, 1228 bp, Arabidopsis thaliana landsberg
cattccaatatgaaaactcaactcgactccagttctagcgcatcggtggctgtgaccgtgacatcacatcatcacagtttttctgaaagagctgaatgtaggttttttatgaacactggaacttgtaaatatggtgatgattgcaaatacagtcatccgaaagaaagattgttacaatcaccaccaactctcttgaaccctattgttcttccagcaagaccagtaagtctcttgtccttctttgttattttttgccaacttgacatttccgcaactcgttctgtttattctgttaaagccaacaagctttggtgacactaatttctctcattttgctgtgttcagggacagccagcatgtggtaacttcaaggcctacggattttgcaagtttggagcaaactgcaaatttgatcactcaatgctgctaaacccttataacaatacgggcttggccatgtcttctctgcctactccttatccttatgctccacctgtttcaactaatttgaggatctcatcgccaccaagcccctctgatatgactaccctatccaatggtaaacccgctgctgcagaagctcaaagcttggagactgagaaacaagacgatagtccaacagaaccagaaaaatcagaagtggaggactcattgccaccaaacggctctgattcaacctccctgcccaatgataaacctgatgcagagactgagaaacaagacgatgattctgcagaactggacagctcaaaagtgcaggattcatctgataaatctacatgatcatgatcatgatctcacaatctggctgagtctttccctgtcaggggtatctaacggtctcaaaatgatctctctgccctttttgttaatttttttggaaagagggcttggaaatgttctatcttttttttttttttttttcttcttctttggtttcggagacagcaatggctgaaacaaaataggaaaagaacagtgttttgaattggttaataaaacttgacatcctttagcacaattttcagattctcaacatatcaagttccatgatttttctatttctttatcaaactgtatattcgatttccttgatgcagcaactagaaaatgttgaacctaactagtttttggaacccaacacaaatagtacccctctttctgagccagaggctttgcctaattaatgttacaaaagaaaacgaagcgacatcttatgctgatgtgt

SEQ ID NO: 28289 - DNA, 1964 bp, Arabidopsis thaliana landsberg
  unsure (1)..(1964): unsure at all n locations
tctctggctagaagcaaagataccaaaccacaaaagatgttactagctgaagttttccccaaaacacaacatagcaagcctgacaatcatcaacatcccattacctgattttggatggcggagtgttaacagttctccgggtttgtttccgccacaacctgaatctttacatatgaagcaaaaacatggtcaagttcttctttaaagcatctaagacttccaactatcatagccaaggaaagattcaactttaaatagtcatcagcacatcctttcaattatgatgagtatatctatctaacgaattaaacagtctaagtaagcttaccggatataactaaagctcatttcttattcaaacctaacttctccaatcattgatatataaacattgaccagcatttttcatagacaatcctacaccattgcagcatctaatttgcaaatccgtctcagaacagaatctatagttaaagagagaacctggggctatgagaactcgtgtcttctcagctccttcccaccaaacagtagaactcatcttcaagctttagcaaacctaaatttctacgaattcagaattctgacaccaataagacaaaagtcccaaggaagggttaaagagccataattcagccgacccaagtacaagctatatcaaactcatagaagacgatactctttcctaaaactgaagtaaactttacaaaagcctaaaacgagagctaggcgagaaaagattgaagattacgacaacccttaacaccaattaggtagcataccgtgacgacggcaagaaggctcgcaattagtgaggtaaatgaatcaggacgaaatctctgtaagacatttcatcgaacagttggtgtacaatattcaaccccaaaagatttggatcaaacagagaagcgacgattatattcaccagattggcgccataaccgaagtagcgcgcgcatttaaatatgggcctgcgctatcaccaaaaaagactaggcccataacaacttaaaaagaaacgcccgcttaagtctcaaacgctttgtttgagttggtttagtctcttcgctaagaaactagacatttttagcacgacaagtccaacggattaaacaaaaccgtcgagaaacttgcattttcaccaacttcaagaaaggacatacaacaagaccttctagagatgcaccattttgtgaaatcaaaacacaagtaaaaagagaactagttttataaccattcaaataacagagaaaaggctacattaacatacagagaaatcaaactatgtaccggaaaaacattggtacttctctggaaatgtttaaaccataacaacccaaaaaaaaaacaagaaaaaagctactgattaatactactacataagaatctaagaaacacagcaacagagagagagagtcaatcccaagactctctttaaatactacccattacaaaagacaaaggtaatatataatttaattttgcttgtgcttagtgttcatcttctacttcataatcttaagaaaagccaatcttcaaactgtacaaactcattgccttctctctccnnnnnnnnnnnnnnnnnnccatgttaaaattccggataaaatagcttttttagagagaagtcattgttgacgcaaagatggtgttcatgagtagacacgatcacataaactgtacacaacactgactggcttcttcgctgcacctttccagtaaactctttctagttttccgttgggtagagaacgtggaacgacggattcttggcagctttgttgcagtacagagtctagatcttcacaagctggtccaattagtcctgcaatttttaattcaaaaaaaagttttagttaaggtatgtgcttacaacgaagaaagaaacagagggcttttgcataatttttaatgttcccttcacctaaaaacagaggaaaagggtttccgggtcttgatttgta

SEQ ID NO: 28290 - DNA, 1898 bp, Arabidopsis thaliana landsberg
ctatatgctagagcattagggatagaagatttctgcatcttcttgaagaattcatgaactaaattgtacttctcacatgctaacattacctgcttagacacaaatacagactcactactcatcaatagcgttgaaatgaaataataattgttatgataagaagagatatttctcctccatgacgaggccataggttacaggagaaggtttttgccctcgttgcttcaactgttgcaatacccagaatgctccttcccattgctttcgttgaacacatgcgttgagcacctgtggttagatgtccagcattggcatcaggcgagtgactatacataagtatccgagaataagtgtaagctatatatattcataagaatgagataattataaactactgaccgcattgtaaacaacaacatctggttcaagccggggatcccatttttcaagtgttgttggcttgaacttctttttaggtggagacctcattgtgtcaatcacatagaagagttccttgatatgcccagcttgtccaagtgtgactgcaattgaacggtatgctaccatatccggatatgatgaaatttgtaactggcgaagaaaacaaaaagattaacttaattttataatttatatcaaagcaacaagaacatatacaagcatggcacaagggttttaccagcatagcgtggaatacattgagagcttccacaggcctccttgatttaccaagaacatttagtgcagttgtatagatgattctggatccaaaatggtaatttttttgtcagcattacgtttaaaaaaagagattctggacttctgtaagtgaaatcaacctggctcccaatgcaatatatccatagctcacttttagagtagtcagtaaaatatttaccttatcttgttagatttgtaacggtcttgcctttgaagccactcaatgacttgaagaactcgtctccagtttcctagtttccctagaaagtggatcagtctcattactgtgtaatccgtatatctgatttttgcactcctgatcgccttggaaaactgccactcaggcatattgatgtctgcaccattcaacctagcgaaataaacttccttaacataaattcagctgagtatgataataattgcataagaaatgtattaatctcactccctaatttcatctgaattagcacataattcaaatcaaaattcatgatttacctcctaatatttgtcttctatgtaatctaagaacatgaaccaaatctagttaatagcataaacacatacacttttgctaacttctcgattctgtcttccatttcgactcgtgaagtagctggcttgtccactatgtcactggactcatcagaaaacctaaaggcaggagtttccatggcaaacaagctatcatcatcatcatcatttctcttagcaccaattctcctggttccactcaatttgctacttcttatctcatgcctctcattggctaatctctcaatccgcctttcttcagcaagaagatccaatccatctcctttggaacctctctcaatccctctcgatgtatcagagacacgctgatacctcaccatctcctgcttcggattccctctcctgaaactctcatcttctgacacaggcactaaagattcatcactcttactccatcttacatctttggctattctctgaactctcctttcttcaacaacaagctccaattcatcaccttttgaacctcttgcaatccctctggatgtatcagaggaacggtgatgctcctgcttagagtatcttctcctaaagctctcatctttaggaatagtcactgaagattcaccactattactccatttcacagccactgaagattcacgacttttactccatcttgc

SEQ ID NO: 28291 - DNA, 1587 bp, Arabidopsis thaliana landsberg
tttcttcctggtcctatcaatatatatatataaattcgatacaaatcaaaatcacaaattttgcctatcatcaatctcgaaatagtatcaagcaagtcaacaattttgattctcaacattggaaatttatcgtaaagaagaaaggataattgattgttctttattacctaacaagtaacaacagaagatacgacagagacaaccgctggttctgaaggaagcttaagattattattaggtgtgtcgcggtgcacgagattcccctgcgcctgcgccatcaatatcgacttgtaaatctccacaagcattttctcatcgtactccttcgacgccaaacccgacccgtacccatattcgccgtacccgtacgatgatccgacgacccgagaattcgctaggcgcagcatcatgttgacgtaagcatctcgaagccacgttaaacgcttcttaggcgatgcctttttcaagatccttagcttcggcactatcttgatcttccaaaaccgtctcttccgtgtgggatccattttgacccgctttacatttctccggcccgagctcgccttcttggcagaaccatctagcctttggtatcctcttaacctccgccaataccttatctccatcacgatctctgctcactatgcgtattggtgtctagagatccagagagagagagagaatgtgaacagtggagaatgtagtgagagagacggagacactctaggtttctttataaagagcacggatcgatatgcattcgataacgtaatattcgatatagtagtatatattatctgttgcttgttgataaaagtatatatatatatatatatattagtatcttttttaatcattccgaaattattaatcgttcatgtgggaaaacattaaattattgctacgtacgaatttctcatccgacaacaacaacatgatcatatccaaaatgggaaagtcaatgctcaaatttatgaagcatacagagtttatttggggaaataaattcagaggacgcaatcagatgcggtttacaagcgagatgattgctgttgcaataaatggcagagatgtgtttaagctgtagtaatactctcaacccctgaacaaattctgaccgctggattctcttttcatgattataagtttttaaacaactaaaaaagttttttaaaacagttatacgtatgtttggccctttttttagattaaattgacgatttgtgttgtctcttactcttaggacctataatcagacaatttcgtataaatgcagactttaattaatactagtactaattaagaaacaaagaaccatcaaaatttgaatgtttcacgctgcttcttgtacgtttttttttgggttttaaaagtataaaaagagtgacgactcacaaaactaccaccaccaacctcttcctctcacgtcatttatgtgattgcggagtatccaatgtggcccatatgtaattcgtaaaaaggcctgatgtctggcccattatgttctgattatctctagtgttaattttttttcttttgaataaaatctctagtgttaaattaagcaagaggtacatgaccattttc

SEQ ID NO: 28292 - DNA, 600 bp, Arabidopsis thaliana landsberg
cttgggggacaaaagtcatctgaaaatgcatttctacgcccatcatcacaaatcgtcgattagcaaccataaaaaaaatagagaaacaaattatattgcctttcattttgggttgcgttgtggatttcacaaagaagtttgggccatgcattgtatttgggcttgtatggattattggatactagtactttgttgatttctaaaatattggttatctttgttaagtattagaatattgctagattgaggtacttgtaaatacaaaatatatgttacctaccatttcataacaagtgtgatttcctgattagcaaaaaagttaaactattaacatgtaagcagatctaatttaatacagtatgattcttttatgcaatatttagaagtgtatccaaaagaagttgaatttcaacattttaaaagaagtataaatttctttggcgaacaaaaaaaaaaaaaaaagaagtctcaatctaggtaatcatagatataaagagacagtcctatatccagagagttagacaaatggaatagatctggttctgacattttgtccaataaaacgataaacatcagttgaacttacacgtcgacaaatgt

SEQ ID NO: 28293 - DNA, 1194 bp, Arabidopsis thaliana landsberg
ttttgcagttaaagtggatgaagaacagaattctcagtagtcacaaacaccaacagagaatcacctcttacataaaccaacttccttttcaacccggaaagagcaacatttcttccaactaacttcatcaccacaggatgccaactcgcagcctctaaaccacagaagtaaacaaatacagacctctcataagcgtgaccgcaatcaatcgcatcccggctatacactttacactcacaagccatgacatgtactaagaacccaggaagatttacagaatcacttgaaaacccatccatacaaggaacaacagacacagggctgatagactctaacacaccacaaacgctgtatcgtgacttccggtcaccgctttgcgatgaatacagagaaggaatcaatggaaacgaactaatttcagaacaccgagaaagcatactaccactatccacaaatttccacttgataatctccaaaaatccaccggaatgcttcataggaagaaaattccaagatagaacacaaatcttacttccaatcgcgcggatttcgaatccaaggatatcacagcagattgtcaaatcaccgtctgtgaatcgaaagcagtagcgattcggacattttagggtttcagaaggaagagctatcgtcccgacgataaccgctgggtgattcagtggtgtgagaaacttacggctaaagtctgaatcaacggcaccgtgatgtgatttagggttcgtactggctgattcggaagacgagtgagaagcagcggaagagaatagcgacgatgcaccggtgacggcacggccttcgttgacaaggtccttaaccgtgagaattgtggcgttctccatttgtaggagctctgagtatttttagactcgccgtgatggttcggtggctctgcactcgtccatggactgtaattgtaattgtggagtgaatgaaaaaaagagggtgaattagagcgggaacccgagaagagtgacccgaattttgacccgaccgggttcttcttaattagaagctccaacttcatgccgtttaggtgtagcgtccacgaaatggctaacactttaccattgtgtgatatttagcctatagactatggttatcaaaaactagggttagctaacagcaaatgaaccaaatgatgttgcaaacagcagtgaggttcatttgcttcatttt

SEQ ID NO: 28294 - DNA, 1763 bp, Arabidopsis thaliana landsberg
gaaccattcattcagagaaaagttaaacctttttctcagcctatttttgaatgtagcggtcttttggaatatagggtgccattcttctctcttgcgcagatacctctaagaaaatagaggaaagttattaaggaatgccttgaaactaatggataaaatgatcatactgataccttgcttcagactgtcaatctcagagtacagatctttcatgacagcagatttcatcatcttctggttgatctggaatcaaagaggaagctgttagagctgttgttttattcaagagataatattgcagaagaatgtcgctaagactcacctctggtttgttcttgatattcttggcgcgatgtgcataatccaaagtgcttagagtctcttctaaacagtggatggaaggtgaaattgtggcgattacacaagttttcgtctttcctcccaatgattctctcaagagcctcgtcaatttgctatctctgaaaattcaaaagcaatagctgagtatactctaatgtcaaaccaatactgaagacaccaagaacaaggagattacttattatcgttttctatcaagtgatcacttgtacctgtaaggaatatgaccagagtgctccacaagcgcgttaatgacacggccaagagtaagtaaactcttgttgatctctccagcttctctggctcgtccctgcaataacagttgtcaaaatgcttagcactagcttccatgactgcctggaagaccctgacctcagagacgatgataataaaataaagtatacctctcgtgcaccagaacgtgagatattctaggagccagcaaggtcaacaagatttagtttcccacatttgatcatctcttctccctgtggagtattttccttgatgtgaatggttatggaaaatattgaatgagagcgacgactttgcttattcaaaagagtttcagctgtacgccttttcgcggaacctttttctaagatcttgtatatctcattcgctgtacttactatctcttcttctaacccacggacaaagacacttcctttcccgtcttccatgagggcaatcgattttttagacttctcatcaacaaattttatagtctcctctggtgctaaaagatctgagatttcctcattatatagttctaggaaggtgaccttcatgctatattcagccccctgagcttctaatatgtcgaaaatttgcttaacagctcttggaataacacctgcgtcactcgggaactcaccattctacaaatagcaaccgtagctatttattaaaaaccatgacaaatacatctgaatcatacagaatcatgttaggttcgttttagaggagccaacctttttccttgcacctccttccatcgtatacgtctttccagttccggtctgaccatacgcaaatatggtacagttgtaaccctcaagtacttcaaacacaattggacaaatggcttggtcatataagtccttctgttgagatgctggaccaaagacctgagaaggtcaaagagaaaatgagaaaattgagggacaagcatagtcaagaaacaagcttcaaggcaactttatcaactttataaccttatcgaaagcaaaatgtctatcaatatgctttccagcaatactctgagtggcagcaacttctctacggttctcattacaagaaatcaccaccggaatatgaattctagcttcatcctcactcaatggcctataaagaaccaaaaaccagcaagaaagatcaaaacc

SEQ ID NO: 28295 - DNA, 1878 bp, Arabidopsis thaliana landsberg
  unsure (1)..(1878): unsure at all n locations
taacttccaaggcttttgggtctttttatccgaacaggaggcgctgcattaccacacaataataccaagatgaatgttttcactttatacacaacactattgttccccttaccttagtataaagattaatgaggcacccataagtaacaactgttggagtaaatccacattcctatagcaaaacaagtaaatcaacttttcacttgctcagattctaaagaggaagtaagaaagaatccaaatctaaagccaaataataccttaagtcttttgaaaacaactaagcctttcttctcatcagcgaccattgtataaccatccatcatggtgtggtagatagcaataggagcatcaataccttcttcttccatctccctcaccaatgcctctgcccgctccatattgcacgtctgactgagaaaatgtccataatcttttagaatgaagacaaacatcactaatagagtcagaaatcatatcaatgcttaccagtgtgcatatatgatttttccatatatactggcattaagggttttgtgtatccgtttggcctcgtcaaaccagtaatctgcagctcttccaaagacaacagagtatcagatcgaattagcatatacaatgattaacaacgtttaccaatacaggcaggcacaatattttacttactcggcatgtcccgctttagagaatcctccaacgattacactataagtcaccaaactcatctcaattccttcttccttcattttacgaacacaagacagtgcttcgtccatgtctctaccaactgcataagcgtgaataaggctgcatgaaacaaatcctcttttaacctttgaggaatcccaaactaattacacaaaagataccaatcaattttactttggaaatgagacaagagagtgaaccaattcataacaaagactttatccatgaaatgtttgactaagcagaatctgaacaagagatgtaacacattttgtaccttgtgtatatacgtgatgttggtgtgatacccctcgcgcgcattctctcaaaagtctcacgtgcacgatgcatatcccctcttcttccatagaacttcaccatcaaaccaaactctgtcctcgaaggctgagtataaacattgtataagtgagactttttacattattcatcaattgaccaaatgataagtcaaaaaacagagcaaaagtgattgatgttaacaatgacaaaccttgctgatcttctcgaaagctgaaataacagcttgccagttatctccattggtatctaaaatcctctgtagtgactttcgagacccttctctctcttgatgccacgacgacttattagacattttcgtgtcttcttctccttcctctacccacctcactctctgttcagcctttgttttcagcctctttccgtcgtctagcttcaccgtcaatatcctgccgtgaaactcaacgccgtcgaactccacagctttcattgcagacttctctgccgcgtaaataatgaacccaaatcccgcgtttttctcgacctcgtgatgtcctttgattagaatcacattctctatcggtccgaactgtcggaagaactcttcaaactctggtttctttatccatgtcggtaaattaccaacgaatatcttcccttcttgtcggaattcctgttgcgggtttcgagtttcttcttccggtggtttcgtgtcactccgaaactcatctcggaattgggtggtttcctcaacaggaggcggangtggaggaggaggaagaggagagagcttgctggacaaacgtagcttggatgctagagaggagccaaaggaagaaactttactcgaaacctctgattgaacaagaggagacacagaagagcgattgg

SEQ ID NO: 28296 - DNA, 1204 bp, Arabidopsis thaliana landsberg
  unsure (1)..(1204): unsure at all n locations
tcagattttcgactttattcgacttatggggccgttagattgccctactcttccaataatgatctatggaggtgcttctacgggaaaaaccagtgttgttcttcaggtgctcaggcatctcaatcgtccctttgtttattcaagctgtcgtacgtgttacaatccccgtatcttgtttgagtcgattctgaatcagttgttgctacataggaagtgttctttaaacgggtattctagtgcgaaacgatgtgacaagccatctgattttgtcaacttgcttcgtgaagcccttagtagtgtgataaagactctcgagtctacttccggaacctcaagatcagataagccggatgaaaaacccatggggaagatggtgtacttaatacttgataatgtggatcttatcagagactgggataaaggcaccatcattctgcagtttcttttcagtttgtatactgttttgaagatgcctcaacttggtataatacttatcagtggtttgccaccagatgtgtattactcaaacatgggatacacagatcctatacctctttattttcctgagtattctgaagaggatcttcgtcaaattttcttgagaaatcaacctaaccgaaaattgtactctgcattccttgagtaagactgtagtgcaaccttgcctccctactagctttctctatcgtttactcatattgtgtactgatgtagtttttggtgtcaaacagcgttgtgttgaaaccattctgtagagtcaccaggagagttgaggaactgtctactaccttctcattattgttcagaaagttttgtgagccacttgatgatttagggatttcaccaaatgaagacatgaagagaaggctatatagccatcttaagccgattattgctcattgcttaaatgagatattcagggtctctagtcaccctcatgatggcgaaaccagaggcgagagaaggcagaaagccagctacagttctgaaaaccgtgaagaacttgaaatattggacttccatatgtctacttcagcaaagtttcttcttctttcggcatttctcgcttcgagaaacccagcaacgctagacgcgtcaatgtttgactccacaggnggaatggataatcgtaaaagaagccgaagtaagctccaaaatattaaccattggatattgcttattggagtgaaattctcatgatgca

SEQ ID NO: 28297 - DNA, 1565 bp, Arabidopsis thaliana landsberg
cgcataccaatgaatttcggaaattgaaaatttacaggctatgctcttagctctgttgaaggaagggttgcaatggagttttttgatctgtcagaggctgctcaagctaaaaagtatattccttgtgttcttcttttctcttttccatgactttgactgacaaatgtatttgaacttattctcagatatgctttcaaatgtcatcggaaatcagaggctggaagggacattgtttaccctgtaaattccattgccttccatccaatgtgagttcttgtcttagaaggagcccaactgtttcatagatttctatatttactactttttcaaaacacaagaaggttaagataatactccaactaaataagaaagtaggaaaaatattttcgtgtaaagttgttcagcccttgtctgctgattgatatgttaaagatgaaattctaatgatgaagagaacaaatcgacttggaaagctgcttggatgcttggtctgagaacttatgggatataagagcaaatgaactaatgctaatatgctgtgtctgtaaacagtttctgtaattagacaaaatgttagcttatgctttgtctgagaactaatgggaaaaatacaatgctgagaaatatctcctgtatagctactttcctgtgtaatcatctgagatttttaattgcagctatggcacctttgcaactggaggctgtgatggtttcgtcaacatttgggatggtaacaacaagaagaggctatatcaggttagtaatgagcaagatctcttggttattattctttcaatgttagtgtggcacaaaatttatttgcctccttgttccttttgtagtactcaaagtatccaacgagtatctcggcactgtcattcagtcgagatggtcagctgctggctgttgcttcaagttacacatttgaagagggagagaaatcgtaagtaacttgttccctttctaatcctttgaagttttagaatagtatgtctttgaaatctctgatgatttgtgcattggtttgattggttgcttattgagataacatagcagagagtaaccctgtgccttaatcttacagagattatcacaaacaaattaatgctttaaaggcaccctttttgtctttgtcacaaaaccgcacacttaaggatagtaatctctttgtatttggtttcaagttagaattctctttgattgggtctctgtgtgagaggttttgcaggcaagaaccggaggccatctttgtaagaagcgtgaatgaaatcgaagtgaaaccaaaaccgaaagtatacccgaatcctgcggcgtagaaaggaagaaacacaagttatttcctatgttggttgtttttgtatttgctaggagtgttccaaagattgaatcaacgtatgtttgagcttttaaataactagtgaaatatccacattcaccgtatatgtttaaatttctgtagtcaaactctcttgtcaaacatataatataagatgacaaatttccagtgtttaaaagatagaaagagatcattctacagattctacgttgagttcaaagtctatttt

SEQ ID NO: 28298 - DNA, 1705 bp, Arabidopsis thaliana landsberg
  unsure (1)..(1705): unsure at all n locations
gaagattcggcatatcatatggtgcctcttgttgtttatgaggaaacccacttgatcctttagactcgcccaaataggcaaatccttttagtaggagccccatgtagtgtgcgtaataatcgcatcaattggatagactgagctgcatagtaaaaaaataaaaatatattttcttataaagcgtatatatagtaatattataagagacagtatttgatcgcagtaattctacgtcttccgaggccacttaaccaagtaagtgagtgaatttctacacctcttttagttcttcatctacaaaatatatgaaaaaagttaaacgtccagagttgaaattcgttatttgtaaaatagaacaatggttttatactgatgtatatataaatgatgtgaaataagaaaaagtagtagcaacaagaaagggaagataggtgggggaaaagggagaaaaagaagaaggatttgcgcatgcctatatatgtataagtaagtgagtgacttgtgtgaaaatgaaacaacgtgtgaatccctttttgtctctatattattttgttcctcacctaaatttnnnnnnnnnnnnnnnnnnnngcaaattttgtagtcatgtggaccattttatatccaatttgatataaatttctcatacaattcaaagattttacgaaaaataaaaaaggtattgtggtcggtcaagcgcatgcctacgaaaacaaggtacgcagtatcaaaccttcagtaactagccatcatcttaattgtttggagtagattttaaaacgcatacaaagaagaatccaaagataaagtttatgtgttttcgaatttaccatgctatattatgtgtgagggaaagagaattaatagaaagtgaaaagaggatcgacaaaagagaaaagaaaaaaagaagaataattaaaagaagatatatagggatcagtgcttgacttgactgcagattcagttgctgtcttaactgcctcatcttcttctcattttccttctctcattcgccaatcccaataaggcaatactcatcacctaaatctatctctatatagctagttgttggttggagtatatgattctactcactttacattaatccaattaccggaaagctgctacaacaaatcatataactatatatgaatattcaggataaaacgttttagttgtcgtaaatccttccaataggttcaataatgcttttgcggcatatttggtttcggaaatgtaagaaaataaatattcggttcgattagtttacatgttaagcccaaaatatatacatacaacgtatatttgtgtcattgtgtgtgtgagtgtgtttatttctatttgtagatgatatcatatgtgttgtgttccttgtatactacacatgcatgtggttgtggacatatgagtacaagctagggtttggcgtgcaatgaggcctgtgttatagcatatttaggcactacaaactttacatacaaatgtgaaaagtttgtatgagagatattatttatatttattgtagcggtacaatgaattagatattctaccaactcaatcacaacatgaattatgaatatgtacctttgctcgcatcagatttggcgtctattatataatctgttaataagactggtctactataaatacacgcatgtgacgatttaatccaatcccaaccaataacccattaaacccatataaattt

SEQ ID NO: 28299 - DNA, 1371 bp, Arabidopsis thaliana landsberg
aattggttaacctttactccttaaaaattttcatgaaactattacaaatcagtgaacttttaatgtgatacatgattttaatgagagaaaaaaacaaagcatgtttgcctaacccttcaatggaagtggctcaagaagttgacaaggaaaacaccatgtaagaaacaaaggcagtgaaaaccgaaaggagacagtacctgaaagtgacagccattacactatcgcccacagcaatcaagttataagcataccagagatcatcagagtcctctgccaccatctaccctcaatttaagttgccaacacccacaggacaaaaatcaaatttcagctaagcatttgaattgcacacgaggaaaaaggaatcaatcaaaccttaacgcttccgggtccattacgaacaaaatccctgcgaacgatcttcatctctcaaggtatgtccactaacagagtccagagacacacaaggacagagattaacactagtctcgaacaaaggttcaatctttcagttctcatgttacagcaatttaatcaaaagagagaccaatgcactggaattggtaaaatcggcgaaacaacacggtgaagtaagatacataaattacaaacctgttggaagagttacagatacagggcttcagctcagactccggctccggctcggcgatagcgagaacttgtatccgtcgtctatcgattgaatcaaaagcaaaagggtcagtggtcgtaagctgctgcagagattcaatccgtagacacgcagtttcgacttcgaagattcgttccacagcttctcaattttaattaccagatgtcaaaagtcaaaataataaaaagctattatatttatagtaaaaaaaaaggtaaaataaattcagtagaaaaaaatagaaataggaattgcccaagttttaatctcttgagaaaaatagaaatagaaaatcataaatatttggaaaagtgtgtcaaaaattagttgagcattttttgaaaaaataatatcatatagccgcctcattatcaagcgaaacgatactatctgacagaaaaattaaaccttaaatctctaatattgatttttttaggcagaaaaattgtctagattttatttatatgcgagttcaaaatggggttttgtatataaaatttataaacaaaaaaacttctcaatgtttaagatgaaataaaaataagtcaaatgatcgggtaccatatctaaagtctatgaaactttatttatatgattaagtatgacatgtcgtatttctctcatttagctttgggattaagaaacagccgcacataataaacatcctctaagtttaaaaaacatctaatcagagatatttctgatgcatataatattgt

SEQ ID NO: 28300 - DNA, 1778 bp, Arabidopsis thaliana landsberg
  unsure (1)..(1778): unsure at all n locations
ggaacgcttatcggactctcatctagagagaccgcctccaaaactggtaccactgaagaagatttatcttcgactttcttgttcttggggcgccgttttgatttgacagtagtggcttgattaccattgctagcaggtgaggctgccgttgatagttccgccttgatgccactgctaccatctccaataactggttcagtagaagtcaccacttcagcttctgaggaagccaacacattatgcttctttcggttcttgttaaatttcttgaaacctactttattcccaccagccttctcatcaccaccaacaatgttatcctgctcctgttttggtgcattgcttgcttttgttgaggtccaatgctgttgttctgacatggaattcgatggagtagaacttttgggcccctccacattggttttttttaccacctccttctgagaactgtactgttagaagatatgagcaagggtaagacgatgattcaaaaaactttactagtttaatacctcagcagatgaagacttccgatttccggaacccgaatgtctaggcttgggaaagctttgcaaactctcgtctacagagacggtctccaaaaccgataccgttggagaagatttatcttcgaatttcttgctctttggctgccgttttgttttgacagtagaggcttgcttagcattgctagcaggtgaagctgcagttgatagtttcgccttgatgccactgttaacatctccaataactggttcagtagaagccaccacttcagcttttgtggaagccaaaaccctatgcttcttccacttcttattgaatttcttgaaacctattttattcccaccaaacttttcaacaccaccaacaatgctatccttaatctcagtactagcgacttgagaaaaatatctcctcgcaaacggtctgaaactatatccaaaggcccttgaagtggagctgctccaatgtgttgcataactaagagaaccgagaagacttagatgcgaaggaagtgcacaagctaacttaagacaacttgaattttctcttttaaactgaagctgggatacatttctatacactctatcgacccgaactactgaagaggaagaggaagctgggaaattttgaatcgccctgcactgcaactgcaacaacaaagaaacaagtaatcgtcagaatctccatgagttctactgatgaattttcaaacacatctaaataacataaacgaaaaattgaagctcactgaaacaaattcgactccatttcaatacgaaaacgacgagagtataatgatttagccataaaataccaaactttttaaattgagaatctaacatttcagtatctcaccagcgtaagagtcgaaacacaaaccttagccatgagaggatgaagagacagaactgaagtcgaagaagaagacttagcagccgcaagtgagatggttctctgcattgagaatactctgtttgattcagaaactttcaaatcatccgacgagtgaatccgtagcttatcataaatcgagtagaagaagagagannnnnnnnnnnnnnnnnnnnnnnnnnnnnnnnnttcttaagggtttactcagtctctggggtttatctgcttagtgccttctaactcgggtcgggtataaatcaggatcaagtagatccgccaaattacccggtcaactcttattagtcaaaatagatttcgggtcgggttttcgtggcccaattaaaacttttgggtcggtttttcgtggcccaattaaaact

SEQ ID NO: 28301 - DNA, 1415 bp, Arabidopsis thaliana landsberg
atcaatgagtacatgaaactttttccttgagagaaccggttctggtcataaaatcctgggaaaacaaaagagaaaagaaaagaaaaaaacccaacatttcactctattagctagctgaacaacacagatcaaccactaatccttttacaatgacaaatacacaaatctttactcttctaaaattctgtttacttcaccatcatcttctcaggctctcgaagtgacctctctctctctctctctctcaattagttgctaatgtaaccgttgcttcacacgtctcccatttaagtcacaaccatcagcaaataactcctttcgatgccctgatgatgttaaagagtgctcactcagcctagccacatactccaatagctcacttagtagggacgggcagctttccttcagataatcaaacccatccgtttccatcacagctaaagaaattacagacaactttttgttacaagggcggccttcagatttcagacatgatcaaagcgattcaaacaagcaaggagtgatcttctgtacctttcaggttttctggcaaagctataaatttgaggcaggcggctttcagctggaaacaatgatgctgctctgcaagagccaaggtggttgctaccgtatttatgctgattccttcacagagttttgactcgcatattgttctaagccgctcaaaagcataacggtctgcagctgcaagcagatgctgagccacaagagttgatgcccatttcaagtctgtgccgattaagtcttgcatatcaggcatttcatcccagtagataaaatgaagcaacatctgcaacaacaacaaaaaagtacaataaaccaaaaggaagggaatttgtatcaaccttaaatttacaggagccatgatctaaaactcgcacatcgactaaagaccaatcttaacaaaaaaaagcaaagctgaaaagcagaaaatttgacatgaacatgatgatctataacataatttctctatgtatttactgcatgcgggaaatcgagacaatcatgcaatccaaaagaaaagtagaaagattaaaccttatcccgggtgagtaatatttgagaacgggagcagcaccccaggagaaggtcccggattgtacactcgtaaacagaaaatcctgtatcacaccacaatcactcacccgagaaaaggcaaggaaccaagaaagctatctcttcttataaggccttatacacttaggactaaaactaacagcctcaacttctaaagctacaaatataaaattctacaaagtcatgccaaggaaaaacaggttttagtccagaaagagagttaaagggagaaccttgaaaataggggcttgtacgtcttctatgattatacaaatggtattttcacttctcaacgggccaaaaagctgtgccctgaa

SEQ ID NO: 28302 - DNA, 581 bp, Arabidopsis thaliana landsberg
ttccctccgtcaaaatcaaatcttttatcataaaatttgcttaaattcagtaaaaaactaatctttgaattttgtgattttcaggtttcgacttcttctattgaatacggtgtagttcctgacggaaacacaaacaactctgttaaccggagcacgatcactagctcgacgactggtggtgatcatcaagcgagctctatggatagagaagctagggttttgaggtacagagagaagagaaagaacaggaaatttgagaagacgattcgttacgcttcgaggaaagcttatgcagagtcacggccaaggatcaaaggccggtttgcgaaaagaacagagacagaaacgacgacattttccttagtcatgtttatgaaaagcagcacacgcacagtacggtgtcgtaccaacgttctgattcgaatctacggtggataaacaatcaacctgaagatcttcatatcttccaccgttgatttacagtcggtgtataataagtatagtgagtcttaccgtagacaaacatcttatcctctttaccgttttaattactttttttttacgcgctctcgctgcccctg

SEQ ID NO: 28303 - DNA, 2524 bp, Arabidopsis thaliana landsberg
  unsure (1)..(2524): unsure at all n locations
taatggaaaaagttggatataatcgttagcatactcttatcggaagtaggattgttttctgattcgagccatagcacatggtttcatagagccggacgattctctcgatctaaatcaagccggttttacatgaagaagatttgactcggcatgtactattcgatacgggtaagagaaatgatattcttttcttaaacttataaaaatagagaaataaaaaccaagtcaaaatgatacggataaatcctttattcttgcgtcaaagatctttctatttccaaaagaactggagttacatctcttttccaattacattcaagagtttcttatgtgattccacactctttaagacctcgaaaatttgacaaattccctttttttaggaccacttgcaagataacaaaaaaaaaaggaatgattaccacacgattaactattttatttatgaatttcatagtagtagaaatacttgtcttagcaaaacaaaatttgtagtagacatagtagcagttttcggaaacggacctctcctgaaggtaattttaatgtggaacccgctgctctagctaattgtccaccttttccgagtgtgatttctattttatgtatggacgtgcctaaggacatattggtaactagattcttctttttgatcaatcaaaaccccttaataaccatcttcctctttgatgaagaagctttcaaagttgaatcatcaacatgtttattgctttcaaccatttttgtttcaagatcagcaacatcatgatcttctgaaacaacatgtgtgtctccgagattctcgatgaatccaccattatacttaacctcatacgttgatctattacgtatgtagattctgcatagaactttggcccgtaaaaacaagctccatatgcaattagtattatgtatattatcaccggattatgaactctactatatacaatacaacacttgtagctagcttgttctaagaaaggttactaacaaaattaactaataaaacacagcagaactattcagcctgagcttctcgtgctctttgtactttcaggtcatcaagataattctggtagatataaaacccgaaccccatgaaggcaatgagcatcgcgaccatcttaacnnnnnnnnnnnnnnnnnnnnnnnnnnnnnnnnnnnnnngaggcgtaacaatgagtgagagcgtactaatgacgtttgagaagagcgacgtcaccagaaatatcaaacccacgactccaacagaacacacttgccaagtaactgctgtccagaccaaggtcagtacataagaggcttgccctttatgataaccttccatttccccatgcagcgttctccattccccgctagcaaaaagccctataaccgaaacacaagtcgccactaaagaagtgtagatttgcatttcaagaaccacagaaaacgtctccctcttcagaatcttctcgaacgagaactgcataagagatagcaacagagaatagagagcagacgcagcaagtgtacacacaaacccaacaatatacttagacctggagacaccagaaggagtatccgcatcatcattgagagctatcaaagcagcggagaacgacaagagaacaacggagttgagaatcaaagcagtgaacttctgagcattgatgaaataagagaacaccgcgttgaaagctaactgagtagcgcaaatgagcgaatacgtcgatgcagagaggtacaaaagtccaacagagtataacatattatctccagcaatgatcacaccgagcaaaacatagatcaaaacaatgtacttgagtgaacacgaactctccgaagactctacactagccgaagacggaagtagcaaaagcgggatatagagtataggaaaagcagccgtttgaacaagagttgccatccatttactgtttccaccttcatcatagtaaaacctaccaagaagaaccgaagcagcttgaccaccaataaggaaaaagatgttaacggatacaagaacccaccattgccaacttttaagcttcaagagtggtgttggtataccaaccacactctcttctttcaccaagattggttcttgattacctgcaaaaatacaaactttaaacaagggtttggtacaattcacataaaagttcagctttttaaaacccttacctaaagcttcaacataattcaagaactacccataactttgaaaacccgaaagcataatctaacacataatcacaatctgggtatgtcgaaaaatcaaaactttattggaaaaataacacgaacatgcacagaaatcgaaagatgaagaaggaggagaacgagacagacctgacatagagaattggtttcgcaggaagcgaagatacagagaaatngaaaattttatgttcgtcttcttcgagattgattgttcaccgaagattngaatgaagctatngatngttngcaagtgattcgacgcagacttaactaaacactttttgagtctttgacttttgtattagcccatatttttaaa

SEQ ID NO: 28304 - DNA, 973 bp, Arabidopsis thaliana landsberg
ctacttgaaggatattattatcagctgactcactcactcactcactcatcctctagatacctgcactttgatttccatcacatctgtggccatattcactttgagcgcttagcaattttgtatgaaccagatgaaggatttcctcgagaaaaacgggtactactttcctcgtacatgcatctccttgcatataatcttgaattacaaaagagcttactactatacgttgaattacgcaggtactttttgttgaatgaaaagggtgagaaaatgaaggagcagcttggtattgtgcgaaccaactgcatagattgcttagaccgtactaatgtcacccaggctagtcttagtatacaattcttagacacccccttgtctcttttgtcttttctctttgctcatcctcctgccaaaatgcagagtatgataggccgaaagctgttggaacttcaactcaaaaggattggtgtttttggtgccgaagagaccatacgctcgcatcaaaactttgacgaatgctataagatatgtcggtagtttattctccatgaatatcttagatatgcaattttaaactcgattatatctggtgctgcttatgtttttccttcagtgtgggctaatcacggtgatgacattagcattcagtactccggcactcctgcacttaaaggagattttgtcaggtaccttcttggtatgtacatatattcccaagagaagagtgtttccacatgccttcctgcaactttttttttaattttaggtatggccaaaggactatccaaggagtccttcaagatggctggaatgccctcgcacgctactacctgaacaattttgctgatggaactaagcaggttggtgactccaactataccagtttacgaatacttgtatctcaatctcctctactggctgattataatcttcttcttggctcccgacaaaggatgcaattgatcttgtgcag

SEQ ID NO: 28305 - DNA, 1741 bp, Arabidopsis thaliana landsberg
atcgtggaggcatattctgcccttctacttgcatttctatccacagaaaggttatttatctatatcttccttactacctttttaagtattctaattctcgaaaagttgtaacataatctcttattcttagcagtagaagtatacgaaatgccatcagagattatctcccaaaacgcgacatggcaattctggtacccgtgttggatagatttgtggtacgttcctctaaacccttcatatttcagtcttagtagtcgatgtggtatgcgcactgaaaccttttgatgcgaccatgtacttgttcttactgtgttaggcgtttcatacaacactggacatgattcctccagaaacacataaagtggttatggaagttatcgagtcgtgcaaattgccatagaacggagggaaaaaaacaggcgacatcttcgttctcctctcactgtacagcttctgccacactttgggtttgctccacacttatagttagtggtctcacacaatggaacatgttacacgtataatatagacacaaatagagtatcttttagttctttcttttgaggttttgtttttttggttcagcttagtttagtaattcacatcccccattcttttgtacttttgtcatacaaagaaagaacaaacagatatatagaaatagattgcttaatgagagttaatcatatcgtatcttagtatatcgtttatttgtgtgctcaaaatcacattttctttgttattcataatcatcaatattggatttacgaggcttaatgaaactatgaaagagtcataattttctagcctaaagaaaaaaattcttttttttttctgactcattttcctctagtataagaaaatatctttgtttttgaacaaatatattaatcaatactcacatgaataaaaccaatttatgattgagaacgaattagtgataaactaagataagtgataatttatagttttgcaataggaaaagtgtaattaaaatcaacatttttaacaagttgaggattttagtgatattttaaacgacgaaacgaaataaatatcaaacttatgtcgagttttcaaataaataccaattttgttgactttccaaataaatactaaactttcgttgacctagtcatattagacatgccgttaagtgggataacacatcctgtttcaattaaacgacgtcgctttgtttttataaaaagcaataacgtttgaattaacgggtatgttaatagaaatttaattttgttaacgggatctgataatttacttaacatcatgcttaacatgaccatattaacaaaaatttggtatttatttggaaagacaacataaatctgatttttgtttagaaaatcaacgtaaaattaatatttatttcgtttcgttagaaattaaggatttaaatgaatgctttcaataaatcgggaattttagtgacatttttcccgttttgcaatatttacattgaaggggtttttcattaaatatatagtttttcccttgttcagctcttcttcttaaaaaataaaaagacttcagcatctgcttcctctcgacaatttcgacattactctttcgtttttcaccccttccttcttctcctttagccgcccgtcgtcgatctctgcaacactttccgacgatttctaccagtctgatactcaagtgagtctcccttcaacttttctcttcttttctatacccttccctctctctatttaccttttct

SEQ ID NO: 28306 - DNA, 901 bp, Arabidopsis thaliana landsberg
ttcacaggaatatttacattttaagtcttccacacgtagttgaacagtagtaagataatattattaactaagtcaccttctccaaaaaattccaaatccctggtcttagtttagtccacattcccatgtgcaggaaacgaaagagatgtctatatggtttctcacgatcttgttcttccttctttcttaatatctcctcgtggcgggattcaacctcattaaactgaaaacgatagaaacaaaaactttagaaaaaatataagaaaagtaatcaaaccagaaggaagataaactaaccttagctgaattgagaagggtgtggtctatatccaagacaagagagagcttttgagatgcaaacattttattctgttcctctaacctacgaactctctctctttgaatagctactctctgaatgtcatcatatccttcaaataggtgttccacatctccccaactgttcatggaacgagtgggaccagctgcagccgttactgatgctgctgaaactgacacatcctcatcctgggcattgggatttgaaggattatgtttaacatctctctccgtcttaagctgtaccgaatgcatacttgctgggggattgccaagttgttgtgatacgacaaccatatcagcaatacttttcaggtttttggtgaattgtgttgaaaagtctggtgtcttcccactgagaagttcacccgaaattttcattttgctggtaccattctggctaatattttgccgtggatcaagctgggaaggtgtttccaaatcttctgccttacccttcatagtcaaggttcctagagtggaaggatcagtcactttggtctgcttttccattgaagagtccgttctttgaagagtacttccatgcaggattcggcgggga

SEQ ID NO: 28307 - DNA, 741 bp, Arabidopsis thaliana landsberg
tgactatagttgcaggggttgacttgaaaaccgcgtcaagcttctctgcttttatggtaaccgggggatcaattgctaatgtaatcagcaatctctttggtggtaaagcattgcttgattacgacttagccttgcttcttgagccttgtatgcttttaggagtaagtattggcgttatctgcaacagagttttgcctgaatggctcatcactgttcttttcgctgtgttcctcgcttggtctagcttgaagacttgtagaagtggagtcaagttttggaaacttgagtctgagattgcgagagaatcaggacatgggaggcccgagagaggacaaggccaaatagaggaggagactaagaaccttaaagcacctttacttgaagctcaagcgaccaaaaacaaatcaaagattccatggacgaaacttggtgtcttggttattgtttgggcgtctttctttgttatttatcttctccgtggaaacaaagatggcaaggtatgttaaataacttcatcgatcgataggctatatcgaatttgctacagcgaaaatcgactgattctccttatgtttgtgtgcagggaattataactataaagccttgtggtgtggagtattggattctgctttcacttcagatacctcttgctttgatttctcacaaagtcggctctttcaagaaccgaaagtaaccaagaacaatcccctaacgatcaggtaaaatgcaaaagctgggttt

SEQ ID NO: 28308 - DNA, 879 bp, Arabidopsis thaliana landsberg
tgtagaaatagttagagaaatgtgaagatagattaggaaaaagaaaagtttttgctttcttagaaagagagagatgtgtgtatatataggaaaagaaaactcttacaataaaaattaaaataaaaataaaaataaagatgtatttactcaactcatacggcgtttttgtattggaccacgggtaaaaggatgggtctgattttgaaatgtgttccactctattatctgtctaaaatttgcgtttttttttctcccttttttccgaaaaatgtaaaatattattaaattatcttgattggtgtaaaagtgcgttttaaaaaaaaagaaaaatcaatatccacgaatttaacgttatcaatcaatacctaaatattgtcaaactaaagacaaaaaaacactaaatcaacttgtagattcagaaaactaaagcgtcaggtctagggataatctcaggaattagatcaaactggatatctagttatgtttaggattgttaacacgccgttctagaactcaaaatcacttatatagagtaaccgacgttagcccgcattactcactatgcctactaactaaggattccgacgttagcccgcaaatccctaattctaaacatgcattattatcaggtttgattagatcacctatgtatctagaccaacgttaatacacatcttaaatattaggctcttctataatagttctagcaataagaagcctttcggaattacctattacctaagatcaagttctaggcgatcaatctagaactaagtagaataacaattaagatgaaaactcttaaaataatccttacaggttatcgacctactaatccatcgtaaatcctatagaaataccctaaacccaacagaagac

SEQ ID NO: 28309 - DNA, 2734 bp, Arabidopsis thaliana landsberg
  unsure (1)..(2734): unsure at all n locations
attagagaaggaaagcaaaaaaaaagaaagatttaatcacccttttgggtacctgtgaaagcaggaagaagagaaacggttttaatttgatcagagcggttaatgcctcttggtgagaaaaattggggtagtaataaggaaattaaatgatctaattaaagtatgacgcgtgtaagccaatcgctaccacacagctacgacatcatctctatgaacgttggacgacacacagagatcctcttctccctctctctctctgtgtcttaatattattattttttcaataccaaactttggcaaagttcgagaagaagatgggaacttactcacggcgaaccatttaggtttttattatttcgtcaaactttggcaaactaatatttgtttagtatacattttgttttaaggatatcgttttacatattttgtttgattctacgctagcatatagtatttcaaaaaaaaatcaaattactccatttttggtattgtttattaggttaggtttgtgcctttgtggggaagggacattagtcacatgtatgaaggactcacgcaaaacgatgaatattgtatttaatggcttagttagatgttgtcgtatttaataataggttattaatttttaaagtagttcttttagaactaaataaagaactaagcatatttcagaactagataagttccagaaataagaaagttacaaacttactactattatggagacagtagtaaacccatgttagagaatttaaccaaaaaagtgaaaaaacattgaaaaaaagtaagaaaaagggcaagcaagagtcttcttcaggcgcgccgtggcggacatttgactttaagaaagaaaaagcgagatttgcgctgcggcggtgtaaaaatcagtcgtaaaatacacgcgtttgaggagcgcgtgtgaattttgacacttgtcagctgtgtgttagacagatgttgcggcccatgggccattgtcgtatcttattgcggaccacaggttcgtagaagcaacgcattgtataatttttcttcatgtttcataagtctaaaagtaaacaagcctgttaagtctcgctgtcttgtttaacagctaggccgatggatgcatttttctctagaggcttctaaattaaaattggccaccagaaacactatcttatgcaacgtcgagaatattgctaaagatgacaggaacaagtcataataatgacaaaaaagaagaatgtattcgagaaaatcacgactcttcgacgacttctttctcaaccaattcttggtactttgttgttgccttttcttcaaacttttttcttacattttcatcactactttctctatttgctacatagctttttttacatgttcttcaatttatgatgtcgcaatagaatttggacttcatgtgaaggaaatagaagaaatcacgtgaatggatccctaagcagaagaaattttataagtttctctatctacgggacaattgcaaaggcaaacttaattcacataaatatcatccaataattgctagacaatggtcccagaagttttttcccctcattgatgttggactactagttgtacacaacagagtataatttacaacaccactgaatacgtaaggctgtgtttaacaatataaaaaaagaatctaacctcactgagaatacatgaccttcgtggcaggttttacttgacccagttctggagtataaactgttgcatcaaaatcgccacaatgcttcccaagcttatgttgatcacgttgactacatcattgtttagctacacatagcaaaatagtgactaacatgagacagaatacagtcgagatcattgcattcttgtttagttggtaactaattgcaaggaatggattcataagacgaaaacttaaaaattctgtatgtattgaatggaaatcgttttccactcaagccagttatctatcagtctttctgcaagaagtgacggtatattcatttgattatcatcttcttgcattgacaacaagtagacagagtgagatcaataaaacaaaaagaagagagttcattgaagtgagcatacccatttgaatccttctttgtcttgaaaagaagcacctattatgctctcnnnnnnnnnnnnnnnnnnnnnnnnnnnnnnnnnnnnnnnnnnnnnnnnnnnnnntatctgtgttcaagatatcaaaaggaaaagaagtttaaaaatcgtgtaatgataacagtctttagtagcataaagaagctgtgaagggaaattttggtagcaaataacactattacctgacccaggaagcagccaacagatgcaagaaaaaatgatgctaaaagtccagccaatgttccttcaagactcatagctccctctgttcctcttggtacaatcttaaatgtcgtagctaaatacctgcgaattggcaatggttagtaagatcatttcagttgtcgattggattcatgtcatgacaccacaagtccatgccatacatcagacagaaaacagacacagaccataacagaagaggctatagctggataacagtagcatactcacgttgtttttccataagctttgcctatctcgctcgagacagtgtcagatactttagtgcagaaactggaaacaaaaccaagccggaaaagctgggaaaaagctgctcctcccacttgatatattgaaagaaaagcacagacacaaccagcagaacttgaaccaatcacactgcgtg

SEQ ID NO: 28310 - DNA, 954 bp, Arabidopsis thaliana landsberg
ttgactatatataataaatagtctatagtattttgagtctccttattgtcaatgaattcacgaggcattcatgattcggcatatatatattattcttcacattaaatatttttctctctatataatgtctatatgtacatacctagattagatatattttgatagttattgtagaaatattacaatcgaagcaatatgtttggtaagggggtcgcttagacttaaatcagaagatagaagctatatgcattattttttataaacaagagaaaccttttattaacaaatagaaaaaccttttaaaaacaagagaacacaaaaaaaaaccagttttattttgtgcggaaatccttaaaagtcgttagtttttacaattttaccttttatctcctaaaaatgccgaataatcctataaaatttaaaataattggcaatatatagtctttatatatatatattgtaaacgttttcaccatcacatacatttgatttttaaaattttaaatgtagtgttgagcttctcgtctcgaaggcttcaatttaatatataatttatcaaagttttaaaatcttggcaatagagaaaattgatatattatctattatattgaaatttttaagattattttgcatttttaaaaaattgaagggaaaattgtaaaaattggttactttttgagtttttgcacaaaaaccttgtttataccagttttattaagtttcttttttttctctacaagtcttgtttcaacaagtccaactgtgacctgaagtgtgtccaatgtggttcttcataaaaacaaatacaatttaaaaacaaaacacaaaaagaaaactctctatatatatatatatactagattttaacccgcggtacaccgcggagacaatttttttttttaagttagtatatataaaattttgcaaattatatctacctatagaatattttta

SEQ ID NO: 28311 - DNA, 1941 bp, Arabidopsis thaliana landsberg
tttattaggtatcataatttctctaatttaaatatgaaccgacaaagaagtaactcttctttttaacacttgtttggtcttatttggttatagccacttaccaggtaatgtgaaagttaacaacaagttgcgttaactttcaaaacactgactttgtttgcattgtcttgatttagaagctttttagctaacacagttgtctatttattggttttacagatacgcaggaggaagctgctgcagcatatgacatggctgcgattgagtatcgaggcgcaaacgcggttactaatttcgacattagtaattacattgaccggttaaagaagaaaggtgttttcccgttccctgtgaaccaagctaaccatcaagagggtattcttgttgaagccaaacaagaagttgaaacgagagaagcgaaggaagagcctagagaagaagtgaaacaacagtacgtggaagaaccaccgcaagaagaagaagagaaggaagaagagaaagcagagcaacaagaagcagagattgtaggatattcagaagaagcagcagtggtcaattgctgcatagactcttcaaccataatggaaatggatcgttgtggggacaacaatgagctggcttggaacttctgtatgatggatacagggttttctccgtttttgactgatcagaatctcgcgaatgagaatcccatagagtatccggagctattcaatgagttagcatttgaggacaacatcgacttcatgttcgatgatgggaagcacgagtgcttgaacttggaaaatctggattgttgcgtggtgggaagagagagcccaccctcttcttcttcaccattgtcttgcttatctactgactctgcttcatcaacaacaacaacaacaacaacctcggtttcttgtaactatttggtctgagagagagagctttgccttctagtttgaatttctatttcttccgcttcttcttcttttttttcttttgttgggttctgcttagggtttgtatttcagtttcagggcttgttcgttggttctgaataatcaatgtctttgccccttttctaatgctccaagttcagataagaaataaaaactaaatgaaccgtaaaacacaaaggaggctaagatgtctatgaatttctctggcatatgtgcaataaggaagagcttcaaggaatcttgaactaagagaaggcttcaaaggctagacctcttcaagttcccctgtcttattattgaccggactatgaagtttctaggaaggttatataggcaaaagtttattcctaactcttaatttcataattctgattgcgatgatttttggtttgctagatagtttagtaaaagagccttaccatccaaacttgtgatcaatattggtaaccgtgaacgtcttcattagggtgaatatttgaatatctttgttttcgggttacacataacaacccgaaaagttgttgcatttggctcggaatacatcttgtataaaaatttgtctttgctttttagttttgtaaatcaatagtatgattggtagtctattcgttttgtggaaacaacttcaatttgtatttcatcagacaatatatatgcattcaagtagaaaatcaaatcgagtaaatttgtagcataattaagtagagtggtcaatataataatacgatacatgataaaagtcttgaaaacattccacacacaataagcctaagcactactgatcacacaatccatatttctttaggctttaaaatacataactaagaaacatgacagtttaaggttttagcaacaccatgccttatgttttaagtagttactaaataattagatagacaatgatggcaccagcaaaccttttagccctttaattattcaagaagatggaaggtaatgatgtcagaggcagagggtgcatgaaggcccatggttgggg

SEQ ID NO: 28312 - DNA, 1838 bp, Arabidopsis thaliana landsberg
gacgttgtatctgataacagcttcgaacatctccgatgagtttctctcggaggagattgagtttcacacgtttcggtgagctaatcgcgatcaagcacgataaactcgattcgattaaacttaaatcagaatctttactaatcgatttcattagctccgtgattaatccatctctctcggcgattaacagctttgattcagcgtcgacggcgatgaactcaagtaaaccggcgcaatcaattttcaattcgacattcccggttttaaacaagtagacgatcaccgataaccgatctcgaccgttggttaaaatcagattcgaaaaccgtctccgatctgagactttgcttcgaatcgtactcagaatcttcaccgcttcttgaacaaccagagatttcgcggcggaggtggtttcgaaatccacctggttaatcagatccacgagaagtatcacgaaatcatcttttccggcgagaaatcctctgttatcatcagattctctcccgaatcgaacaatcttcgacaaaacctcgcgatcatctctttcttctttctcgatcttcactctatcgatcgcatcggcgatctcgtctctcgtcggagcagctaattccgccgattcaacacaagttcgacgacgaacagaatcagaccaaatctcgataagacgttgaagagtccgattcggtatgaaatctttattctgaagaatctgcatcgtcgccggacaagtgttattcccgccgtcaagccaccgttggatactagctcgatcgtaggtaacgccggtgcaaagactcaccggagatttcataacgtcgagagatataggacatcggaagaaggtaggaacagtgatgcagagatcatctttcctcattgctttggccgttgcttttttgttttccgattagctccaaaataaataaaagcgtgtgtgggagagagagagaagagagagagtttgtgtatggttttagtgcgtggggtttggtttaaaagatgaaagagaaaaagagtcaaactttggtgacgtcaaatttcgcttttttgacgagaatttttgtgtttaaatatctttaaatactattttaatgactaaatcgaataaaactttttcttttaacataaatcgaataactttttttttctcttctctttatgctattataaaataactctactacaaaattagaataatatttcagcacactccaaagttgaaaaactatatattcttatttaaacgtaaaaataaaatctgatatattaaaatctatgttattttaggtcgtttggtcaaagaagaagtcttctttcggcgcgttaatattagagattttcagtagagtatatcacaaccgttgattttaattttttaaggtccaacgtgttggaaatggacggtgaggatttgcggaaagtggatgcagatataagaggcagaggagagtggggtccacgctccaccgtttgagattttgggtccacttaaacgtcttaagaacgcaccgagtttcgggtttagatgtgaaattgcacgtttgagatttgaagtggaaatttgggaacttttttattattttttgacgaccctttaatttagtatttttttttatatgtcctcattatcttatttcttagttttccgtccttgttttcaaaatttgtaacgcgttgttcaattaatcgaattagcttcaaatattgcaaaagattgacttctattctgttaattattaattaaaattatatttaacgatttacccatatgatgtatacttctgtaaattttataaaatgtaggcacaaatcaataatatctataacaaatggaa

SEQ ID NO: 28313 - DNA, 1569 bp, Arabidopsis thaliana landsberg
cggagatatgaccacttgtcgggcccacagctttaccactcatcgtgtgaacaattctaccggcggcggtaatcgcggcgccggagagaaagctcgagtgttgaaaccgacctttctgtttctgaccaatgtacagttttcttgtcgtgctcaacacaaagatccatttggttccttcagtagtctccacaaggctcttggtttgtctgctgactaacttcccatcttccacgaccacttcgtaagcttgtctctctttctgttagtcaaaaaccaaaattaaaatcggttttcttttaccaaccggaaataaccgaagaccatgtgtacataccggaccaaggtaagtgatgcattgacgctgaagaagagttcttgaacatttgttgagatttacttccttgccatctccaatgtctaacctttagtatcattcagaaggtttgctatcaaaatcagctccatttactaaggaacattcgaaatcaaaatttgactaagtttgtgtaaaatttaccagaagaaaaatggctgagtactctcactttctgaccagacatcatagtataagtgtaagttatgcccgtacctatgtcgtggatcaatctgtaataataatttttaaaaatcattactataaatcaaaggaatatgtatacattaaagtaaaataaataaaagcctaaacttacggcttctaaccaatgtcgcaatgctaatttttgtgctttatcatctttcaacaatcctttccccacctatcaagcatatcaaactattttattaaccaaagtaagaattaatgatgataatgtatgactagtgaataattaattattacctttgctgcttttgttccagctcttgcccaccttgatacagcagactctggtttatcattggttttgttcggttctaactttgccaattccaattctttccacctaaaccaaacacaccacttaagtataattttcatatcaacattgggttaaaatgtataaaactgaaattcaaacgtaccataattcttcaacaacaactgcacagtcagcaagatttctacgcgttcgataactcttgtaaaccttttgtaacgtaacggcggcagcgtctagctccgtggacggtctcggagaccaaaatggcgtcggtgctggtaaacttaacgccgttaagttacccctgttccttcgtttcggagacgagcctctttcgtcttcttcttctcctcctctgttttccacttggactagactcgtgaacgagagactccgatcaagaatcatgttatctggtttaggacccttcaagtttataccttttctcgttttcaccccgcaatttccatctctgtaattgttcctctgatcgaccaaatctttgaacgataaagtcttctcaagatacatgtttactggggttttgcgaattcttggtgtttcgcactcttgtgaatctttcttgaaactgttgtctctttgtaagtaaccaaaaagaataagccatttaaagctacctttaatattaaaaagaaaagattcagacatgggatgaaaaaagaaaaat

SEQ ID NO: 28314 - DNA, 1656 bp, Arabidopsis thaliana landsberg
  unsure (1)..(1656): unsure at all n locations
ttcttgttataaacgaacataccacaagtcacagcagcctaacataataagataataaacttgttccatgagtcttgatccctacgtaccttttggaaaacagggtattcggccttaaagcgttcgcaggcaaattcatgagcctcttgacttgtgccgggctcctggtatagaaactggttgcaagggaatgccaagatctcaaaatctgaaaacgagagagcatgaaatggtaaaaccaacaaaggagatgagcttgcaactgcataacaaaaaaggccgtaatataatcaatgaccttggtccttgtatttccggtaaagttcggtgagctgtgtatagtttgtttcggtgaaaccgctgtttgcgcacaaaactaaggattagaggtgaataagaaaatagcaaaagaacaaaagagacgaaccatttggaagcaacattgacgatgaggaggactttcccttggtaaatgctcatattcaggtccttgccggagctatcctaattcccaggaaacaacagcaacaacaacgataaggaataaacaaatatcacagcgccgatgcaacctcctcctctagtatgagcgaaaagagaatacctttacagtgaattgatggacggatctctcgggaaccgaagcagaagcacccatctctagctatctctctctctgtgtctctctagagaaattagagggaaagactttctctcacgaggaaccaaccttttatttaaggaaccctctttgaccctttttaaagggaaagacttcctccttgtttttctagtcttctctcctttttacttcattcttacataaatgtgaacttgcattattgccttattgtagaaaaaaaatgaaagtattctcaacaatctctctctctctctctctctagtctgtactatattcaagagaaaagtccctatcattccatttcaaaaaagaaaaaaccaactttttagtaggaatattattataagagatgaatatactgatatacatcatacacttcaaggtcaaaacccacataacaaaataatgttgagacaaaaaaaaaaaaacaatgaataagcaaaggagtgcatataaatactaactcgatctctacaaatggctttcttttttttaaccatctcctcacaatctgcattgcatgtgattctgattccgaaatcatgtatgtacactctcacttctttatcatatcactatttcacctcaacaacataaccgttctctttttaaattagagccacatcacctcggtgttttggcttttttgcttcacaccaccctcttcgtttaccagtttataactctctcaagtttctctagtcacttttgtgacgccacattcccggatctgcaaataaacaaatgatactcggggttattccctatattacttcatcattaaatgccaaataaacctcaaatgtcagaaaacgacctataatatgattccactaaaatttatatcctaccatatgaatgttgcgcatggctcactagaagatgagtaaaataattagcctttcatgtccctacggttgttcattctgagcacgagtgggttcctcgatagcaaggaaactacttaaatacttacaaggccaaggattataaacgtctncaacctccttacc

SEQ ID NO: 28315 - DNA, 1404 bp, Arabidopsis thaliana landsberg
gaagaaaatcattaaaacacccgtgatcgacactgacgtaatattaaacctaggtaactcggttgcgtattggccaaggcagcacccgcgtacgtcaagaacacgtcgtaagagcacgagcttaacctagggtagttacagaagatgtgaagtgccgtgtggagcaaagcctggaacgcgatcatatatgcaatcaccttgtggaagtttatgttgtcgtcgaatgggaccacacggttcaagaacgttgacctaagtatcgttagggtttttctacagactgggaccaaaatcagagccatgttgagtttcagcgtttcagcagcgcctttagcggcgcaaacgcagcgtccggtgatgttgtagagagggtttctcatgaactcttcgtacttccacatgaatagatagacgttgatgatggcccacaaagcgagtacccataattttttccaattctcgtgcatcagttccgcggttacggagacgtacttgctcatcggcgttctgtaccgctctgggatcatcgcgcgtgtcagcgtttgcgatttcttcatcttctccgtatcagcgtttgtcaccattcctgttagtagtatttctaactgccacatctggtggatataaactatgaaatggtcagaacattaatctctctatatatttgtctagataaagaaagctatcatatataaaaattacaaagaaaaagtgaacctctatgtatcctttatgatcagggtcgagttcttccatgatcaaagacgcgtaagctgcagcattcttttttaaattcccgaggcggttcgccgaggcactcaatactatgacctctttcacttcctcttccgtcagcttaccatctccgtttttgtcacacctaaacaacaacaacaacaacaacaacaatggttaaactaaataaccgcatttaaaaataaaaataaataaccgcatttgtgtatatatgaaaacatataagattgagtgaaattacatgtcgaagaagatctgaagacgacaatcgaggtctttcttgatcatgtcttcccaaaacagcttgagttgttctttgtcaataccgttttctgtctctatttgtctcctccgacccaatgcttcataaacttctgccgcaaactccattgtgtctcccattcctagttatatataccatccatgttaaattttcgtcccaaacaaacaatgaattttcttttcgtcctgaattattttttaggcttcacatgcatctctgataataaacatacgatataaaaagaattattgtatacaaaaaaaaaaacgaaatatttaagttttcgttctagatcaaaatcactacgaataccaaatggaagtggatctaaaggataatcttcggaaccgtgcgtaataaataat

SEQ ID NO: 28316 - DNA, 1460 bp, Arabidopsis thaliana landsberg
tgttgttcattgcaatgttagaagggttgtgttcccacttgatgatgatgatgatgatgatttcctcgcccattgtggttgtggttttggttatggctgtggttgttgttctggttttggttctggtgtggttgccctcgtcctcgtccctttcctctacctctgttacgcccttttctctgcccagccgctttctcattccctctgatcctctccctgttatgtggcaaagtttagattcatccatggataacaaagcagagacccaataacgtatttagtctacttactattggctgctcttgcatatgtgtatcccattccccagaacagtcatcagattgtttctcaatcggctgctgctcggatgttgtagcatcatcttcctcatgttctacatctgcatcatgtccttttcttcctcgcccttgaccttgttttggttccttcgtctgtatgatagaataataacatataagccaagtggaactgacattaattaacccagacagatgacatttttaattcacagaatgttctcaactactaagatatctggactcggcttattagagtgagaaaggacgggcaaaggcacagtgtgtttgtcaaacttaaaaccacatacctgatgctttagcatcaaccggactttaagaccgctcctccaatttcccgcttcacttaactcggtaacctgtacagtaacatgccttcagttaaccccattagcacaagaggcatcaaaatatatagagtctgaaaatatgagtaggtgaggcattactgctctctcggctagctcaacaatctcatactcaacaaaagcatggacctataagaacatgtaaaagagacatcaattttgcatccagttaatccaaaactacgaggcaaacacaaagccgcatgggtccatctagttaccttgttactgaaaagcgtaccatcgcttttagctgctgatctcgctgcgggtggagcaccgcttccattattttgaggctggcaggtacggatgttcttcacactgaagacaaacactcataattttagaaaacctcaagtgtataaaaagaaagaaaaagtagattctaggttttagaacaagatgaaacagttgtgtaccttccaacagttgaaaaaatcttcatcaggttttggtagcaatgatcctcagggagattctcagcaacaataatgcgagactgtatataataatatttattagcattatccagtatacactatacagaaatataggaatagcaggaatgagtcaagtacctgaagctcttctatagccgactcagtaatcggacttatgcgtctcactttctttccatcttcactaacaaactgtgagatgactcagtcaaaagttagaacataaaatctcacgtataaaagttattgaccaatacacactaacataaagaactcacaagcttagctgagtt

SEQ ID NO: 28317 - DNA, 2140 bp, Arabidopsis thaliana landsberg
gattcgatattagtaaaaatgatgattacattggctaaaagaattaaaaatcactggagtaatatattgtataatttggtaatgataaatttaattcataggagaaacaatatatggctaggtaagaaataaagaatacgtacaagaacctccatctcaatttattttccactgacaaagtctacacattttaatcaaatgagatatttatttataaccaatgaaaaactacaaatccacgtgtcaaacacttgaaaacgacggcgtcggctacacacgagccatgccaaatcaagataaaaagctctacgttccttctttaaatttcttacttggctgaacatacaaaactccctcttctctatcttcttcatcttaaagaaaaaataagagatattggtaaagagagaacacaaaatttcagtttacgaaaagctagcaaagtcgagtatcgaggaataacagaataagacgtatctatccttgccttaatgttcttaccaaaagatctagtcctttctttgtatgatcgatccatcacaagcccacaacaacaacaactacatctctttctctatctctagcttctataattaatacattcaagaatcaagaatggtacggacgccgtgttgtagagcagaagggttgaagaaaggagcatggactcaagaagaagaccaaaagcttatcgcctatgttcaacgacatggtgaaggcggttggcgaacccttccggacaaagctggtatgtatttatttttcttcaattattattactatcgctaattaatttggaatatgcaatcagcttttagttgcatctaataatttaatgcttttaatcattatgaaattattataggactcaaaagatgtggcaaaagctgcagattgagatgggcgaattacttaagacctgacattaaacgtggagagtttagccaagacgaggaagattccatcatcaacctccacgccattcatggcaacaagtaagttttaactatataatgatgaccatcgacaggcctaaggacaagaacataggcacacatttttatatattttttcataacatatatatgtcatatgatgtacgactgatttcaaattattaatatgattttaaataaggattacagacgaaaagattctttaatgttattataaaataatttgactggacgcaataatttagctagctaggatgtaaaggtagaaaaaaaatatcctttaataatccacaaaatgtgtattcctaaagtaatggtatctagtgaggatttggtatgtaaatatacacatttgctaataaataatgttttgttgattagatggtcggccatagctcgtaaaataccaagaagaacagacaatgagatcaagaaccattggaacactcacatcaagaaatgtctggtcaagaaaggtattgatccgttgacccacaaataccttctcgatggagccggtaaatcatctgaccattccgcgcatcccgagaaaagcagcgttcatgacgacaaagatgatcagaattcaaataacaaaaagttgtcaggatcatcatcagctcggtttttgaacagagtagcaaacagattcggtcatagaatcaaccacaatgttctgtctgatattattggaagtaatggcctacttactagtcacactactccaactacaagtgtttcagaatgtgagaggtcaacgagttcttcctccacacatacctcttcgaatctccccatcaaccgtagcataaccgttgatgcaacatctctatcctcatccacgttctctgactcccccgacccgtgtttatacgaggaaatagtcggtgacattgaagatatgacgagattttcatcaagatgtttgagtcatgttttatctcatgaagatttattgatgtccgttgagtcttgtttggagaatacttcattcatgagggaaattacaatgatctttcaagaggataaaatcgagacgacgtcgtttaatgatagctacgtgacgccgatcaatgaagttgatgactcctgtgaagggattgacaattattttggatgagttatattgatgatgatgaaaatttgcatttggcatgtaaatcaattagagtttgatttgctat

SEQ ID NO: 28318 - DNA, 1637 bp, Arabidopsis thaliana landsberg
cttaatgtgttctcattttgttatctgctctttttttgtggtctttgttacaggctgattcactacgtgtacatggggtggcaattccaactgctgtggggatacgaaacgttcttagacacattggagctcacaaggacggtaaacaagtaaaagttctttggattagtctcagggaggaaccggtattttcactttcttgaacttctctgccaatatgcaaatcctaggcatgtgccatttattggtgcttccatattctttcttgttaacttgccatttactacacatttgtcaggtagtatacataaacgggcgaccttttgttctacgtgatgtggagaaacctttcaccaatcttgagtacacggtacaaaagccttgttctaatatgttgttgattccacactgttgttgtacattagtttgttggctacatgcaaagtacagttactaacaaagtaaatcagaaacttgattatccgtggaacctttcatttgtgaccttaagcttatgttctgatcagggaatcaacagggtaagggtagagcaaatggaagcacgattaaaagaagatattctcatggaggcgtcgaggtaaccattaggtcctttaaatgatctaactttgtttgcatcatttttttttgcgttgggtgtatttgaccatttgccttgcagatatgggaataagatacttgtcaccgatgaactgccagatggtcagatggtggaccagtgggagccagtctcaactgattctttgaagacactacttgaggtaggcaatgaaacatcatatgtacaccctttaatgggatttccaggttcatatcattgtttttgcttatacattctctggatctaggtttacgaagaactgcaagctgaaggctaccttgtcgattatgaacgtgttcctataacggatgaaaagtcaccaaaagaaacagattttgatctgttggtaagtcctatgccattcctcgtagtcgacaaccttgaatgatcttatctcttgccatttggtatttgctgggagcataacattatattgtgattaatatgttcctgtcaataaaaattttcaatacactatgatttcagattaggaagatatctcaggctgacattaatacggagatcattttcaattgtcaaatgggacgtggacgcacgacgactggaatggtgattgcaaccctggtctatttcaaacgtactggggcatcaggtacttcatcatctccaaccgctcaacttgcgaagaagcatgtgagaagagagtataacaaatgctctttcagtgaattatatgttattcggaaaaaaaagctgaattggggataccttattattgaatcgtttccttttattccacttttggagtatcaaatctacaagtactttatttgtgatagagaaatgaaacactatccactagcccaataatcatctctcaaccctctttctcaagcatgttcttatgtatatatctaggtagcgacatattctcccggtatatatcccatagtcaattagtctacacagattggtgttcaagtcaggtcattatggtatctatttacctgtcattttttttcctgtgctatttgatgttgaataaagatcaagg

SEQ ID NO: 28319 - DNA, 1753 bp, Arabidopsis thaliana landsberg
acgccagggttacattgttttatttttaattataacaaagcttttgatcttttatatactatactttttttggggtattatgagttatgatattatcaacgagtaagtaatatagaaaataggttgccgtcaaaaaaaaagaaatatatatatagaaaataggttgaacttaaaattccaccgataatatttaaattaaactaaactcttcaaaatggtcggcttcggataagctgacaaatggaagcaatgagctgtcgagtattagttggagtgtgtgctgcgtatacttcctctgaccaaaatacgatccttccctaattaattactaccttttcaaacactaataaaaagcttattaattacgtttacagtttactactgtacattgtaaactctcaaggcccaattataaggacaatctgtggaactgatcaggcccaatattttatcccgtgctatcggtaaagtatatttttgcatgttgttctttttttttttcctctctgccgactgtttacttcatacacaaggaaccaataaaaccaaaagacagagttttacctctatgtatatagagcttaaaattcgaataaaaaaacttgaatactaaactatacataatttctgccaagtgtttacttttcattctctcggaaatgattgttgtctcttcatatctatttcggatcggtttttgaacttacctgactctgtaccatagtgcataagcttaatccggtggagatcttccgtaatttctaccattgtaggcctcatgtttctgtgaaaggataagcagcgaaacgccaattctgctaagttgtggatagatgcaaacattttcggattgatttctttgtttaagcagggatcgatgatatctaccacacgccctcttccgatcctgtcgacggcaagagaggctaggttcacttcagagtagggacgagtgaagtctatgactttaaagcctgagatgatttctacgagaacaactccaaagctatagacatcactcttgtccgagagctgaaaatcttggtgatattgaggatctaagtatcctggagtgccttgtggagccgtggagatatgagaggcttcgaaatcggtagacatgccgagcctagagagtccgaaatcagatatcttggagttgaattcgtggtcaaggaggatgttactagattttatgtctcggtggtagataggagggtttactgaagagtggagatgtgcgattgcgtttgcggtttgacacgcaatggcgagtcggagctgccaagaaagtggtggttggcctctctcgtgttgtaaatgctgataaagagttccgtttggcatgaactcatagactagaaacggttctccatctgcaaagcaacaacctaagagacgtactagatttgggtggctcacagaggaaagaagcttgatctcgttcacaacttggtcaatgcttgtagtgtctttgtgtttgagacgttttatagcgacgcatgagctgtttgggaattcgcctgcgtagactgttccgtatgctccggttccgagcatgttcttgtcggagaaactatcggtagctttctcaatctctttgtaggtgtagaaaggaacacttgagtttccggctagctcgcaaagcaagcgattcgcgattaatgctctttcagatgacgcagattgcttgttccggaagaaatatgtagctatcaagaccacgattactaaaactccaaccaaaatcccc

SEQ ID NO: 28320 - DNA, 1461 bp, Arabidopsis thaliana landsberg
cgtctttaatcaccttctgctaacacggatcttactacgagaagtccggacagtttttctcgtcttctgcttggaactcaagctccgtcgagaaaccccatcatctttcttgatcagactaacatccatcctcttattcgaaccagcatcatctttaccagtaatattaaccaaagcctcagaattctcattagcaacaacatccagtcctttaatcttctccatatataactcatcctttctcggtctgcctccaaaccgtaaaaactcaactttgctttcattatcatgtgcccacctagactgaacataaaatccaagatacgtccaaagcgtaatcaaaagcagccaataaaccaaccggctactacgaaaccactgaaacgctcctcctccaccatgacctctacgcggagtcctaccagaatacactctaggtgtaccccttggagtagacctccctgacagtgaagacttaacacttgtctgtctcagcggcgataaccgaatctcctccataatttcaaggctataatctcattatgagtaacatatcaaacacaaaagcaatctgaagtagaaaaattcaaccgcttcaatccaccatcacaaaattgggcagctcacattaacatcacaacctaagacagataaaatcattcaatcagtctacaacacatatcaaagattagcatgcaatgatcccttctaattccagtacatcaaactctaatttaacaaaaatctgatactagatgaactataactgtttagaattcagatctaaactagtcttacgacctgcatttaggaattaatcgcaactatttaaaactaaatctgaagaacactccagaactttctcagattacaaaggattttcaattccagagccacaaaacaagcattagaactagaaaattgcgttggataaatttgaagactgaagccagaaatatatcttctggttacaaaaaattcaaaatcacatcgatcggtcagtgaacacttaccagaagctgagtaattaccgacttggatccgccgattctacaacgttgcagcttccgaagtacaaaagatcgagaaagcgcagctaaattgacgcgaattcgcagcaatctatgattagaaaacaaagaatcaacacgaaaactgaagtcaatgattatcaccggaaactagaaacggaaggatagtgcagactaattagagaaagagaagattacttttgtatagattaagtcttcgtcttcttcagagatcagagctgagcaaaagctgaagcaaagagagagagagagtctgcttcttcttctgcttcagcttcagcttcttaattattaatcttccacttgtttccttaatcatatatactttgcgctccttaattattaaggctttctttttttgtcgttattgagctcctttaaaacgcacagttagctttgaataactaat

SEQ ID NO: 28321 - DNA, 1509 bp, Arabidopsis thaliana landsberg
  unsure (1)..(1509): unsure at all n locations
aggatagtcacgaagacgggaagatcactagagaagaaatcaaagaagtaactttctttattcttcaacatagagattacgtttaaaacaatcaatctctttaacaactcttgtacttttgaaacgcagcttctaatgctaagtgcatcagcaaacaagttagcaaaactcaaggaacaagctgaagagtacgcatctctgatcatggaagagcttgatcctgagaattttggatatattgaggttcaaaaaaacataatatattccaacacacaatcaacgattcttttatgtttcttaacctttttgtgttgtctcagttatggcaactcgagacactcttacttcagagagacgcatacatgaattacagtagaccacttagcacaacaagcggtggagtaagtacaccaagacggaatctaataagacctcgtcatgtggttcaaaaatgtagaaaaaaacttcaatgtctgattctagataactggcaaagaagctgggttcttttagtgtgggtcatgcttatggccatcctctttgtctggaagtttctagagtacagagaaaaagctgcgtttaaggtcatggggtattgtttaaccactgctaaaggagctgcagagactcttaagctcaacatggctctggttttattacctgtctgtagaaacacattgacttggctaagatctacacgcgcnnnnnnnnnnnnnnnnnnnnnnnnnnnnnnnnntttccataaggtaccttccttcagtctttcgatttttcagttttagtcagagcacaacatttgagataaactctttctctctctcttgtcctgtttgtgtgccagattattgcttgtgccatagcgattgggatacttgttcatgctggtactcatttggcgtgtgatttcccccggattataaactcgagtccagaacaatttgccttgatcgcttctgccttcaatggtactaagcctacattcaaagacctgatgacaggtgcagaaggaatcaccgggatctcgatggtgatcttgacaaccattgcattcacattagcatcaactcatttcaggagaaaccgtgtgaggcttccggcaccacttgatcggttgactggctttaacgcattctggtacactcatcaccttctagtggttgtctacatcatgctcattgtccacgggaccttcctgttctttgctgataagtggtatcagaaaactgtaagcagcagcaaccataatctctctttactttaaaccgaaaaaccaaatgtcctgaaacctaaattattgttgattaccactgttcccagacttggatgtacatctcggttcctttggtgctctacgtggcagaacgaagtctgcgagcttgtaggtcaaagcattactctgtcaaaatcctcaaggcaccccccataaaccgagcaaattcattcctgttaaaaggtgttttaataacaaaataaacccatgaaccttcattctgatctctacaggtttcc

SEQ ID NO: 28322 - DNA, 2140 bp, Arabidopsis thaliana landsberg
agggtaatgtacactccaaatcatcgtctcctcttctaagtgtgcaatgtcttcccatgatgcatatgcggcgtatttcatggggatcctctaaaagatccaggagcatttgtctaagagctccagctcgggagctcaattcaacctttaaaaggtgtataaagaagaattcaatacaaagaaccgaacagtgagttctctgaagcgagcaactagcaagaatatacatctataagcaactaaataaagtttaccagtctttgtttgctaatacgaagttcctcctaatatatcggcagttaagacggttgggtaaaacctcaagtagagcttggacctgaacctaatggaagtaatataaactttaagagctaaaaagaatgatctttaaaagccataagcctaatgtttggaaaaaactacagggtttcatgtcagaacatataaaggatttcattttaacgcctcagctcttttatcctatgctcagttcaaacttaaacttatagcaaaaggagatgctttgtgtgtcgaaaatggcagtttcatcctctatagcacgaatccgttccttttaagatctaacttagtcatggagaagtcctagtctagcagtcaaagtgaagaagatctaactgaaatatactcactagcttttcatactcacacggggttcaatgtccataagcctttgctctaatcgttgtatccttgagattagcgccgattcaacagccttcaataaagccagagtaatgaaaggttaacaccaaaatgattggaattataacaaactcaagttatgcagggctgaagagataatatttataatcttttatctgtgtacaaaacatatatttctacataaacaaatcatcatccaatcaaattatttatgggccaaaccaacctctagttcaaatggcatagagggtcctccattcatacttcttgggttaagccgaggcatcaatgtatctacaaaagctcttcctcctctcctgaaaatattttggacttacaccagcgatactagagaaattgatctgaagaaaaagagatatactgcgaccaagattaccggttataatcaaatataaggacacggtctcgcatggctattgctctcagggagcccaaatttagcagaatcgcatgttcacggacctaaataacatgtaagaaaaggtctcaacattgtcatatagatggttcatcatacacataactgtagagaaatgataagtttgagctatatatataccaatagagatggcactgagtttgtcataaacaacgaaggatcaacgcttcgtatatctcttggacgaagacctgattaaaatattagacttatcatagagaactaccaacatgacgatcatcaaatgtataaaatagttaactattgtttcagtcaccactggatttaagcagctgtcgtctgttaatcttccttgtagatattgctccagtcgccttcacttccacaaccttcataaagttacaaactttgatgagatacaacaagtgacagtttcatccaaagctaatcaattcaaacagaatcctaaatatatgactaattgactatatgaacatgcaattcaatagttcattatatccagaagaaacctcataaaccggttcacgaattcccagagacgtagagtcacttgatgaagaagaagaagaagaatcgatcttctttgaatcatctcttcctcctccgttatctccatcactactattactgtcactaccatcgtcgtcgtcgctaacgttaagggattcgtaatcgccgacgaaatcctcggcggttgtcggagacttggcgaaacatttcgatctcgataaaactttaagtgcctcgaagtagatcggagttctactcaacgcagataactggagagaaaaggaaggagaagatccaggaagaagataatggagagatggagatggatatggagagtgatcggagaagttgaagagagaagtgaatgttgaaggaattggagttaacgccattgttggtttggtgctggtggaacgaagaagctttggttatggagatttttagctttaaggataattttaccaaaaaactaaaaaagtaaaaaccacctccaatttgtatgac

SEQ ID NO: 28323 - DNA, 5030 bp, Arabidopsis thaliana landsberg
ttttttaataaacattgtctaatttttcaacatgcactttataattaacacatgctgtttaagaatataaaaccttgtccaacttagatcaaccgtgttttaagaaaacctatgaccaactacgacgagaactaatataaactaatgtatgttatatagttataaagcatgacccttagttttataacaaaaccacgtgaactttagaaatatgaaacgttgtggaaataaaatccgctatttaaaaaaaaaaaaaaaatagataaactgagttccaacaataatacccctatgaacctatggaattcatatctactaagactctaactcattcatagcaaccttgtcatcgcaggtcagccactacttcagttggcggggagcctgaggccgaagcatttatcatcaccgagctggataaattggcttacattgtgggaaaaacattcaaatgtggtacattacatcgcacacacggtattttaaaaattcagctcttacctcatcatttaaagcaggaggatcggctattctatgtgcatctctgtcagaaacaatggcatcagccgatggtttggataaattagcctacatcaaacccacaacataaatatgtggtaagatgacatcaaacaaactaactatacaaataatcagctctaaccgcatcacataaagtaggtggggcagcgattgtttcttcatctttccctgacacaatctcttcgtcctgtgggtgtggtctggatttatcattgctattcgtatctgcgtcaaactggaaaaccaaaaaacaaacatcaatgaaccaaataggaccaatgaattgggaaaacatgttaattcaacaacttgcaaagaggatgggttcttagttccaaaaggtgaatgcaataccatatatggttccgtgatgtttggctccaattcaatataagcattatcttctgtgtcaggattaactggaacatggagttggggagcttcatctggaattggtgtttcattgcttgaaggactgtcatgatttccatcttgaggtacttcatcggagtcgccaacaatcccgtaacctttaacttgagcgatcgtatcagcttgaggtgataatggtttctctacttaagcagcaatatctcctgatctagtgtttacctcaacaggtggaagggtggtagacgttgtactattgtgtactctcctccccttctgtacatgacaaaaagttatagaattagtaattggtaacaaatagtaggtaaaagaagataaccttacaaattattaccagcgaactacggttcagttgctttgccttcggaaatgagcgatgttttgtatttgtcggctgtgcagatgaatcatcattgatatcttccatcacttcccctaaaacttgatcaagaatatatgttgcactattcttcatagtatgcactcccacagatgtatccagatcaacaacagatccttcctttccaccaactccagtacgttgaacctcttcatacgtgtgatgtttgccatgggttgctctcagtaagctgtttaatctagcctccgaatcagctatagccttcaacatacgagtctccattcgcttgtcttttttgtcaatatagtttttgatcgagtctggtatgttaaactggcctttagctttacgagttttggaggagccatccatggttccatcagtttgatggttgtcatcatcaccacaatcatgagtgctacaaacatcgctgctgtcattcttttcatcaggcaacaaatcagggactacaccacttaagaacatggatcccttaaaaaggtgatcctctctaataagttgcaataagttgtcaacacgagggtcagcttcgtcatcaatccaccctctcgagaaagggtcaccattagctgtaccactcataacagatgtgactttggtttgcaaaaaaatgaaaatttattaatttaagatcatgctattgttataaatgaagaatgtttagttttacttttaaaagccagagtatattgataaatagcagatgatataaatttaaaacaatacgaaggtgtagtaaaatagctaatacattattacgttatcccctaaaccaactagatttacacccaactacagacgaaacataacacgggtgattaaattaaagcatattacatatatttaaaacatgtgatctatcaataaatcatactagacacttaaaaatcaagttatggagaattacagtaactacagttttgtatagcatgatataaaagtaagatactatgtattttataaaagcacgaaatgcactgattacctgggactgcctatcgactttccagacaatatccaacttcaagctccatagacgctcaatttccttctgcgtttcctccatctctgagtcatcatcttcgtcaacctcagggaattgcaattccctaattcgaggcacactttcaaggaacaatagttggattgcgtgtgggaatccctgaaccgttacagatttccgcataagcttattagcaccccttgctgtaacactcttcaacgtcaataaaaaagatgtagttccccacggatgattaaaaaacttatccagattttcgtccatgtccgcatgtaccggagatattttgcttctacccgacgttgggcacaaaacgccattaatgagggctagagcagcgtaccgtagactgaaagaatatgcggaattgtattaaagtttaagagtgttatgaagaacaagagagtttgtatgtgagagaatatgagaccaaatcatgttgatagaattggattataacctttgtgtgtttacaatgctttaaagacacacaaagagaatatggccgcttacaattaacgtaagactgaaagagacataagagaagaggtttcttggtcttggtgatgatagtgactggtcattggttgaccttgttgctaaagacactcgtgagtcctcttcaacggctacaagagatatttgtgtgccttcacctcttctagaagctcttcatagacttctcatgtgttcggcccactctcttatagtacatatccaatactaggcctttcttatttgagtcttgatcaatattccccctcaagcgcaagacttatgcaagagtctaagcttggaacacatgattcatcacctcattaaaaaccttagtaaagaaaaccacatgggagaaaactttactaagggaaaaagagtgtgatgtccatggttagggaacatgagatcaagagtgagatagatccacaagtcctaatttgccatgtatgaagttgcaaactttgagacttgcggctttggtgaagatatccgccaattgatcttcacttcttgtataacacggtagtgtgactccttcgatgatcttctctcggactttatgacaatcgacttcaatatgcttggttctctcatgaaacaccgaatttgaggctatgtatattgctgccttgttgtcacaatgcatggtgataggcgtgtgttgttcaatggcaagatctttaagaagagctttaagccaagtgagttcgttggtgagctttctcattgctctatactccgattctgcactcgaacatgagaccaccttctgtttctttgtcttccaagttgcaaggttacctccaatgaacgtacaatagccagttgtagatcttctatctcctctatcacccgcatatctcctctaaagtctataaactaaaatctaaaatcaaaaactgaatccaaaatcagcatccattcagggcctaagtttgatatttttctgcttttgcacatttgcttcctcaagtccaccggatgatccggtcaagtgtgagtcaggaaacaacatgtgcactgtgacgaactcgtacggagccttccccgaccgttctatatgtgaagcggcaaaggtggagtaccccaagaccgaggctgagttagtctctatagtggctgcagccactagagccggccaaaaaatgcgggttgtgactcggtactctcacagcatcccaaagctcgtttgtactgatggaaaggacagtgttctcataagcaccaagtttttaaacaacgtggtgggaaccaatcccgaagccaagactttgacagttgagagcggtgtgacgttaaggcagcttatcggagaagcggctgaattggagctggctttgccacacgcaccatattggtggggactcacggttggaggattgatggggacaggtgctcatggaagttcgttgtggggtaaaggaagtgcggttcatgattatgtgagtgagataagaatggtgagtcccggtttggcttctgatgggtatgttaaggttcgggttcttagcgagacaatagatcctgatgaatttcgtgcagccaaagtttctctaggcgttctagctgttatctctcaagtaactttcgagttgcaaccaatgttcaagagatcgttaacctatgttatgcaaaacgattcggatttcggagatcaagccgtgactttcggggaaaaacatgagtttgcagatttcttatggttaccaagccaaggcaaagtggtgtatcgaatggacgaccgagttccggtcaacacttcaggcaatggcttgttcgactttttcccattccgtccacaactctctgtagcgttagccatcattagatccttaggtaaatttattctttctttctcaagataactaatacaaaatatatttgatcatttgcataatttttttggtaaaaaatatttgatttgcatagttataatgtttcttataaacaactgcttcatgatatgaagaggagagtgaagagtcatccggagatgcaaacaacaagtgtgcgagagcagagcaaataacgtcgtttttgttttccatctcctacggtgtgactaacaatggtaaaaatattcgttcacttacttatgcatctttctattgtttccatatgtatgagactattacaacaatctatcacatattcatttgtaatttccacgggcag

SEQ ID NO: 28324 - DNA, 8652 bp, Arabidopsis thaliana landsberg
  unsure (1)..(8652): unsure at all n locations
aagattacgagacggctctccggtcaccaccttcctcgtcgggagattcaaagcaggattctccgatcggaagagcgaggataatgacggaaagatttaacgaggtgaataattttctctttgtactcgattactggcgaattttgatgtactatgatacgaagattttggatttcgtgttatcgttttccagttttggcaaagtttgatcaatcgttctgggttatatcagcgcaactacgaattaggtatgtaacacgaatctaatttgccttttttgatctgagaatttcctctttcgtttggtagtgagtttctgttggatcatgatagtgttacactgtgacaatacctaagatgctagtgataacccgtatgagtttgcttcattgtcaggattttgcatttgattaggctgtgaagcttacttaatagtagaaacacacaaatcatgtaaacagaagaaaatttgagaaaccttaagttgtggcggctctgaatggccgccattcttgatctgagctaatcaaatcaaccccctaggccaaagtgagccattagtaaccaaacgaagttgatgaactccccacctttgctaagaagctccatacgtgttgttgcatcacaatgtgatactgcatggaagaggaactccaaccacactttgctaagtatcttccatttgtcttctccaaagttcttttccactctctgaagttctttggccagtgagcttgcctcaaataacactgatttgctatgatttcctttgacttccctaggttcgatacttgtatcggctgaaagaatttccttgctggctaatttcacatttctagagtctctgatgatacccatcttcttgaagaacctatcagcctcggctaatgtgtctctgaatctgatctttcctatgccagctacttctgacatcagcttaggctgcatgatcaagagatacatcatgtagtccgagatgattttgctgatcttgcggttagtgtgatactcagatttgtcgcagttctctttagcagaatcttcctcttggtaacagagttctgtggcgatgtgccaaatcaaaagactgtgttcataatcaacatctgttatgtaatgtagcagcatatcatggtctgctatttgaatctgggtatggctagatgcccaatctctcctagccgatgattttgttgtggtattctccaggctgtatagaatctgggaatttttttgcagctcagaaaatatgaaagaccataggttttttgtcaagggttcacggtgtacagatcttaccagtcttatctcatagaacagaccattgatgcctaggaagttgatgacggaggtgacaagatactcgaaaaagttaggtacattgaaccaaaactcaacaaaagccttgaagatgccgataatagaacgagcaacttgattttgccctggcggtagaataatcacatggtggatgatataccagtgaagagcacaaaaccatttggctatgttactagaccaagtctggatgatggagaaaatgaaactgaaagggcaaactgctatcttccataaaagctggcatgctctactcctgggtcgtggatcctttctgtatctgccttcatggagtatgtgagaaagtttaacattgtgatgcttccagtccatcttctgagtagaaacggtgtgttaagcacctcctgctgatctccctcacgacatgtttgccacttccactttggcctcttcagaaaaagtatccagttgagtatgtggtctttccctgaatacctttcgtcggggtcatcctttagcttagcaaggatggctgttgtccagtcagaaaccatgaacatgtggatggatataacatccagagctatgccaactaagaacaacgtataggtgatcacgatgtcggctttgtgaaattcttggatcttattgtgtctgtaatggtagatggtgaaggctgacagaagggatcccagtgatatgaatcgtgacacaagtccaacccaactatgaagaaccgaaccttttgtatacagtccttcatagataaaatcgagctcggcttctataatgcagaaagcttcatcttttagttgcaatgcactgaagaaggccttgctttcatcgcgcagctccaagctaaatatgttattgaccataagactcttaaaatttttgaagaacaagaatgcatattgaagaatctcaaggtgggttaactctttatgtggttgcaataacttcagaggttttggttgtccgcgatgctccttcatgttcatctcagaagcaagtttcgtgtccatgtctaagtcccttgtttgatcggtgtagtcaaaccttgaattggacgcctgcaacatcgagttcctgttcttgtctgaactcgcgaggtacaacgcaattgtccgttccaaatacttagaagtcccagcaatgaaaagcaacaagattatcaccgagagtacattgggtagagactggacaactacatatacacctgcaagcgcctgaaagacaagcccaagaaaatgtctgttccagagagcattgtcttcgagggaaaaggcagtgatggtgtctggtccaccaaggtgtaagagcaagaaaggtgcccacaaggcgacgagcttcttgttttgaggaggatcatcaggtttaagatctttaccttggttcttggcaatcaatgcaactgcaaaattcgcagacaaatctgccaggagatacgatgaccacaagagcaggatcaggaacttgttgggcgttcgtttcctcaagggggcaaagaaaatgagaatggtctgaagcgagagactgaggattatcactcccctaatattccatgtgtcccaaacatctttgatatgtttgggaattacttccaccattttcctatgtttttttttgtcaagaatcggctctgatcagatcgatctctggataatcttgtttgctttgtggaatgcttcttttgcttctgccattgacttttttcacctcaacttttcttgggagatgcgaactggggttttctttgtttaatatatttgaggtttgtggtctttttctacaaataaaccgctggtctttctgttcttattttaagtttaaaacgagaaaagttaagtgtatctgtttgggctttctgttactttaagcatcaccagaaggtcctggcattatctggaataacttgtaaaaatggtgccaaaaatgtcaagagtatattttaaatagaacccttaggagtccaacaagaaaacaatcaaattcatgtcgggtacatggaacatagtaaatgaccagggcaaggatccatgaaaagaatgcagtagcttcccctgctccaagtgcccttgtagtttttcatatatactcattccaagtcctgcaacagaagcaaccggcaaaattgaaagattattgtgctttcaaacttcacaacagtttcactaacaagaggaaacgaagattaacaacacactcgagagtagttatatgtataatgttggactcaccggaccacgaagatcttccattagagtttccagctttgggcatttctctggtttgtatatcttcagattaggcagcaaagcattgatagcagctagaacaggcaaattgaaaaggcatagtgtgtgcagattaggcacttcgacttctcgtacaaacactttctccagcttctcacaaaactttatcttcaggacttctaggctggttggaagcgcggatgcaggaaatagcgtttcaatatatgggcaacaatctaggcttagttttttcagattctttaagctgctgctgcatatactcttcaaaggtcgaatattcgtaattgacaaagtctccaggtttcctagactttcctcatctactccagagaaaaggatttctatatccgtgcacatctccagccaacaacttttcactgacttcaaatcattgaagatcgaggagagacttgaaccgctattgtccacaatagccacaaactcaactttagccaaggtttccttatcttgatctacgccattagatccttggatctctaggacttcttgacaatttttggtatcaacaaaaggtattgtgttccgatagacatccatgtatatatgatcttggtaaaattgttccctggggcgacctttattttcaggacaatcaaaggcccaaagttcacctacacttccttcttcctttcttgaggttgcttggattctgtcgaccatatcaaaagagcttagactctcagaaatcccatttgtcatggcttcctttacttcgagccaagtatcatgtatcaatcttcttgtatctgccagaataagtagttttgaacaaacgatgttgctcgtatctggcaactgcggtatggtttctannnnnnnnnnnnnnnnnnnnnnnnnnnncaagtaagacatgtccttaaaggatccctcaatcttatgtaactcagtgcacccagaaacatcaaagacttccaggcttgtgagtccgctgatgtttgggagagcttctaggttggagttgtctctcaggaggagttgtctgaggttggatagaccggagatggttgacggcaatttggtaatctttgtgcctgaaagattaagaattttgagttcctctttctgctcgaagcatactgccgcaatatccactaaactggtggtaccagaaagatcgagaatttggagacccgataaaggtttaagattgggcaattttaataaattgctacatttgcgcaatagagccgcgtcaagaagtgaagattggtagccatcgcagcgtcatgaaatactggaagtcgttttatgttgctctctgagaaatcaaggagctgtagttttgttaaatgatgaaaggttcgatttctgcttgttttttctttcaagccaaagcaagttcttagcctgcgtgcaccacggacgtcgagaacctcgagattcaataatttatgtatatctggcaaatcttccaagacaagacagtccctaaggatgagactgtggaggtcatatagttgacaaatgctggaaggcaaagatttgatccgaagtccagagaggttaagactttgaaggtggggcagtgctttaaagaagccatcagtgatatttaccacagagctagctcctgaaacttcaagaacctgtagctctcgtagatcctgaagctcctcaatatctgacaatagaccacagttcctgatcacaagaactcggagttcacatagattttttaaatacctggttaaacatcccaatgttggatcgaaaagaataagtacttcaagatctgccatctgctcgaagaacttgggaggtgtttcctgacgcagacggtttccacttaccagcattgtacaaatattggctcctttatttgcatttactgtttttatcatatcatctatttgggtgattttccctagacctttgttcttctcacgacaagaaaccctagaaaataggagctgggatctgccgaagagcccatgatatcggagatcagttaattggttcattgccatctctggtataactatatcaccatcttgtatcttcagaatacctcggtttataagctccaccaagatagcatgaccatccttataggctttcttaacagatcgaacaggatcaaaatagccttcaagtatccacagtgtgatcagttcgttgtagttgatacagccacaatgctcaaagaagtccaagctatgccaaaaacaatcaacaatggcattcttcaatgtatcatcagtttccaggagctgataagcaagttgcagaacagaattatttctagaaactgagtagtctggctcatacggggataaaacttccttaaacagcttgtcttgtttgggagaaagaatcttgaaagtggcctgacgagtaatgcagtttaaggacttagcaagcacgacaattgcagcgggcaaactattactttttcgcgccatgctagatatcaatggatgatcaagcttccaagcgttctcaagggagttaagaagctcccttgacttatcattgataagggatgcaagtaaataccgcatgttcctctcgttgaggctgttaagtaaagcttgtgactcattggtgacatgaaactcaactttccccttccactttgtatccgcatgtgtctcgaatgtagtatgagacacaattttctccgcattccttatatcatgtggctcttccatgtcatcagactcgatttccctatcactctctgcaccctatgacttggtctccccatcaatctctgtaccctgtgactggtctacggcatgggactcagtttccccatcacgctttgtagtgttttcatcccctgctcttcttgtaataagaattttaagaggtccgtaatctttaagaaaactttcaaggcccaaatctttcatcactttgtcttcactggttttatttccttcgtcatcaagtatcaatagaatatgcgatgaagtgtaaatgtgtttatacaacagaggatttgtagggaaattgtcaagcaacagtatcttccttctttcatgatctgatatcttcatttgttcatcagctaatctcttctttccctcaagttcccgaatgatcgacttcttcaaatcgagtaacaagtctttcctgtcactctcatcatcatccccgtcatacacttcaatttggaaagctatgtgctcataaagcgacacttcatcttcaaacttctggttgaggtgcaagcagagggtgaggtagcacaggccttcttctgttgcatactcgcccaccaactttgccagccgcgtcttaccgattccggattgcccagacagtacaactcttcgaggaccatcaccacgaattgttcccattattatcttacacaacgtgtcatccttctcgtcttggcgtacttgagcaaaagccagatctggaatatgagataaaagtttattgtttagaacagcagcatactaaaaattcatgaaaggttagtttttcggtcactttgagcgttccacttttggattagaataatagttactgaagatggcagtaactattattctgatagatactaatagaaaatcagaaaaatgtgggaaggagatgaagcgagtacccatgtcaatctccgtcctcgctttgcctgtgttcttcatcctttgatcaaagatctaatcctctcaagtcaaccttttgctcttctctctctctctctctccccctcgggctcattacctgttgtagtatgtgatcgtaataaataatgactttctacattaattgattattaaacaataaacaatgactttctacatttttcgtctagggagaaacagcttattcaaggtcgtaggcctccactctctctctcgtggtgtggtcgctgaggaggaagaaaagatctacaagagctttcggagcgcaataaggtatttttttttgttttagaacatggcttttcagattggtcggtcatgaaaagttcatatctttttttcttggtcttcaagatgtacaggcaaattgaacatggggttggcgcttttgctttgagtgctgaggaagagaagggttttaccactatcagaatagcattttcatttcatggcttccaaagacaattcacaggcacatcaatcaagagacacgtcagaggataaagtcgacaagatcttgaagaccttgccagagttgatcaaactgttatgtcctgtaaaggaagatcctttaggaagactcgaggagatacaagagataactcaagtagataatcaaacggaaattttatcaaggagcctaagtgctccttctgctatgactcatgttgcattgatggcaatctgattgcgaggctacaatatcatttccgaatccttaagttgaagctgggaaagctggagcaatttcaaacaaatgtgggaggagagctggatacacatctttttacccttcagtcactgattacaaatttggattcctccaaggttgcttctctacctacgtattggatcaagtctgacttagaaggcattgagaagaagatctctgacttgttgtaccaagtccccttattgtctggcaagcaagaaactcagaaagcaacagcgtatggtgatcatgatgatgaagacgaggatcatcaaggaaaggcatatgtttaccttcccggcatacatatgaatgtgaaagatctcaccaagtgcgaggttttcagacaagtgaaacagaagtttatggagcttgacattgaacagagaggctgccttttgagttttgcagtgttcccggagaatcgagatgttcatagaacaatgttgatgtattggtggataggagaagggattctccctgttgaaggagcagaagaagctgtgaagaaagttcttaaggaattcactgataaaaagttggtcgaacccgttgcagagaggcgcaaattggctccaagcagctataagatgtgtccttttgtgcattcttcagttattcatctctcacatgagattggactttttgatatctatcgtcaagggaagaagccaacgatgaaccattcggggatgggaaaggtttgcctgtggaaggatcatcaagccagcgagagggatac

SEQ ID NO: 28325 - DNA, 1278 bp, Arabidopsis thaliana landsberg
attaactcaatagtgtaccaagaaaaatatctcttcctttacaattcttgtctaaattatttatggaaacggaattgttttctggttcctgcttgtaacatcagaacattttgatatgcagtatctactgagaagagcttcactaacagctgaagatgcttttgcttttctaaaaactgacaatgatggtgaccacattacattcatgggcttctgtgagactcttcggcaggtatgtagaatctgtaacgcagttaatcatattcctatgactgccttactcagcttaatgtttacagagttttctctttcttaatttcatactctttctctatacagctcaatctaacaggtcattgtaatggactcacgacaaaagagatcaaagatttgtggactcaagctgacattgatggaaacggtcttctagattataaggagtttcaggtaatgtttcttcattagactccccctctctagattacaaggaattgttcatgataaggtagtttttagtagaacttaagagttacaatagctgaacataatcgcccgtgaacatctagacatagaatcgaaaacccttgttcttgttcttgaaactacacacaagtttctcaattgcttatgtaatccattgcagcaaagaatatggaaccaaacctggtcagaacaaagagatgcagaggacggagaagcaaaaggtaaccaagaacaaaccgttggattcagtgtcaaaaacgcagttttgtttcctcctgaagttgaaaaaggaatgtggccagaaaattactctctatcagatcacgcgagactcactgttgtattctcacccataagaatgccttgctctcaattggtttcatgacaaaacacactcaccaaacaaactttagcttcttccatttttaagagacctctgagttttggtgtccccttacagagaaacttcgctctgtctctccattggatcggcttgaccgctctcacgttgcggttcctgcgttgggtgggaagaagagagaaagggggacataggtctataaatttttactgtgtacaaaaacatgtaaactaaatatattagcttcatgtacaaaataatgtcgtagtagagatttaagaagcagctttttgcaactcttttttcatttctgtttttgcaatttcatcaactccagagactttcatagagatatgtttagatataaaatgatacaaaaacaaaataatattaatctttaaaaaagtaatgccgccaaaaaaggaatagggatc

SEQ ID NO: 28326 - DNA, 1756 bp, Arabidopsis thaliana landsberg
ctaaaaagtttaaatttccttctaaaatccgatttggtggtcttgattacgaaggtctctcttacgtctctggtaaaccattttttatactcgacatgtcgaatctccgtgatgtctctgttgatatcgccgatcaatcagcttggatctccgccggagcaactcttggtgaggtttattacagaatttgggagaaaagcaaagtccatggatttcccgccggagtttgtcctacggttggtgttggtggacatataagcggtggtggttacggtaatatgttgaggaaattcggattatcagttgataacttgatcgatgcgaagatcgttgatgttaacggtcaaattttagaccggaaatcgatgggtgaggatcttttttgggctatttccggtggaggaggggctagcttcggcgtcgttttgggttacaaggtcaagctcgttcctgtgccagaaactgttacagtctttagggtggagaagtatatggattcaggagcggtggatatggttcacaaatggcaatccgttggtccaaaaaccgaccggaatctatttttgagaatgttgattcaaccggtgacgaggaagaaggtaaagactgtgagagctactgtggtggctctgtttttaggcagagcagaggaagttgttgctttgcttggtaaggagtttcctgaattgagtttaaagaaggagaactgttcggagatgacttggtttcagtcagctttatggtgggataatcgtgttaaccctactcagattgatcctaaagtgtttctcgatcggaatcttgatagagcgaatttcggaaagaggaaatcggattacgttgcgagtgagattcctagagatgggattgagtctttgttcaagaagatgactgagctggggaaaatcgggcttgtttttaatccgtatggtgggaaaatggcggaggttacggttaacgcgacgccgtttccgcaccgaagcaagctttttaagattcagtactcggtgacttggcaagaaaactctgtcgagatagagaagggtttcttgaatcaggctaacgttctttatagtttcatgaccgggtttgtgagcaagaaccctagaaatgcttacttgaattaccgagatgtcgatataggtgtgaatgatcatggtacgaatagttatgaggaaggagaagtgtatggaaggaagtattttggagataattttgatcgattagtaaaggttaaaacagcggctgatccagataatttcttcaggaatgaacagagtatacctaccgtgcttagcaaggcataggcatggagtttggacatagaccaataatgtttaatgaaggagaatatttactatacgactggaaatattgtttattatattcacggaactctatttatttaataagattcttttcatttaagtgtgtagcttaaaaggggtggatgttattatcaaaactgttgattgttggatgtagctacataatcttgaatttgtggcagaaattgtggaatttaggttttgatttgaattagtataacagatgatgatacatactcgcgagtagtataacaatttgacggacttacgtttacggtttttgtgtattaaagaaaattgtgggttattttcattttattgcaagtaacaaaaggaaaaggtacataatcaactatgcatagtttaagattctaaagtgtataatgattttgcattatgcattcaacaaagatggctcaaaagaataa

SEQ ID NO: 28327 - DNA, 1521 bp, Arabidopsis thaliana landsberg
  unsure (1)..(1521): unsure at all n locations
aataattatgctataaggttattctatgacatttgtagagtagtttaaatatttttggtatattgttccaacaaaggtatatgggaaagttgaaattctattatctctgatttagtaataatagtgtttggcctatttggcatcacaaaagagttggcagttgggattgttttacttgtatttaaaatttcgaaagtctggggttcatttgcaataaaaagaaaatgatgagggcctaaataaacaataaacataaacaatcgccggaaagtttcttctcacgactaataaaaaccttaaaagctctcctccgttaatgtcgcctctgtcttctcttcctcccaaaacatttatctcctccttccattgccactcagtgactcgcctaagaaggtccgtcactgctcgaaccatgagctctcagtctagtcaacgcgtcttccagctcagacaagaccctctcaccggaaattccgaatggattgtcattgaagacaatgaccaacccggaacttccactgacggcctactcgcgacgacgtcgtatctcgacatgctcaatgattctcgccgtaacatagcttatcgtctcgctatcgagaaaaccatcactgaaccttgccacgtcctggacattgggttcgtcnnnnnnnnnnnnnnnnnnnnnnaacttgattcaattcttggtttaaacactcagattttgataaaggagaatgtggaatttgtgtgtatagtgctggaactgggttgctatcaatgatggctgtgagagcaatgagaggtgattcaaaaggaatggtgacggcgtgtgagtcttacttaccgatggttaagcttatgaggaaggttatgcataagaatggaatgactaagaacattaaccttatcaacaaacgatccgatgaactcaaagttggatcagaagacattgcttcacgagctgacgttcttgtgagtatacaaagatctatactttgtagttaatttttcagaaggaaataaccataagtgtgtctctcttcttcattaggttagtgaaatattggactctgagttacttggtgaaggtctaatcccaagtttacaacacgctcatgacatgttgctggttgataatcccaaaacagtgccatatcgagctactacttattgccaggttcgttatttagtctaatagaattttggtcattctttagcttgattgaattcattctcacattgtttccctttgctctgtctttacaatattttcaagcttgttgaaagcacattcttatgtaacttgcaagatctacgaaataacgaggctaaaacatccgatggtgttcgtctagttcctcctggattagagagtctatttggtatcaagtcacaacagtatagcatgcatgttgatgctattgagaaagagatcaaactggtactagtatcctgaacttctccctacagttttgcaatgagctttagtttataaactcaattcatatattcatccagttgtcagagcccgtcgaaatt

SEQ ID NO: 28328 - DNA, 1030 bp, Arabidopsis thaliana landsberg
gatatgttcttacttccataatttttagtttgctttacagttttgtatttataagattttactacataccaattattaataattattgtttgttttgttgatgtgaactttcatccaataaagttaagagagagatgatttgatatttcttttttgtacaagatgtgtatgtaatgacgttagttacttcattgtaattaaagtttgttaaaattgactacaaaacataaagaattattttacacttgtgagtaaacaaaatcctatagaattattttcttactttttgttttatcagcaaaagcataagataattaacttaaatactttttgaagttttagagtataaatgtagtaacaaaatattaaacataatgaataagagtttacttagaaatatagaattaatattttttatttcgtttagatttttttctttttccttccaatattattatcaatgcaaatgttttacatcattgtatacaaacggctataaaaacctaggacatattcgatatagctcaaagtttgtattacttttggtagctgtcttggccaagacatcagcatagacgttgttttcttgatgtcggaatttgaactcgatgaagttaaaagctttacgccattgatgtatgaaatcaagataatgtcgtaatcttggattgggctctatgctattgatgatactagtaacagtgacgctgtcaccctcgactattaccttcctataaccaagtccctatgcgcattgtatagcccaaatgagtgcagtacactctccttcttcaattgtttggcgtccttgaaatttccccattccgcagtccatacatgtgccgtgtgaattcctgatgatccagccaagacccgcggttatctttccttcatagtgagagacatcgtagttacacttgacccatcctactggaggcttttgccaattagcctttctcgatgtagatgatagttggtctcgggtatttctttctgggggtcgcatgttatctagccattcctttgtgtc

SEQ ID NO: 28329 - DNA, 2014 bp, Arabidopsis thaliana landsberg
  unsure (1)..(2014): unsure at all n locations
atcaacaaaaagaaccatgattttcggaagaagatgtaaaattatgatcattcagttaaaccccaatcaagaactaagaatatttatattcgttcaagtgagggagttcgacttaattttggaatataaaaatacaaagacaaatacattttccattacacacaaacgtaacacacatacaagtccaagtatttttgtttatgtgatccatatatatatattgatacataaggacgcttttacaccatatatataaaacatattttattcatagactttggtttatttgattcctcattaaagctagattagctctagatatataatagactgatttggattttgtgaagagtctatatataacttaacctggaaatccacattttcctcgaattactccatcacttccggtcataactccgatattccccattttaaccattgaaactgcgaaatccctcgagaacaagtacggattctcgctgtacgacttcaccaaggcggcagccgtaggatctgtcattagggtttgatcagaatccaacagtcctatgttgttcattaagttcacgtagtaagcattgtcaaacttgactgagctagctgcgtcaagagcagcgagcttagagtctgaggagtccacgttaggacacgtgtcctttagcttagagagaagtgctgaggaagcggctaggtttgggtcaggctggcctgagcccttgaaattgaagagtctatgcttgatcacgaaacattgagcaaatcctatagtatgtgctcctacatacacgtatagtcatatcgtagcataagttcatgtatatacttgcctaatgaagtactttactctatctaagtttgtttataataatcgattttgctacgtttgtttttattattttggttaattaacacaatagtcaatcgatattattatttttatctctataatttatcgttagttgaagtgaccaaacctgagaggacaacaacgtccttgaggtcgagtccaagggtcacgaacttggctgttatattctccaacgcctcaaacggagatggcagatttgtattcgccgcttgctcactcgccgttaatgagtcccttcgtcccaaaggcacgggccaaaacggtcctccagtctgcatggcatgagaagtcataactaagtaaccgatcgattatgttttgttttttcattaatattttgacatttcagattattaatgaatttgggttttaagatcacacgtacgaggacgacagcttctctagccgcgagagcaactatgtcagcgcatgaaactgttaagggacaagaactttcgatatcagatttaatgtcttcaatgacttcgaatccacggactgagtttcggtttggctgagcgttcttctctcctttgaaatcctctgaatcgtttagaagtatagatccatcacatccctacaacataaaggaaatattatatatttgatacacatatatagaccctgtagtctaggacatctactctaatatgtatttttttactactaaataatacanaaattgttataaaattctgtagaatttaaatgattatttttaatatacctatagagtatgtttgactagtgtgagtgatatataatccacaatctgatatatgcatgcgtatattataaaaagaaaatgtcacgtaacttacaatattattaagcaaacaaaaataaacttaccttgacaaaacaatcgtgaatatgtagtcgaagaagagatgcagcgattcgagaatcatctttaaaagctctccaaactccggacttaacaatcgtttgaagacgcggacaagaccggtcataaaatcgatagttgagattgctagttagtccatgtccgtgaccattggttgaaaccattgatatatcccgaaggtaacgaggagacgaagcctttgaagaaaagagtaaagattgctaggtaagacacgggcaaattcattaacattatctggtccatgatgataaaat

SEQ ID NO: 28330 - DNA, 1104 bp, Arabidopsis thaliana landsberg
cgtcgtctctcctccatttccgtctctggattccgccgtcactctaatcggaagttacagatactttgccaagccacagctggaactgagcctcagagcggtctctctgtctctggctccaaattagccgcccgttctggtcaagaccgtcttttgaaggtcgggttctgttttgttctctctcttcatccgtgtgccgaaacttgagaagaatttggattttttttgaaactgaatttgttatgaaattcgcaggttccaatttcgaacatcaggaattttagtattatagctcatattgatcatgggaaatctacgttagcggataagttgcttcaggtgactggtactgttcagaacagagatatgaaggagcagtttcttgataacatggacttagagagagaacgaggcatcactatcaagcttcaggtttttctttcaatcgctttctctgcacaatcaaaaatcagtttcgataagattgctcaacggtctgatttgtaactttgcggtgtatgtttgtgtaggcagctcgaatgcgttatgtttatgaagatacaccgttttgcctcaacttgatagatactccaggtcatgttgatttctcttacgaggtacttacaatattctaatctacttattgtctacggatacatttgaagcttagccttatagttatttttcatatgtgagaagttacttggtttgagtgttatatatcacctaaaagcgtaattttttttacagttaggaatatacacaaactattaagttgcagttttgatgaagaatgcactgtttatttgtacataggtttcccgatctcttgctgcttgcgagggtgctcttcttgttgtggatgcatcccaggtgatttttctttctcttgacatacaattttctgacacgctgtggaaacctggaatctgtattgtttatgccgttttttcgcttggtaatttcgttcttttctgatggttacatacttacattactgaaaaacttaaacttcctctctcacgtgctttagggtgtggaagcacaaacaatgactaatgtgtatttggccttggaaaacaacctcgaaattagtcgcgttgc

SEQ ID NO: 28331 - DNA, 968 bp, Arabidopsis thaliana landsberg
gtgtgatcacctttatcacctgcctagcagacttgagaaagacaatccacactattaaacatatcaaagggttagagaagaagagagttacttaaagcacacaaaaaaagagagagagagttaactaataatagacttgtcttgtctaaaaaaaattattcatttgtttttccataagaactagaaacaaacaaacgtagagaaaaaaaagttgcgactttgacaagttagccgaaacaatggagaatgaagagggaaaaagagagatgacgaagaaacaaagttcaaggtttaagagcatttgcgtcttttgtgggagtagcaatgggaacaaagctagttatcaagatgcagccattgatttggccaaggaactggtatgcatatatacaacttgcaagttctttataaaaattcttaggtcttctttaacaatgataaaacgttctgtttttgcaataacatcatgcatgaggatttttaagaaaccttgtatttattaatacagtctctaattaataaagagtttatatgtcaatttttatttgttttctttgacacaaaccgaagacaggataattaccaaattcggttttcaaaatttgatgaacaggtgatgaggaagattgatcttgtttatggtggaggaagcataggtttaatgggtttggtgtctcaagctgttcatgatggtggtcgtcatgttattgggtacttactctatgtttattctatactacttcatgaaaattctcatcattctttttgttgagagttacgaaaataaaggtagctaggtatggtttttaattcttattatgatgcagaatcatccccaagctcctcatgttgcaagaggtattaattgaattttcattaaaaatcaatgttcagtggatctgaataaagaattataacaataatggtaatgaataatgctcttttttggctctctggcaatgtcttgc

SEQ ID NO: 28332 - DNA, 1242 bp, Arabidopsis thaliana landsberg
tactcccgtcgctccccctcgccagtcggatctagtaccgctcgacctgcctcacctgccgctcgctgccgtgcccaacgtgaggaagacgacacaaggaacgacaggctggaggtcgctgggagatggaagaggacgacgatgtggcgggcacgagaggcgaagcgcggcggggatagggtcgtatggctgaaagggttgcgctatatggctagaggggggggtgaatagacagttttgactaaaataaaaaacactagagaaatttaatcaatatgacaagaggtataaattctctagtgataacaagtaaacaatctatgagaatcaactaaggtgattggatacttgaagaacaatatgcaaaatactaatcacttgcacgtcaataagtaatgcaagaaaataaagacaccagattttatcctgtggtatcggtgatttgccgatcacccctaatccacgttgaggtggacttcaagctctcacttgctcctctatcaagacacggcttgatctttgagccaagtggacaagaaatcactcaatacctcatttccataatgtcacctttgccgctccggcgaggtaggcgcgaacccctcacaatcgacaccgcggctcctccacaatcttcttggagagctcgacggagacaacacccgagccgtctaggaggcggcaacctccaagagtaacaagccgatgacgcttgcccagtgtaccacctagtgcctcaagaatcaccaatggatgcaaatgcactaggaactctcaatctcttactagaatgcaatctcaagcaaggagtgtgagagaatgagtgggaggatcacaaatgagctcaatgtgtgcaaggaatggccaagagagccctcacacaggagctccccttctattaatagcccacctcaaaatccaaccgttatgtgcaaccaacacactttctgcgcacacgcggacggtccgtgccctgaggccggacggtccgccgtacaagtaacaactatttttcccgtttgaaatctgtcagagctatcagaaaagcgaggtccggacagtccgccaaccttggtcggaccgtccgagacctgacaacttggagcaccagagctctgaccaggaagaattaacacacgcggactgtccgccatacaaggccggacgtctacgacctgggagttattactgtccgggcttagatcccgagacagtccgtagtacaaacacccaaaaacacat

SEQ ID NO: 28333 - DNA, 746 bp, Arabidopsis thaliana landsberg
cttgtaggatctaggacaccggctagaggggggtgaatagacgtttttgactaaaataaaaaacactagggaaatttaatcaatataacaagaggtataaattctctagtgataacaagtaaacaatctatgagaatcaactaaggtgaatgaatacttgatgaacaatatgcaaaatactaatcacttgcatggcaataagtaatgcaagaaaataaagacaccgaattttatctcgtggtatcggtgatttgtcgatcacccctaatccacgttgaggtggacttcaagctctcacttgctcctctatcaagacacgacttgatctttgagccaagtggacaagaaatcactcaatacctcgattccactaatgtcacctttgccgctccggcgaggtaggcgcgaacccctcacaatccacaccgcggcttctccacaatcttcttggagagctcgacggagacaatcacccgagccgtctaggaggcggcaacctccaagagtaacaagccaacgacgcttgctcggtgtaccacctagtgcctcaagaatcaccaaatgatgcaaatgcactaggaaccctcaatctctcactagaatgcaatctcaagcaaagagtgtgagagagtgagttggaggatcacaaatgagctcaatgtgtgcaaggaatggccaagagagttctctcacacgagctacccttctatttatagtcccccatctaaaaccaaccgttatgtgca

SEQ ID NO: 28334 - DNA, 1122 bp, Arabidopsis thaliana landsberg
ctttttgaagcaatttgctcggcaaaaggccattagtaggggtctattgttgacagccgttaattttgtcaagtgtcaggccttcacacttgacaaaatatcttttttggcgagtgtctttccttgaaacttgccacagtatatttgttttttctttttcctaaactttttgtgttgtgttcctacagtatatagacctatatgtttaatttggcacaattataaaagtgttttctataactattagatttagttcgtttatttgaatttctttagaaaattcacatttgaactgcaagtcactcgaaacatggaaaaccgtgcatgcaaaaatgatatccatgtaatttagcacaagttacgaccgatttcaggagcaaactggaatcttggagcaccatgctcactaaccatgaccttaaacttgtcatcaagttattttaaaattgtataaaacacaaacaaagtcagaaaatgatgaaacttgaccacatgtcatgatatcatatgtagaggctgcgataaaaaaattgagaatatttcgataaagttgtgagacagtatgggtagaaacctaagtgaactacatttaacctctatgatttcatgtgtagttcacttagatttctatacatagtatgtctcaactttttcgaaactttctcaaaattttatcacagcatatatatatatatgatatcatgacacgtggacaaatttcatgattttctgactttttttttgtttttatacaatttttaaacatgtggatggcaagttcacggtcatgtttagtgagcatgttgctcgaagtttctggtacgctcctggaattggtcgtaacttgtgctaagtaacattaggcctgcaaacggggtgggtgtaagcgggtattttaggtgggtttaataaatgggtttattttggtgggttctgatgggttttaatagtgaatgggttaggttgggttggtttattttgtattgtgagtcaaaatggttgatacccatgggtgtagatgggtttatataggcgtgggcttccatgggtcttcaccatccgtagactgtaggactgtatttgagtcgaccctaacttagcccaagtccaacatcccaactc

SEQ ID NO: 28335 - DNA, 1438 bp, Arabidopsis thaliana landsberg
acagaaaaccaaatttagacccatttgaaagatttcgtaatctatttacataatgattttatatcatggggccatactgaaaaaataaggcccatgatccatagaattaggcacatagttcacgaggactaacgagattgattaagaaataataagagtgggttaagcaccaagcaacaaacacctcataaaaataaaaatctcatttattcaatacttgtttgtacttcatagcattttattaaatagagaatagatcaaagaagatggctcatggttgtagtataacaacaacactcaagtcacttcttgctttgtccactgccatgcaagttactaaagtaaccttgagggttactctcgaatccacctcttgagatgtaagcacccccatttgtccctggtgctaccatattacctgctcctgctcctccgccgccgctttttcctccgccactgctttgtccgccaccaccactcttacctccagcgccaccgctctttcctccaccgacattgctgcgttttccactcattcttcttatctgatattgatcaagaattttggaggtttgagagagtatgaaaattgcgtgtttaggaaatggctatttatagagaaagagacccgattcggagtgttggtcaaaagttgtgcttcccaaaattatatcgtaatctctgcattacttaattgattcaaatcacctcgtaaaagatataagtagtacaatcttacatttacaaagtgattagccattaatgggttgaaatttgaatgagaatccaaaacgtctctccatattcgtcacaatactattttaggctttattttaagtaaagcccattagcatgaggcctaattatttatatgcagatctatatagttttttttgtgtggcttatcctctgtttacagaactccaatgattaacattttatggattgtagtggattccatcggaagaagaccgatctattagcatgaaatgctcgcaataagaatctagtcttttgatatgtcagcacttttactttttgttagatgatgcatataatgtattcgtttaatcattaaataaagtgtctttgtcacaaaagaagacattggattatatacagtattggtttggcttaataatattgccatatgattatcgtaatttgagtgggcttgggctctttttttgcaagttgacaaccagtgaaattaaaagaaaagtatcaaattactttagattaaaatctccacacatgccgacaaaaaaataaagcgctcccatatatagcaaaaacgtgcttaatgtaaaaaaaaacctataataccaaaaggagtttttgaccaacaaagttttcatcttttattttccactacaatttcagataaacaatgtgttggctttaagttttcaattttttttatttatattttttaaaa

SEQ ID NO: 28336 - DNA, 1228 bp, Arabidopsis thaliana landsberg
aaaatctctcacggctggtgaaggctgtaagagtttgggaatactaaatcatgcatctaaaggaaatgtaccggaggatatcagagagatgggaaaggatgctatttacttccatattctggggctatttcagaaaaacttttcagggagggagattttccaggatccattggagagaaagacagtaggaggatccagaaacaagcctcttccagtatacctacaatccaaaaatagatttgagcctaactaaaggacaagctgaataacatgataaagaatgcttgctcaagacaatttgggaagatgtgaaaaagggctgatttatccctaagggatgacaacccatctaagcaacactaagggtttgttgctatgcaaatgatgaattagtgcaggagatgcaaatgatccaagaatggttaaatcagaagatgaatgttggaaacaaaattctccagaaatggcaaacaaatgaaaaggttccctaccacggctgctggagaaagcctgtataaggtgatggtgcttgtgcttccattgctcctaaagtatctccatggtaagacccccgaagagctatgacctaagatataacacacatcaaattttcgcattagaacctttaccgcaaatgacaaaattagatagatgaagatactcttgcatatgaaaaatgatgatcagctaggaacttgcattgcatattagtaagcagcaaagtggaaaacaaatgttcaataccaggtacaacgaagtgtcaaagtatcattgagcattagcaagataattgtaccttaaccacaatatgcttttcctcttctgtagcctcgcaaaaattatgatcgacacaaaacttacgaaatgccatcttcaaggcaatttcgattgctgtggatccattatccgagaagtatactcgagaagcccagcctgcatgcataaaataattaaccatcccccaatgtttgaaaattaaacaatgtgacagagcaagtttagaaaccttttcccactccatctaataacagctcagcgcacttcaaggcaggttcatatacattctcagggaacataacatgcccaaacctagcagcagtgtaacccatttctctagcaagctcagcctgaaacagcctaaacaaaatttcaaaataaacttcagaagattcatcacaaagagaggtaagcattaaaatctatgacataataatgcacgtggaactgg

SEQ ID NO: 28337 - DNA, 2172 bp, Arabidopsis thaliana landsberg
atacagtgcctaatgtcactgattttgagtatacatctctgagtttgtcctatttgctgttttggttacacatggttgttgtggctttgtgtggtgcagtattaacttgtattcataattctcttgaccttctgtataggttggtcaatccagtagttgttgctccgacggtagctgcagttggactttccttttacagctatggtttcccgcttgttggtaaatgtcttgagatcggtgttgtgcagatactacttgtgatcatctttgctcttgtaagtttagtgaagttacttttatccgccctctttgcaaatggagtttgtttggatgctagttacaagttttgattttcttcttgaagttatgttacttcaaaaatttcatatcacatcaggttcatgtcaacaaaatttgatactttcccattctttctgcagtacctccggaaaatctcagttttaagccatcgtattttccttatttatgcggtaagtaggttcatgtctgcttttccttagctctttcggtatataggaaaagtaagactcgagtaatctttacctcaattgaatcaactctgataatgtggtaatcatctgacatttccaactctacatgtgactttgactgacctaatttaacttcttactgacaggttccattgagtcttgcaatcacttgggctgctgcattccttttaactgaaacaggagcttacacctacaaaggttgtgacccaaacgttcctgtctcaaatgttgtatcgacccactgcagaaaatacatgaccagaatgaagtactgtcgggttgatacttctcatgcgctgagttccgccccatggtttaggtttccttaccccttgcaatggggtgtaccgttattcaactggaaaatggcttttgttatgtgtgtggtctccgtaattgcttcagtagattcggttagtgtttcctatcatctttgattaaaccatcaaaattatgtgttggaagtcaaacttttgcacttttactaatcagtttacggtacggtatgcatatatggtaattttttattttactgtcaggttggttcgtaccatgcttcttctctattagtagcatcgaggcctccaactcgtggtgttgtgagtcgggcaatcggtcttgaaggtttcacaagtgtcttagccggtctttggggtacaggtactggttcaaccactctaaccgaaaacgttcacacaatcgctgtgaccaaaatgggaagccgcagagttgttgagttaggcgcgtgtgttttggttatattttcccttgttggtaagtaagtggcactgcttatttatggtcgggtttcaagttctctatttcataacttttctttttgaatgtaactctatttcataatttacatgacctctttagcaaatacaagtaactatacatcaatagcatctgaaaattagctcaactgtacaacaggtaccattttttactctctttgactaaaacagtttttgatgtcctcaggtaaggttggagggtttctcgcatcaattccgcaagtcatggttgcttctcttctgtgcttcatgtgggcaatgtttacggctttaggtctttccaacttacgttatagtgaagctggaagctcgcggaatatcataattgttgggttgtcgctgttcttttctctctctgtcccagcttacttccagcagtatggcatatctccaaactcgaatctctctgttccaagttattaccaaccttacattgtttcttcacatggacccttcaaaagccaatacaaaggggtacgttacgtttgcgctcactttcattttcacaggaccttcagttttcatatcttctagtgtatttgcagatgaactacgtgatgaacacgctcttgtcaatgagcatggtgattgcgttcatcatggctgtgattttggacaacacggtcccggggagcaagcaagaacgcggagtttatgtttggtctgacagtgagactgcaacaagagaaccagcacttgctaaagactatgaactgccgtttcgggtggggaggtttttcagatgggtcaaatgggtgggcatttgataaaacaacaacacaatggcaaaaagtggtaaatatgtcagatgagagatccctctttttcttttctttttcccg

SEQ ID NO: 28338 - DNA, 1783 bp, Arabidopsis thaliana landsberg
  unsure (1)..(1783): unsure at all n locations
tatatgtagatatatatagatatatatatagataccctgttgggatgggggagaaaggaatgaaattcatggataatccaattggtcttctgttgttgggtggtagtggtggataacgaggaagaagaagatcttttgttttcttggaaaacaagaaatttctttaaaccgatagggttaccatcaacgtccttaatggtacgactatttccggttatcttccagtgccctgacctcgacaccctcttcgttcggttgagcttcccaaacttctccaccggcgatatgaagtaccaagtatgactcgattctatcttcgccagcccttttcaaaacacacataaaaatgaagaagaaatgttaagagtctagacatggggtttaattagggtataaaattttatggtttataaagtataatttaccaggtaaatctgcaggttcatggtgacatatattgacctcggcgatttgcttccccactagatcatcattctctgtgatcttgttattcaagtaatagttaatgagttcttcttcaggtgggttaaatgtgcatctatacatctctattagctgagagagacgatttttctttttgggacagatgagatacaaacggagatatagctagtaaaaaacaaaaaaatatattttcgagattgtaatagagttttagtgatgatttagaattaagaagaaaaaaacaagataggagattggctaacttaaatagaaattttcgctgatactgcttggctacataacttgtaaaaaggacaaaaacatattattattattataagaaaaagaaacaaagacatgaagaaggcaaaacaaagaagtgatcaaatcaaagcgctttatagaaaacgacaaaaaagcatgcacattgatgagaaggactcatgtgagtgcaaaccacatgatatcttaattttccaaaatattcgtcagttgatataagtattatcgccggatcctaataaaacatcggaacatttgatttggacggtctttaggctatattgctttctttaacccaaaaacttccatgctaaaatatttcaataatgaaaaaggagagtcccataatttgcggtgaaaatgttatcacctttttcgctttacatgtgacttataaataataacccccacttgaagttgaaatataataccttcatactaatacaaacattcaaggcaaggaaagaatatataactcggaattcactccattgttgatacactaatttttattttgttttttttccatgtattgatatttcgtatttagttagacaaaagtcacagcacacatattgaagattttgtttttgtttcaaagataatgtaatagacataatatttaatgttgtgaagatgattatccaatattgtcatttattttatgaatgcgtttaggtacattataactacttttataggtacagttgtttttagaagaaataaaatagatatcacattttgcaataatcacagagagattaaccgaatggagttaataaaccaaatgtgaggaaccaaggcgagatggtaagtaataagtatcatcaataaggttcaaaggcaataaaagacaaagatgctaggcccaacgttttatttatggtcccgtgaatttgatgggctcaattcagttctctagtaacagcagcgaataacgatttttgatcttaagcacatacatgagcataaggtgaagaagtcaaactaggaattcgaatcgaagccctatccttcatagaattcggtnccttag

SEQ ID NO: 28339 - DNA, 941 bp, Arabidopsis thaliana landsberg
ttctgagccatcaaaccctcaaatcgttgaagctggatcaggctccaattcaaagatccctgttagtcgaaactcacctatcgtctcatctgagatcaacaagctatcatcaccttcaagggcgactacttcagtcatgaagaactatgaggctaatcttaaagggatcgagagtctgcatttttagtcgttggggccagtgaatgatcttgaaaccccgggacaagtgtaaattaaaagacaaagatgacctctcttaggccctcctcatgttttacgtgcatttgtgtttacagggagggagacttgtgcctctaagcacacactctaataacatagataaggaaaagactctgaagaagtgattttcagagaaagacaaactcaaaagagggcgagactaaaaagtcaaaaagacttttaacacttttattccccatttggttttacactgtttatgttgtgtttgtcttgtttggtactgcaacagctaaaatcgtttgtgcttcaaaaaggttttaagttcttagaactattcctcgggctgcaaaaaaacgtacaaaagaaagaaggttttatattgagtatcttctcatatggtgtgggtaaaaatggtcatttttgttggtaaaaatagtgaaatgagagctataattcatggacagatgcaataattgtactggtcttccttaaagaggatctgagagttgcatcttctggttatgtcatacttcatcatgtctacgaatgaatcaatgaagtatattgtaaatgctaaatcgtatttatcgtagcttaagttgttacagcaatcatcatacttagaagggtaccctacttagaacaagaataaaaacagacaagttcaatgggggaaacaagagaagaagattgggaagatttgtggttggatcaccacataccatagacagcgtttgaac

SEQ ID NO: 28340 - DNA, 1350 bp, Arabidopsis thaliana landsberg
gacaactctcctttcaatgcccctgctacagcctctgctatctcaatggctacaccttcctaaaatatcacattggaatcatataaactcgaaaagaagtgtagagagatgaaacaagtaacataaacaagatcaagagagtgatgatacctgagcttcttttgtgctagctccaagatgaggtgtcacagtaacattttcatgctgaattagtctgctatctttcgatggtggttcctcacagaacacatctaatgctgcctgagcaacgattccggcatcgagagctctaacgagtgcatcctcgtcgatgacgccacctctagcgacattaatgagacgcacacctttcttcatcttagagaaagtttcgtcgttgaagacctttttggtggccggagttaaaggcatgtgcagggagacgaaatcggcggtggagatagcttgatcgaatgaaacaagatcgacaccgagagctctggctctgtcagctggcgcgtaagggtcgtgggagataacggtcatgcctagacctttggctcttctcgccacctccgtcccaactttcccgaaacccatcacggccaaggtttttccgacgagagatacaccgacgtacttgctcctctcccattttcctgtaaaaatatccaaatgtccaaatttcagaaaccgcctcggtattacttgatggaggagtcatctcagttcaactcaaattgattttattttttagaatttttttttttactagattacagaagaagaagaataactcaaattttacaaaagtgatttttaagtgaaagtgattaagacttagaagagataatggtattgtaatgtctacactttctcagtttctgtctcgatcgtatattgatgctttgactgacgacaattccaccttaacagtagtaccagaaacaaataattgagtcttatcaattatgatgcatgattattttttaatgacccacttgtatattgtgtactaaaatatctacaaatttgtatgattgtaaaaagaatcccatattcttctgttagtcaagttgcactatatacgccgaatcaataattaaggtaatttaaaaattgtaataaactattaacgaatataaagtttttaaaaagaaaaaaagacaacaaagactcgagaaaatgatatttgccatgacaaaattccaaaatggaaaaaaaaaaaagaaaaaaacaaattccaaaatgggtggaactgatgggttgtgacgcgtgagattgaaactttaacagagagaatatatcaggtaatcgaattatttcttcagttaccgatgcatgggtttggggatcctctagagtcgagat

SEQ ID NO: 28341 - DNA, 983 bp, Arabidopsis thaliana landsberg
tgtgatgtgaatgatatatatcttttgtttgtttggatggaacaacaaaagcaaataaaaaagggacatcctggtcactttgccgagtgtaacactcggcaaagggttgctttgccgagtgctatgaccatggcactcggcaaagaaggaaacctgggaaccggtaaagccatctttgccgagtgctgacagtggcactcggcaaagaaggaaacctgggaaccggcaaagacatctttgccgagtgcttttgccaaggcgactcggcaaagatactggcaaaggggcccactggagggtactttgccgagtgccagtccacaagacactcggcaaagaaacctcctttgccgagtgcctgctagggctctcggcacagggactggctgtggggtccctggacagtctttgccgagtgtcgtcgtaggcactcggcaaaggatccgtcaccgtcacttggcgccgtgacggtgacttttctttgccgagtaccaaatggtactcggcaaattttttgccgagtggccgacaaaaagtactcggcaaagaggctgttgccgatgtacagttcgccgagcgttctttgccgagtgttacactcgacaaagtgtttgccgagtgtaaaatagcctttgccgtgtgtttagaacacacggcaaagaagctgattccggtagtgccactggaaactaattgcctaattggaaaggtttgatgaaaaaaggtttaaatgatcttcacgaagagtacgcacgcttgtcggtgtctgagaacgcagcgttattcataatcgacatcaaaatttaacaactcccaatgtactactctatatagcaacagcagcacccgtcactcccattacaacccagagccatgtattagtgaagttaataaattactacctcggttcttttttatttgtatgtttataaaagttcctcaaaacacggacttaagcatgccttcgcttaagtttgatgacg

SEQ ID NO: 28342 - DNA, 1702 bp, Arabidopsis thaliana landsberg
ttgaatatttctaccactaaaaaatcaaccaagaaaaaaattcaaagtatcccttttttgtaggggttcattttaacctgaattgaccaaggtgttgctgactgtaatatattctacaatgctaatctttcgaatcactgagcgagacaagaacctggttcaaaaggcacaactcgtccgccaccaaccaaaggtgcagctgcaactcctctttgattcaatagacatctgaagtgagccaacctcgtcgttaccttgttgggatttttagccaattttgcatagggtgtccacaaccgctcttcccaaacacaaaatattttttaatgtttagcaattagtgtaaagtatgttttaaacttataaactttttgcaagagttataaggaaacgtttatgtacctgcagctgcggcagcgcgaggccaaatggtttgttcaatgtcagaagcatcaatatgttcaccccacatgcaaacctcgccaccaagtactagactttgttgctttttatccgttatgttttgaaatggctcgtttgcgtaaaagccttgccaaggtgcgtctatatgatccaaataccaaaattcttggttactaactatacaccttaaaccggacgcagtcacattctcaacaagtcctgtgttaagcctgattcatcaaagaaaaacgttatattaaattcaacgttgagtcacaatttctatgtacgaatgcaattaccagttgtgaaccacggttttcgggtttaatttgcttccaaaattgatgaaggtttcttccctacagtataacattagacaaaaatgtagtaagtcatatgaaaattttgattacttatcgttttcgatttgtaaggcccgtgtcatttaattcccagttgataatttcatttccgtgagcctagcgattttttgcgcccgcaacacgaaatattggtaggcttctttttccctcatccgatgttttttaagccttcaaagttagaaagttggagtaacatgagattaaaacgttttaaagaactaaacaagtgtctaactatcattaccattgggctattcggggcgttgcggaccaacaagctgcaaagaagtagatggtaatcaaaaccaacactatatataggaaatctgataaacaaaagagattttgattattacttgtgtttacttcgtcacctcccaagtggacaaatttaaacttaaagatcttgctgaaatctgaataaaaacatttccacaaaaagttaggcaacatttggtgatgcatacataaagcaaagtgttttaaagctttttaccagagagaatgccatcaatgactttgaatgtgaagtcactgctcacgtcaagtggttcttgacaattcttggagggccacaaggcaggatatccctttcccctttatttataacaatgaatattatcatagttactatcgtcgaaaatgcgaaatatataagagaagataaaaaaatagttgatgatgaagaaattaccatgagagagcatgtcctggaacatcaatctcagccaagacatggatccctcgtcgccgagcataactatatatatacatacataagtggttaacatcaatcatattttgttaaaataagaatccgcaacttcaaatcctatgattgtagtagtatgattcatttatttgcatgaatattaggatctagacatatatac

SEQ ID NO: 28343 - DNA, 2302 bp, Arabidopsis thaliana landsberg
attttgtggtgtagcaaagcaaaccaaagttgcattgaatcaatagaagactgaagagatttgagattattgccaaaatcaatttagagaatctggattctaattgataccaatcatgcaagtaaaaggaataactttttatcacacactcaatcctaaacaatgagaatctagcatttcaatagagtttgggggttaaagttggaacctttccggatccagccatggcaacaacacctctgggagagcgatgagaagaagaagaggaagaaacgagacgggtagaggaattgacgcggtggaagaaggattggtgggaggagacggcggcagcgtcgagcttgggagaaatgcggcggagaccggagaaagaaggaggggcagtgagagaggtagctgccatgtcgtcgggtttggcgtgtagtgagtggaaaaaggcaaagaggagagatagagacgagactgtgactctctcagcttaaggtagcagaggagatagaggcgatgagagggttggtggttctgctctctctcttactctcgagggtaattttgtctttctcgcactcacagatggtatcatcaagcctcgttctcacgcgcctatgtcacgtctcgttcccacgcgctgtagtccaatcctaagatcaggtgcccaaaatggtcgatgaataatcatttcattaacactgtttccgtcgagacgtttaactaattagtactactaatttctaagattgaacatataataatttggtaaaagtattcctaagggcctaatttgtaggtataaatttttctgtggtcaacaattagtcactatacttgccggagaaggcatagggatggaacactaagtatccagctgttcagcgtgtctttagtatggagcatgtgtctcatattaacccaagcaataaaagcatgcttgagaatccttcctttaaaccaaatagtccttataccagtccactctttcccctatagggttcgagtgtaacaacgtcgcagcccacttcctccaactttccacatgaagtgatcactttccggtcagctttctacatgaaccgtatggccacttttctgtgaactttccatcttaaagacattttatcttacagtttggttccaaatatttcattcccattgtcaagcaacaagaatagcttctaatggttaattgtaatactactcttactcttgtagagatctttgttattcatttattaatatatatatatatatgtttaaagttaaaagtttaaatatcaagaaaaaatttgttttgaaagctcacgcaaagtggctctctggtaaccaccatagtttgggtgagaatgatccattattttctcctttttgtccaaacattgatttcaccaccgatcaagtttcattggatcttttaaacggtatatattttactgttttgataagaagctaccaatcaaacctagaactatcaaaatggactagaccaatattgaccatttcgattgtgaacaaatagtgattatgtctattaacaaccatgtccgttaatcataataaaacatgtttttaaaaaggtacaaaaagaattgagcacactgtttaagcataattatttaaacaaatgtctaaaacaaatatctgaagacaaatttgaacataaaagtttagaaaacaaagttgtcaaaatatcataatacgaaatccaaagacatatatagaactcaaatttatcacctgatgaatctctctcaaaatcacaaatggtttttcctcttcaacatataaacatttgaactaaaaggttataaacacgaactaaaactgttgtgaggctacgctcttgagccacatagtgccatcacatgcggtttggttgatcatttgtgtatgacgattaatcacgattcgtaaaatggaggtgacaactatatgaatatcatgcattgattgaggatgtattcaatacaattcaattcatagggtcttttaaaaactttatcgtaaatgcattcttgaaaatgcagtttttgaaaaatatcaacgccatacttcttgctcaaagtatgaattatcaaagtattaggcaacgtgtaaccaagagacaagccgatattggataacatgtagtaccgtcacgagattttaaacctcgtaagtcgtaagtaatgaccaaatttttacatcatcgtgctactagacgacaaaacaaaacacgtgaaaatcaaaaaacctatcaatatcattaaccagaccacatctccaagaaacttgattgatactgaagcaatacaagcaacaaaactat

SEQ ID NO: 28344 - DNA, 896 bp, Arabidopsis thaliana landsberg
gtggaagttgcatctaaatataccaaagattaatactgcgaaaatatgataaagaagatttttttttttttgtactctatagaaatttgtaaacgatattattagtgtttgattaaagactccaatttttaacatctatatatacatttttgcagccattttatgaaataaatcctggagttggaacttatttacaatgcctgccactggcttttaattattgattttcttttggcaataaattgattaacaaacaaaaaatattccaaatatattccaatcccatatatcacgtagatttctccaaaatttgaactagatttcagaaactatttaaaataaaaaatatttcaaatatattccaatcccatatatcacgtagatttctccaaaatttgaactagatttcggaaactatttaaaacaaaaaatatttgacaaatcaaaatacaattgcaatcccttaaaatgagcaaaacgcacctaaatacatttcttatgagttcactaaatcttatttctccaatatttgaattaggtttcgacaactatttaaaacaaaaatttgtttggcaaactaaaatataattgtaattccgtaaaatattttttaaaattagcggtgtaccgcagatttttttaacgggtcgggtttgtcagaacgggtttggaaggatattacttaataacaattgtaaactataaaatataaatattttatagataaatataatttacagacttttatatatactaatttaaaaaaaacaattgtctctacggtgtaccgcgggttataatctagtaatgtatatagccacaaaatgaatttgtgtctctactatatgtagtgttcccgtcatatatgcatttttgcgattgtcaatcgcatcttc

SEQ ID NO: 28345 - DNA, 1664 bp, Arabidopsis thaliana landsberg
gatctcttttaagcataattctctcgactcatattggcatcctgattaataagtgctctctcagcagatgatttatgaagatcgttcgaaagatcttccaggggctttgtttcatctagaagttgagaagggtctctatcaaaactatccctctcacgagtagagctttgaatgattggtaggcctatcgttgattcagttttgctacttgctaagttttgaagatcaagcttaagtacatctctcatacagctgttatctaactgtgcttcagcccacatttgctttttaagagcatttgctgcttccatacgatcctgtgaataaatttcaatcagataacaaataatagactcaaaaggtcaatttctactctgttcaacaggaaagctgctaaaagaaaacccagactttacctcaagacctgttctgatggagtttccttcattggcaatgccgactaaagcaacaagggcattaaggcgctcttcaacacttagatgacagtaatccccttccgtaagaccttgaatccatgattggccctggttgctttcatcaattacggcatccacgccgccaaccactgtatttttatgccgctcactatgttgtggaacaatgctcttcatattgcttggaggaggagatgaaaactccttctcaagctcactctttacatctgctttaacaccacagaacattgtatctaccccctttcctgacaaaacattcgcttctccaagaacggcactttttgatgcacttgccagtgtagctaaatcatcaacctcgggatcctcatcaatatcaatttcgaagtcttcatccctttcaagatcattcacatcttctggacctgtaaatccattttcaaaagcccgtatcttcttcctggcatctgcgagtattgcctctccatccttaggatccttcacataaggagctcgtacacaataagtcgaaggagctattctttcaaagagtttcacatctcttgtcaatgcaacagaaatagaagcctctggggtcttgcttgtggtcaagtcccgaagtccagatttctttcaatggaaaacataaagactatgtaaatgaaaaaaattcaaatacgatgaaaacagcatagcaaatatagattatagatttacctgaatcttgtcagcaagttctaatactgtcagtcccttgcttccttcaagagatagaacatgaaaggctgcaaatttgacggttccaggtgtcaaccggtgcctcgacttgcgaggagcgagcaaccctttctcccgcatcgatgcaaaagcactttcagctgctgtaccatttcggattgtagaaatgacatcttcacaacctttagcctgcatacacaaccaaaccaaaacaatgtgtaagaaaaaacgaaaaccatctttatgtcaaaggcctagcttagcttccaggatttcatttttatttctctccatatatagtactaccatcacatcctgagtaaacacttgttaggagttagggggcgcccaaacgtgaatacgaacctcatccttatcaccaggtattggtcaatcggagaatgttttttcttcagcttgaggtccaaaatccagcagggagagcccataattgtcaaaagtatttcagcgccatgttagtgggttcaaatg

SEQ ID NO: 28346 - DNA, 1437 bp, Arabidopsis thaliana landsberg
tttcgtagctcgtcctcaccaatctccttggggagattcttgacgtacacgttagtgaaacgcggtgtaggggtgttttcatcacgagcacgctcttgacgtctgatgaagtgtcccacaaagacttgcttgtcgttcattaacattccgtttagcttgtcaattgcggcttgagccgattcctccttctcgaactggacaaatccataccccttggaccggccagtcacgtccattgcaactttgcatgagaggatggttccaaaacttgaaaacgtctcgaacaaggccttgttgtcgattgaagcgtcaaggtttttgatgaaaatgtttcctttaccgctcagtcgcgtgctcgggtcacggttcgagagcatgatccgaatgggcctatcaaagaggggagtgtagttcaaggcctccattgcacggtaagctgcaaatgtaaatcaagttaacttaacatatataaatataggcaaataagatctcaattcattttagaaaaccagcatctatggaatttataaatgcacaaatacctatcgtttctacaattaatgaggttggtattgaaagaacaatttcaaacaaatttcacgttttgaactaattaagaaaaatcatagaataagagactgatgcatcaactactaaaataaatgttgtagctttgatattcaaatgaaacatatcaatgtagcagaatcatggtatagtagagatgaacgtaactacaatatataatattcattatatgttaatttcaagacaaataacatataagaagatgattcgcacaggaacatgatactgatcataattaataaccatgtctaataaaaaatcgagattgaaaaaaatcaaatcaaaacactttttcttattgtaatgcaattcatgataatatatatattttgttttgcaagacatgaaccctaacttgcaattgaagcgatatagaattgtatttaccatcgctagggttactgaaattgatgtaggcatatcccaaagatcgacgattctgatcacggcaaactcttaccgagacgacattagcaacatgcttgaacaaatcaaatagatgcgcttcagtcactttcgggtccagatcaccggcatagagcgacgagttcgggtgggtttgatcggctaccactaccggggatggaagaggtattgaaaccggaacctgaaccgaagtctgcgccgtcggactgggaacttgatcaaccattgtcgccggtgcaacacctgtggcaaccgctgccgccatgattatgagtttactaaaaacaagacgatttgttattttcgtctcgtgaaaggaaacaaaaacactgattctagaaaaaccaagattcgatgatttgtatcagtaagggttttaagtgagaaagagattttcggtaaacaacatgactcgaggatttg

SEQ ID NO: 28347 - DNA, 1130 bp, Arabidopsis thaliana landsberg
atgctcgatcttgaatatagcttttgtttcaaggattagatgtttggttttaaatcttttccattgtccattggtattaatgtctcttgaatgtgtatatttcgttttgatacagtccactacacattgctctagatttttcagacaatggtggacgtctcttttcgtactctcttatcattatgaatttcaggttgttagttttggatcttttggttaaggttaatttttttttttaaccattatcaaaaaaggttaattgtccatttttctaactaattttgttgcctcgtcgtccactcagatttttagttggaacaagaaaaggtaaaaatcataattatccagggccatgacttaaaggcatgaatatatgattatgcaaggaaaatttcataattatccaacaaagagagcatcattgtctctaaccatgcgttccttattgtaacaaactttttcaatattatttatttgttgactaccttctcagatcattatgtctacactctcattgctttaagagacacaaaatcatcacctagactcacaacctcttccattaaccaaacaatcccttttaatcagacaaaactctgtctctcaatctcaaaatcaagattgacatgtctcgttttgtgcttctctttatcatttccacattcattaatctgtcacaaggtattaatgtagagtatcttcttgtttgaaacaaatatattatatatgtgcaataaggtttttcattagatgttgtttgatgttttcaggagcgcaaatgccttacatgaccacagatgctaaagaagtttccggcaagtcattcgattacatcgttgtaggtggcggaactgcgggatgctccttagccgcaactctatctgagaaatactctgttcttgtcattgaacgtggtggctcaccttttggtgatcctttagtagaggaaagaaagtactttggatactcattgctaaatacagatgaatactcatctgttgcgcaaagttttacctctgtagatggaatcgaaaactacagaggacgcgttcttggaggatcgagcgctataaatggcggattttacagccgagcaagcgatgagtttgtgaagaaagctggatgggaca

SEQ ID NO: 28348 - DNA, 1837 bp, Arabidopsis thaliana landsberg
ggccacggccatcagatccgacaaagagtgttccagtagcagtttctttctttccatcttttgcaccgttaccagtagaaagtagagtattagagcaagcctgtgcagaggaagaaccaccaggagctacagtattctttaactcagtactagtcgatgccctgaatttgctacctttacttggttgggccatctctggctttccttgagtagacccctgtaaacgtcctggttttttcttttgagcctggagtgaatatccctcacttttttccttactggcggagacgtctcttacacatgtagttattggactattggtatccttaaagttccgccgggctaaagaagaaactgacatcggacgggagttgttggacaggaaaatgtcatcattacacggaatatcaggatcctcttcgtttaataaacagcagattacacccccaacaatctcaggatgaggatctaaagcgattgtaccatctagctcaagcatcacatgatcatccagggttgcctctcctggatgagttggtgcaatggaaggttcttgctcggtggggttaggaaaagcctcgcggtttgtatcatttgtagagttcaccaacagtgagctaagaccatcataatatgacttgtcaacttctttgccatctacttccatgaacggttccatgtcttcttcgaaaagagaagttgaaagctgtgccaggaaatcagtgctagccattgtgttttttgcctcgtgagcagtattctctagtttctgctcggaatcttgatgaaccacatcacatactgatagacctgcgtgttcagtgaatgtgagattttctccttctacgtaaggaatgtctccctgtaaattatcttctggcagaacatgagttgtcacgcaaccaccttcagccaagatttctggaaacgcgttgtggataatatccatgtgagagtcctcaagaccaagatgtgttgcatcaccattatccatgaaatggctatcattgggtggaccagggaaacctaaatccaaggaattgaatggctcagtcctaaattgctttcttaaggaatgataagtactttttagcctttcagcattcctcttcctagatgaacttttgttttcttttgaatatccagttctaccaaacttagtaggaaaattagggttagtacgttcaagctcagccatccgaaaagccgcctctacagaaactactggatcataaagcagtgcatgccatcgatcttgcaattctctaatagaaaatcttctagaaaactgcacagcacctttagcaagcgattccaaagaagcaccagcctgcaaataaattaaggattctggttcacttaattgcaagattaccagacaagctgaaagaagaaacacgcaatacatacatacagaagcactaatttagtagagaaactttttggctagcctagcttgatatataaaatgctttatgagagaagcaatgaacataattatctatcttgtggtgattgatgagccatctgtaaaaagacaaaaggatattttttcaatcatattatgttctcataactgaacagaaaacccaatttaagaaaaaatatttgacagtcttttccccgtggagagaagcatgatacatacagatcatcagtgatcacacagcaatatattatgttcctcgcgaaatggtataatttgttctagagcaacaattataccttgccacatcaagattgtgtaacttggttcccataatactatactataccgcatataacactgggtttaagatgttaaccggatcaaaacaaaagctgacatgggtattca

SEQ ID NO: 28349 - DNA, 1202 bp, Arabidopsis thaliana landsberg
tggcacgttgaacctgtggatttgttattctacctatgattttaagtttgttttcagctatcagtgctgaatggtcactgtccgggtatccttagaggggaccttcgcctgggtttgactacactctccacccattttgccttctcttccttggaaaaacgacgagacatgatgcactttgacagattcagaaaccagagcagatctgagactcagaaaaaccaaggacaaactcgcagacctcaacctgaggtaaataagtaccacttgttaacaaaaaccactcatagtaactcctcaagagaaaaaagctaccaacgggagagaaattctacactaaggtagtaagcagggcaaaaacaacctccagccccaaacaggaccaaaactacaacctctggtctctttatccccaggaacaaagattccaaaccaaatcgccaacaggggagctaagaagagtcatcttacttgaaagttccgtctggtctcctctataactccttgcgtgcaaacagagagggtagaactcgggaaagggctagaaagaacggtggaaaggacccgaaaactggtcggaaacaggggaacagcgggagaaattaccgaaaataatatgcaaaagtagctaagatctactttttcaaaataacgtaacttcttttagcgcctcgaaaccagtgcccgagagagaactctataatatccccatctattctatgataatgttgtttataatgatgatgtttgtcatgttcttctttattccccatgtaattgtttttcaagtttccggccgagatatgagttttacacgattcctctttattgtttatgaaaacaaaattcaagaatgatgaaatttaaaattaagatcgtttatagttgttaattttaatattttttttatgataatagttacatttctttatgtactgtatactttcatttttattatgtattcatataaaaaataactttcaaattaattgtcacatgaaattaatgttatgactttatttaaactagtattgatacttaaaaaaaaaagatatgttttcaggtgaattttatattaacctttttttccttgaatataatttaacattaaatttgaaaaagtattaaaattaaaactaaatttttatttaaaataaaaatcaatattaaatatttcagaagaggctaaattcattaaatga

SEQ ID NO: 28350 - DNA, 2658 bp, Arabidopsis thaliana landsberg
gggaaactcgccattgttattgcttgtggcatgtgttggaccagcttcctaggaatctggactatcggagtatgtggcaagacacttttatgaagaagttgttcaaatgtctatacaggtcatggtctgaggaggaattccataggaggtggttgaagctgatagacaagtttcatcttagagatgttccgtggatgcggtctttgtatgaggaacgttagttctgggcacctacttttatgaggggaataacatttgcggggttatctatgcgttgtcgttcagaaagtgtgaattctttgtttgataggtatgttcaccctgaaacctcacttaaggagttcttagaaggatatgggctaatgctagaagataggtatgaagaggaagctaaagcagattttgatgcttggcatgaagcacctgagttgaaatctccatcaccttttgagaagcagatgttacttgtatactcccatgaaatattcaggagattccaacttgaggttctgggtgctgctgcttgtcaccttacgaaggagagtgaggaaggaacaacttacagtgttaaggactttgacgacgaacagaagtatttggtggattgggatgaatttaagtcagatatttactgctcttgccgctcctttgagtacaagggatatctctgtagacacgcaattgttgtcctccaaatgtcgggtgttttcaccattccgataaactatgtgttgcaaagatggacaaatgcagctagaaacagacatcagatcagcagaaaccttgaacttgtgcagtctaatatccgccgtttcaatgatctatgccgccgagccattatattgggagaagaaggatctctatcccaagaaagttatgacatcgccatgtttgcaatgaaagaagcttttaagcaatgtgctgttacgattaataccatcaaacatcccgccaggtgtgaagaagctgcaattcaagcaggagatcctgtccaggaagaaaatcaatatggatccacatcgacacagattggacccgaacctaacatacatgcaggcaatgttccatggcaagctgaaaccagaagggagaagagaagtagcctaaacaatacatctaaaaaggcaaaggttcactagcattttctactatgctgtcaaaatcatcgattaatcttttatgggtactcaataggctataatatcatacatatggccaaaagacaaacaaccatctctgctaagctgtcatagcctgatgatgtgatgcgtaactttgtttatgattgatctttcttcacttgtgcagcatgtggctcaatctgaaactgttggtgagggaagccaagaaggatttcaacatgtggtatgtttgatttttctatctgcatcccgaatgcaaaccactcagtgacatttggtgaacttgttcgtttcatatggataagtgttctgatcgttgtcaattacaggctgatccaagacagtcacaggcggtattggcagggcaattttacatcacaatgccaggagtattccaaaacttaattaacacgaacttccaaaacattccggctacaaatatgcaccagatcaatccccctgggtgaactacggtaaaaaaaccactgccaacaagcttgataacttctttgtgtgtgatatattagggatctcctactcaactaatttatcgcttcttctttggttccacgtgttgttagaataagttaatagagtaaatggtgtatcttttaattaactattccgtgtaaaggtatggttggcatctgtttgaaagctaactaattggtcatgcttggaaaatgcatgcagtgtgagaaagctcatgaacaatttcaaggaccatgatcagtgtgggtgtaaaaaccagactggccggttccaagaggcattttaattcttaacattattgaaacaacaactcattactctatctatcttcatcaagtcatgtcttcaggttcttacctactactgctatgtgttgtcaggctctgttttctcctgatcttttgaacctttaaggaagagaaatggtggcatgagattgagagattccatgtaaacatgtaaagggtttcctttttagcttaaggcataaaaaacaggcttctggttttgcagagagagaattttttggtgatctcgaccgaactatccctatgacttttatatccaatgaatttgaattagcctgttattgatacttgtgacaatcttcaacgcattagatttgctaatatcattattcgtgattcttctactatgtgattggcctcaacgaaatattacaatcttcttaagctacgaacgattaagattagtttttgactttttccaaatttacgtttggtgctaatattatgagtatgtttcaaagatttaacaagttgtcaatatgtccgagtggttaaggagatagacttgaaatctattgggcttcgcccgcgcaggttcgaaccctgctgttgacgatatttttttaaattttcatttttaggctcaaaatcgaatactctcatcttacttttggttctctcatagtttagcgtaccagcactcaccaaccattagatggactctcaaacaaataaatttttaaacttccttaacttttacctggtaacagatctca

SEQ ID NO: 28351 - DNA, 2002 bp, Arabidopsis thaliana landsberg
actatatttcaccttaaaaatgaaaacctaaatagggttcttaagacctgggtaacaagaatgtacttcctcctggccctccaaagaaaaaagcattagcccaaagttcacccatacttggtttctttatggctttgtaacaatttggggtgcttgaaactgtttttaaagaatgaagtggtggacccatcgaaccttccaatttaatatcttcgattagttcaataccactcacataggctgctttcttgaaaccctcttgtgggaaatgtccacttcccatgcttggactcttctctttcactggactgtatacttctcctccccatgatactaaacttgctccatgggctaaaccaacatctgtgaacaatgaatttggccaatatccaacataattattgaacgccatcaaccaccaatttcctgtaatatgatcctgtttaaacagacgcagttatttatacattcgaaatgactagagaaggaaaattttggtagttgatgctaccttatatatgttgatgtttatttcatattgttcgccactgtaaatagatattggtttaagaagtaagcctagtgggatatcagtgctcacttgcacaaagccaggacataatgtattatagcatcctgtcttcttaaatccatccgtctatatgagtcaaatgatagaacatgtataaatgatgatatccacaacatgagaatatcaaaaatgtcaagatggattttatattaaagctctttagagattttgagaacatacagtccagtaggtgtataagcgagtgtgattccggtttaaccattggtacacctgaggatatttttgagtgtgggttttggtaatctttttttacttttcaccattgataaaaaaaaaaattagagaaagcaagggacaacacaagatcttgacttactatccatccagctctaatgccttgaaactgttcatttaagccgctagagataagcatacttgcaagactgaattgagtaggtgaaacttctggttcccaaagattaaggtttccccttgctccataatgagaatatttgtactgagccacggcaaacttgaatcaaagagaaaatatatgaagaaagaagtgattaatgcttcattgtttgtttgaaattcaaatttctctatgtgacggatgtgctagccagattaatacatgaaaaccagtcaaatcaatgttcttgctctttgaagaaagagatattgaatctttgaaccccatggctttcaaacgctgatcttgtataagatcattcggtgtggttctcttaacaatcacggtcccaagtggacaacttatgccatcttgtcgaagcggtacgggacgagaatcattattattagttatgttccatttaggtatagttgtaggcctcaactgcccatcatatttcaatcaattcataaataaactcctctttttaaaaaaatatactcgaagtagggaacttttataatatagacatgcataaacctgaatagaatggtttatgagtagaggatgattaaaggctagctgcttgtgaatgtctatgcaatccaatgtatcgccatgtttagtctacagaattgcaaacagaaataaacttgatttgttctgaaaaaaatgcgaccattctatgattataccatattttttgaaaggcttacccgaaaactcttgatcgcagacttattgatatagttgagtaaactctccaacgtgttttcctcctcttccaatggttttgttctgtaactctcagtaactataattagagctattgctgaaaaagttagcataagaactttttcataggaattcatggcaactaataaaactcccaaggaaccaagactatatattaactatcttttcacacacaaaaaaaaaaaaaaaaaaatgtttgatgcacaacaactatataatggtgtcagattaatctaaagaccataaaaatcaataaagatcctatgtagaatgactgg

SEQ ID NO: 28352 - DNA, 1751 bp, Arabidopsis thaliana landsberg
  unsure (1)..(1751): unsure at all n locations
gtatacgaaaacaaaaaggttaggatgcttcactgattgcaattcaaatcacatttgctaggtttggaagttactgttaccagtacaaaatctattgtgattatgaaagatgattctaacgaaaagttttagtccagatgcgaaaagaagacagccacattagttaagaatggaagtgttagaatccaaaggactatgactaaaattgtaagaatcactaaatctatttgtacaagtttgggtaattttgtaggagtatttgtgttcaatttcccaatctaaaaagcagtgtttagtgtttcaagaaatgcacaaccagaagagtgcatagaatagctttaccttatcaatacaaatacacattgaaagacaccagccacaccagtccaagttgaaggcccagtcttcacaaccgaatcttgaatcagcaagccaacagaagcagctaaggaaacaaatgctacgacatacgctatgaaaagccacagcttcaatctgtagccaagaatccaaatacataaaaacacaaatcagaaacagttgaaactaaccgcaaatgtcagcgaaaacttgatttcagataatgagggttataaacacacaagatttctcaagtatcttctagtttacacagaaatacagattagaaacacttagtaaccaagctcttaaatcttatccttgattaaataactgtatcagcaagccaacataaacagctagggaaacaaacgctacgacatacgctatgaaaaagccatagcttcaatctgtagccaagaatccaaatacataaatacacaaatcagaaacagtttaaactaaccgcaaatctcagcgaaaacttgatttcacataaatgaaacacacaagatctctcaagtatcttctagtttacacaaaaaatacagattagaaacacgaagtaaccaagctcttaactcttatcttgatcaaaaacagaatcagaagcagagcgaatgaaacaaattcaacgacatacgctataaataagcttcaatccaaatccataaaacacaaatcatgaatacttcaacacttatagaagcaatgatcactcaaatacttcaaactaaatggatcagtcacaaaaatcagctaaaatttgtacacttatctcaactaccttctactttccacagaattacagatttaaacaagaagtaaccaagctcttatgttgactcagatcaatttgaaaaactaacctccactcgccttcgtcgtaaggagagtaatcaatgtcttcttttnnnnnnnnnnnnnnnnnnnnnnnnnnnnnnnnnnnnnnnnnnnnngcgaaatccccaaatccaacggaccaaaatcgctcaaaattcggaaaccctaattgataaattatcgagagttagatatatttaccgggaaggtaatggacgaagggaacttggatggaactgcaaacgacggcgtcgacccaaaaccaccacccggttccgaaaacggcgccggagaatccgggtccgaaaatcgcccacagttctgccaaatccatcgctcgatatgattcgtctccaattggatagatagataaataaaaactttattgttgatattgttaaattattatagtttttataccgaaaaaatgtcattaaaattattatgccaaaagtgtcgaaacaaagcatcaactttacctgtaatgataaaatcatcaaagtaaattattaatttttttcgatttggccaaataaaagatattagat

SEQ ID NO: 28353 - DNA, 906 bp, Arabidopsis thaliana landsberg
gtgtctgaaattacaatgtttgttttgacaaaaattgggactttgactaaaatctgaattttacagtcctaaaatctcaaacccagatcataaaaattaaaacttttaaaaggaaatcaaattgctacaatgttgtgatcgagagataatgactcacgtagaggaagaaggaccaagaagaggattagacttgaaagactcaaaagagaatcgtccgaggaactttgcaagacatcgatggcttttgtgaggacaatcattatagtacattacaacaacgaaaacgacgacgttagcaatcactactattgggataatccacgatctccattgcatgtccggtgtcgtctcgccgccattattagtttctctgcttcctccttcaggatcttcctctgctgctgtggaaagcatttcacagtctagctattatagagctttaatatgcaatcgaaatctctgtgaattatctcaagaattttgattgttttttctcttcttcttgtttggtatcagaatttggaaacatgttgaattgtgctatacagtttttgaatagaagacttcaaataataacttgcaaaccagatgagacaggtaaggtaactgtgaacagagagatatttgctgtcaagagtttttttttataattgaaacgagtcaacggcaaatttttgtttttttggttttgttttatttttcttgtctttaatatgtaaaacaaaaacccgaagaaattcgaaagttaatacttaaataattgtataagagtaaattagtactatagaatgggtttgtgaatcaagttttttttttggtttatgggtaattttagctaaaagctaaaattgatttaagaagccttgttatgttccctagtaaatgaattaaagaagattgtacaat

SEQ ID NO: 28354 - DNA, 1438 bp, Arabidopsis thaliana landsberg
  unsure (1)..(1438): unsure at all n locations
ccgagcctccattgttatatatgttatttcctcatctctcattcatctaacacaactgttttgtcctgtagggagtacttcattgggggtcagccaatacgtacatccttcttcattgaattacaaaaaccccaacaatggcttttcacaccggttagtactatntacatttaccatttcgcagcttaacctttgtatgtgaaacctaatattacaagctttgtcagaaccttacctatttaatgtctgcagcatattgatgcgttggttgcctttgtatggaaaaaacaccaggcgtttttccatacaaaccgaatcacgattgtcgactccatgttttcctctatcatggcaacctcttaccccactttccaaaaaacttccaatcctactcagtttttgtggcataaattgctttctttcttatgtgaaaggggcaatcagtggtaggaatgtcccccagctttggcttgaatccgttgatacggtatatctgcctatgaattggggtcgcaaacattgggtcgctctatctgtcgaccttcgaaggggccatattgctatacttgacccgatctctgattgtagttccactcggaaagttctttcatacatgcctcctgtggcgcacttgttacctcatttgctccgagccgtttttggttccgtatcaaaacagtggctacaacgtgtttcacattttctagagtcgacgggttagctcaaaacaatcgcggtggtgattgtggtccactatgtgttaaatttatcgaacttcactcacacagtcttcatgacgcgcttaatagtctcaccgatgcagcggtggataatcttcgagctcactataccatcgacctttatgaagactctgttgagcctatctaggtgaatgtccggcttccaaactttcccctttcttcctttacacaactactgtacctgatttcaccatacattagtcatatctgcttattttcatgcacaaaaaccattattattgtactttgtacgaatacataatacattttctatattgggattatccctttcaaaaattaaaattcatcacagattctaccactcttataatttgatttatcaaaacatatcaacttaccaattgcccaagcaaatgactcctttctttggcttcatattgcgtattatgagttgttacaaaatttcattttcataatccacaacatttctttatgaccgttaatgtttcttcacgcaaatcgccaaaacgttgtcgttttattcattcttatcccgaccgattaaccataaattcccaattctcaaacttctaaaccctaaaatcgacttgcatatctaattcttagattctcttcttcttattttcatcttttagacatttggagctcctattcgtcttcttaaccgaattggagatcgtaattgcaaaaatgag

SEQ ID NO: 28355 - DNA, 5910 bp, Arabidopsis thaliana landsberg
tggaagaaagattcaggaagggagattttctcgaggttatctagagaagaagacgaggaagaagcttggagatgggctgctcttgagaagcttcccacttttgatcgtctcaggaaaggaatcctaactgcctcacatgccggaggacccatcaacgagatcgatattcagaagcttgggtttcaagatactaagaaactgctagagaggctcatcaaagtcggtgacgatgagcatgagaaactcctctggaaactcaagaaacgtatcgataggtatacaaacttctctcttttttttttttagtttagcttttaatgggaacagaggagctctgtttttgtttgatgttcatgttggagacttaagtgttaattgtttgtaattatgaaaatgacagagttggaatcgatcttccgacaatagaagtttggtttgatcatctaaaagttgaagcagaggttcatgttggaggcagagctttacctacgttcgtcaatttcatctccaattttgctgattgaagaatgcgttttttttacttatctgtttcttttgtgtccaaacaaaaactagatctctaacagtggaattttcgttaatattaacagaagttcctgaatactctgcatcttgttccgaaccgaaagaagaagttcactatactcaacgacgtcagcggaatcgtcaagcctggcaggtgaattttcagattctgtttcaccattttaaaatattggaaagtatttttagttatacttgcacttgttgacccatctttgaattctacaggatggctctgcttttgggtcctccaagttctgggaaaacgaccctcttgcttgccttggcgggaaagcttgatcaagaactaaaggtaaccatctttccctctctctatctctgtttcaacttcatggatatgtttatatgatctgtgtgaatcaattgtaaactttgttctttgattttgtagcaaactggaagagtgacatacaatggtcatggaatgaacgagtttgtgccacaaagaacagctgcatatatcggccaaaacgatgttcatatcggtgagatgactgttcgtgagacttttgcttacgcagctcgcttccaaggtgttggttcgcgttatggtgagtttgaacatttcctcgacttttctatcttctcaaaacattcgatttcggtatgttgattttgctaaccatagatgttttggtggtgcattagacatgttgacagagttggcaagaagagagaaagaagcaaacattaaacctgaccctgatattgatatattcatgaagggtagttatatcactcccgaaacagttaactttgtaataatttggagtacacaactaagtcataacttcattactccattacaggcgatgtcaacagcaggtgaaaaaacaaatgtgatgacagattatatcctcaaggtatagtttccttccaacttttcttttatttgagaattatcaagtcttgtacttgacatgatctaaactctttgtaatttttacagatcttaggacttgaggtctgtgcagacactatggtcggcgatgatatgttgagaggcatctccggaggacaaaagaagcgtgtcactactggtgaaatgctggctggaccgtctagggctctgttcatggatgagatatcgactggtttagatagttcaacgacttaccagatagtgaactccctcagaaactatgttcatatcttcaatgggacagctctgatctctctccttcagcctgcgccagagacattcaatctcttcgatgatatcattctcattgcagaaggcgagatcatctacgagggccctcgtgatcacgttgtggagttctttgagaccatgggattcaaatgtcctccaagaaaaggcgttgctgatttccttcaagaagtaagacttgattcataagaacacaatcatatgagcgattttgttccatgtcttacactttaacgatcactactcttgcaggtgacatcaaagaaagaccaaatgcagtactgggcacgacgtgatgagccttacaggttcattagagtgagagagtttgcagaggcgtttcaatcattccacgttggccggagaatcggagatgagcttgctttgccctttgacaagacaaagagccatccggctgctctaaccaccaagaaatacggagttgggattaaagaacttgtcaagaccagcttctcaagagaatacttactcatgaaaagaaactcctttgtttactacttcaagtttggacaagtaagtgattacgcatatagtaccaattcttcacatcttgcaataatatctccttatctttaagagagactcatggaaatgttgtgcttgcttccttgtgtttacagctgctggtaatggcatttttgacaatgacgttgttctttcggacggagatgcaaaagaagactgaggttgatgggagtctctacactggagccttgttcttcatccttatgatgctcatgttcaatggaatgtctgaactttcaatgaccatagcaaaacttcctgtgttttacaaacaaagagatctcctcttctaccctgcatgggtgtactctctgcctccttggctcctcaagatacctataagcttcatggaagccgctctcacaacattcatcacttactatgtcatcggctttgatcccaacgttggaaggtacataaatacactaaacaactaaacatgacaaatttggatacttatggaggagctgctaagggttctcctggtttcttgttggtttgctgcaggctgtttaagcagtatattctcctcgtgctcatgaaccaaatggcttcagcattgtttaagatggtggcagcattgggaagaaacatgatcgttgcaaacacatttggtgcatttgcgatgctcgtcttctttgccttgggtggtgtggtactttcacgaggtatgtgttgatgcatatctgtttgcgtccagtttctcatatcaaaagctgattaattttatccattaacctgatcaaaacagacgacattaagaagtggtggatatggggttactggatctccccaataatgtatggacagaacgcgatcctagccaatgagttctttggacacagctggagtcgagtaagtatcaccctcctctgtccactccagattcggaaatcattttccatggttctggtatttcttttagacaggactgatagggttgattgtattacaggctgtcgaaaactcgagcgaaacacttggagttactttccttaagtctcgtgggttcttaccccatgcatactggtactggattggaactggagccttacttgggttcgtcgtgttattcaattttggtttcacgctggctctgacgtttctgaactgtacgtaatcattccgttttgcttgttctcatcttctgatacaaaagctgttttcttaaaataaaaaatccttgtgaactttgtttgcctacagccttgggaaagcctcaagctgttattgcagaagagcctgcgagtgatgagacagaacttcagtctgctaggtcagaaggtgtagttgatgctggtgccaataagaaaagagggatggtgcttccatttgagccacattcaattaccttctacaatgttgtatactcagttgacatgccccaggtaataaccttgctcgaggatttcgtatcattaatgcaagaaacttcatactgatttttgttgtggattctttctcacaggaaatgatagagcaaggcacacaagaagacagacttgtcctgttgaaaggtgtgaatggtgcattcaggccaggcgtgctcacggctctcatgggtgtctctggagctggcaaaaccactctgatggatgttcttgccggaaggaaaaccggtggttatattgatggcaacatcaccatttccggttaccctaagaatcaacaaacatttgcccgtatctcaggatactgtgaacaaactgatatccattccccacatgtcactgtttacgagtccttggtttactcagcctggctccgattacctaaagaagttgataaaaacaagagaaaggttattcagagacattatcatttccagaagtaaaatgaggaaatcgaaactatactaacaatttttgttttgtttggtacagatattcatagaggaagtgatggagctggtggagttaacgccgctgaggcaagcactggttggactacctggtgagagcggtttgtcaacagagcaaagaaagagactgaccattgcggtggagctggttgcaaatccttccatcatattcatggatgaacctacttcaggattggatgcacgagctgctgccatcgttatgaggactgtaaggaacacagttgacactggtagaacagtcgtctgcaccattcaccagcctagcatcgacatctttgaagcctttgatgaggtattcaaactacattcaaaacaaaaaagtgaaaaagaactttaatcatttgttaacatgcttgggtatgcgtatatatgcagttgttcctacttaagcgtggaggtgaggagatctacgttggacctcttggccacgaatcaacccatttgatcaactattttgaggtaataaatacgactaagacaaacacaccatacttaaaacttgtttggaagacatggactgaatatgttgactcggcaacagagtattcaaggaatcaacaagatcacagaaggatacaacccagcaacctggatgcttgaagtctcaaccacatctcaagaagcggctttaggagtcgatttcgcccaagtctacaaaaattcagaactttacaagtaagtacatcagtcatcatgtcgaggttaattcacatattatacagcagaatctgatctcgccaataacttttctcttatttaggagaaacaaggagctaatcaaggagctaagccagccagctccaggatcaaaagatttatatttcccaacacaatactctcaatcgttcttgacacaatgtatggcttctctatggaaacaacactggtcctactggagaaatcctccttacacagccgtgagattcctcttcacaatcggcattgctcttatgttcggcacaatgttctgggaccttggaggcaaaacgtaagctaaaaaaacctcagcaaaattctagactttacaatacaaaaacaaaactccttattgaccaagttcgaatatttttgtcacctccaggaaaacgagacaggatttatcgaatgcaatgggttcaatgtacacagctgttctcttcctcggattacaaaacgcagcttcagtgcaaccagtcgtcaacgtcgaaagaactgtcttttaccgagaacaagccgccggaatgtactccgccatgccttatgctttcgctcaggtacttcaaaaaaacatcatagagagtgaaatttacgatttttcgttgcggaaacctcaaattcaaacttcgatttgttccaggttttcatcgagatcccatacgttctcgtgcaagcgatagtgtacggtctcatagtgtacgctatgataggattcgagtggacggcggtgaagttcttctggtacctcttctttatgtacggatcattcttaactttcaccttctacggaatgatggctgtagctatgacgcctaaccaccacatcgcctccgtcgtctcctccgctttctacggcatctggaatctcttctccggcttcctcatccctcgtcccgtaagtaccaaccttattattgtttaatttcaaaatgagccaaaacttattgaaatattaaatattgaccctaatcgattctacgaaaacagagtatgcctgtgtggtgggaatggtactactggctttgcccag

SEQ ID NO: 28356 - DNA, 1555 bp, Arabidopsis thaliana landsberg
ttgctcacggaaacaattgttatgattgatcaagacatgttgcaacaacaacgccacgacatgtttgaccaagacatgaaaactattcttatgattgatcaagacatgttacactactatgattgatcaagaaaacaattgtttcttatgcaactctatatcaccaagacaaatgtaatggccccgttctgtccaaattcacataaagcttcacactttgtttcagcaataggcacaagaacatctttcctataatcaagctcaactatcaaatgatctaagccgtcctattacgttgttgcttataatattggagttaaactgaacaacacatcactacgcagtttcaaattaaccgaaacacgagtcagttgaattcacagaaggaggatgtagtttggtacttgactttggcttacctcaacttggtagtagagtttaccatcatctgcaactctagaggaagtgcttagaatgttggcctggcgcttaaccccgagtctagtggacataaactcagtcaagtactgtctaagtactctctttcctacttcttcaggggatcccaagtcttcaagtgacgtgtaatttgaggaagaaggcgaagaaaactcgactgaaaggttctcgtcgaggacaacagggtctctaaagaatatatcagcaccagctcctcggacttggatccaattttgagggtacttgaaggagtatccatcaaatgtatctatgtattctctaaacactggagttgaagcaaatgctgttggaagattggcttgtgaaactattaaaccagacatgagcaagcccatcatcatgctcttcctcctcccaactgcacaaaccttaaagaaacggtatcaatataaagatgatcaaacaccacaatcataaataaaaaattacatcatagattcagcatgaattctaataaagatttagtatttgaaacaatccaagcaaaatctatgtggctttgttcattagcacaatgtacaaaattgaaaacttcaagtggtgaaatttacctgtttggcatcggttaagcagtttatggcgactggagattccggtttagcggacttggcagattggtatttaggaccggaagagatgggtctggagaacaaaagctgtcatttttttcgccggaaattagaaccgaagaggcaaacttatataggtctaattcatattcaatttcaataaattaacatagaaaaaggttcggatttgttagacttgtgtcaaaaatgaagtaaacccattattcaattctagattctatcaaatgggcaactacaaagtctcacaatttccaccgatgaagcagagaagagagaagtgagcttacatggaaatctgtaaccaaagatcgagaagaagacagagaagttgatttgaaagaatctgttgaggctcctttggttattatgtaagaaggaaacgcaaatgcagatgaagccattagagtggatttttgaagctcagaaaaattgaaactttggactgtaagagtaatccactgggacacatgagaattttggtgggt

SEQ ID NO: 28357 - DNA, 1528 bp, Arabidopsis thaliana landsberg
tgattggctctttagtctttaaattgtcccatcatgcatttcatcgtgttttttttacttttacgtttttttctccggctttttttctaagtttatatactaaagaaattaaaagaggacgacgttgtgtgtttcctttactaaaactcagtcaatgtaaatacgaaaagaaagctaatttgtttaccagaagaatatgtgtaattaatttgtagctaacttgcgaaaataatataaatatataacattgataccaaaagaaaaataccaaatccctgaggaactcttgaactcaattatagttgttctgcttggtcatacgtatcttgcatagtaattccaagtttgtaatcaattttatcatgacatttaatcattaaataatagtttatcaattatttgtacgtggtttgcaagttgtaactaataataataataagttgtaacttcttcgttgaacatctcgcatgaccatgtgtgtatccgctgtccttgatttctcttgactattaacttaatttttctcataatcgacgaggcacacaaattttgtgttaacttatattttatctcagctcgtatagtctttttggttgtctctgtttcgtgtaagtatgtgctaatgtatgcagttggttgtgtgagaaacttctcaatgtttattattcaggcagctgaatcttaacttgaactgtcaagcaagtgccagcgagaaccgagtatgggtgacaaagacatttaatttaattttatataactacgaattcatatataattattaaatttttcaaaattcgtagtttttgttgttttcttgtatatatgatacagagaatcttaagtcatgttcagacatttccatatattggtttcaatattattcagataaataatacagagaatattattctgtgtatactcacagttcaactagttctgtgtcactcaacaaatacaaccatcttttgtgcaattacgattttatgatctaatggtctcttaaaaaaaggaatgtaacaatgtaaaaactattatacgatatatcaaacatgttgaataatagaccaggttgcttcctaactcacacgacaacttctccagttttgtcggtgggaaactttttttaattctctctgtctattatcataagttaattattatttttttcttctgttaatgattatactaattacgacagatgtgctgtcgttttcctccagccaagacatacggcgtgccgttttatttcccgtcaataatattctcgttatccaaaacagtaggtgacctaacttcgcgtcaattggtttggtcgactttgaagaatgatcattaatttgttacattacataacggtgtgtgtgttttttcttttgcttctcttgacttaaaagttaacgttatgcaagttagttggaaaatttattgaacctaagaacgtgaaactcataacataccgcagataacaacataatactcttagaaaacagactaaaacacgactactagaattggttaggtctctgtc

SEQ ID NO: 28358 - DNA, 1747 bp, Arabidopsis thaliana landsberg
gtgtggagcttttatggtggtacgcacgagttacgtgttctcgagtatctgattcgttatggtcgtatgttggagagggtggatttgtatcagccaattggattggatgatattcaactgcttccgatacgtgctgcagctgatagggtgggagagttcgaggctcgttcggagaatttggtcgttactttttactaagaaacctttaagggatctaaggattgataaatttgggtgtgttacccatcttatgttgtttttcagttataaacttccgaataaattgtggtgcctggatttgtaatcacacatttgtatttcccttttaaaacttaataataaaaagtaacctttactttattttttttttaattgtaattttattttttttccattactttattatgctaatatgtattaaaacttttctatttaacactgtgaaatttttctgattataaacacaatatttacacaacttactatatcaataaaatttgctcaatcaacccccttttgtaacattaaagaaataaattacttcaaacataatatttttaaaattgcgtttagattatttcttacgattctaattccttttttaatgccaaataaaggctaatttaattaaatcagaaatagatgaaatatagaaaaagcaaaaacattgtattatatcaaattaaattttgctcaaaaagctctctatcactctgacaaaaaaatgagagagtaaacatctaatcgcacactttacttataagccaaaataacatagagagagagagaatttgttctttacgagaaaagattagtcccttctttacgcaaaaccccacgaaccggtaaaccaccggtctgattttggttactgttggaattactatccttagattcttgttcagactcgcgagtacaattgttaagatccagcaaggcagccattgatccatctccaagccgtactctgtgaaacttagaagttttcttacgttgctgtttgcttcctgttgaagaagaatccgttcctactacttgtgatttgcctttgtctgatctataggtattcttatcctttgatatcgcctcctcttcttcttcctgtggattctgagaagattgtaatctccttactgtgtccataaagttatctgctagtgtttctttagggtcaacaactttcacagcttttcctttgtttttctttgaactttgactctctttaggctgagaagagctctgcgcagcactccgaccattatcctttgaatcctcttctctcaaactggcattatgggtatcaatgagttccttctgcctcttagggtcaggacacagtctagcaagatcaataaccaagtgagacaatccataaccttgcacatactccaaataagtctttgcatcaatggaaccttgacgatactgtcctgatatattcctgaaggccacgaatacatcttcatcatgaccaagtgcagatcgcattttctcaatcaatgacttgttggcagattgtacatctggagggggttgagtgtttgacgatccctgtgtagtggttgatgatgttttacgattttgcacaacagcagaagaaactggaggaaaatctgaatgagaaggctgaagtgatcttgtatcagatagattaggggctgaggaagagtgaggaatcctattcgcattacgagcagcctgtggaactgcagaagccagaggtcgaggttgtgaaacttttgtatgg

SEQ ID NO: 28359 - DNA, 1202 bp, Arabidopsis thaliana landsberg
ttatatagtaccagaagaactgtgcctaccaaaggctttacatcattggagaagatggatacttcacatctgtaaaaatcaaatgctctgactcacctgaattctctgcttatgctccaagtttagtgcacatacaaaccaaccaactacgcaaaatgaaaagaaaaaggaagaataaaagaagaaagatgcagattacttcttagttccatttgcaatactttttttgttacgtatttttttgcatcgtctcctgttttcattcattgtctttcatttccttttgaacatttattaatttgttttttgctatttatcatctaactaagtatttagatttatcatgatattttaggctttttttcaattgttagtatcaaatttttcaatataaaacaaattatatctaccacaatgcagattcgtcttgatgttctttgtgattgtcttggcattctctatatgtttttgtggaagcatcggagttttagattagatatgattaacgtaggagttcatgtagaagtagagagatgtgttgtaatttataaaagaggcttcatgataagatagcttttgttgtttgtcttcacttccatggttcattgtcttcctttcccattgatgggcgggtgaatcacaaagatactcatgcatttttcaatcctaattttggcatatgtaagtttttttcaattttgtttgctttttaatccaggcattggatgaaaacagagagaattcagggctaaagaaagcctttgatttttttttttgtgtgtgtgtcaaaacagataataaccttttgtttttgggtcgtttaattgctatatgatgcatcaaatcttgtaaacaagagtgattccaagaaggtggaagtatttccgcatgattacggttgttgcttcacaaaataggagacggcttgtttcctctgccgaaccattgacatgtaaaggtaaatgttcatgttttgagtgattgattgattcaagccttaattagcatgtttatattctcttttccatatcatcaactaacattcataccagttgtttctaagagatttagtcgctggcatgaactaatatatatgcaatagtatagaggcacacaaataaaagatttgataaaataaagatcataagaaatatcagagacataaagaacatgcatcatataaaataaatgtaattgaaagg

SEQ ID NO: 28360 - DNA, 1270 bp, Arabidopsis thaliana landsberg
  unsure (1)..(1270): unsure at all n locations
caaattgtgtaccacctacataaagttcgaatatgcaattaggagcactaaacacaagaataaccagcaacagaactgagatttactctttcagatcatagaaacgggattaccaatttcaccagaaagtttcttggagtttcttcctggccctggagaagatatctgacgtgcttcagccataagtttccattttgaaaacctatcatctcctccaacggctgcacgaacagcaacatttgcagccttggctctctctttatcttcgcccttcttatttgcctgacttgtgatcaataaacctctttcagtgtacgcatgtgtatatctacaaaggttaaggtagttggctcaagttctaaataccttcacttgttttgaacgttggtcttctttttcggtatcgttttcgttgttctacatcaaagaatatattttaaaaaaacgagacattacttctgataaataagacaaatagatattaagctcaggacaaaccattaccttttcttctccagcatgtttcttttcccattcctctttcaccttctgattcatttcattaatttctttccggatatcagatgtgataaaagcccgatttctacacttctctgcaccagtccgctgcaaaagctcttgtaacttcagaaagatttagatacagcaagatctaaggaggcatgagaagagaaagtagactgacctgctttgatattcgtattatattaaacagtagtcctcgcatcctctcctccacacactgaatgcgcaaagccatgagaaaaacgaaaacaaaaagaggaaattgaaggctaataattccaagaaaaggtgttgacatctcaccagagacaagcaccgctctacatcatggtctatatgctttaaaccactttttgccactgtcatatatgaaagcatacataaacatcttctccaagtgattccaagtaaggatcaaagaagcagctaagagacgagttgaaacacaaactaatttctgtcagctttctctgcagtggaattttctgcaaaagcgttctttcttcctctccatgcacaagtcttcgagatgctttagaaacacgatcgttcttttaggaccagaatctaataattgggtttcctcttcctagaacagatgcagaaagtaatttggtttattggttctctatatccaggttcaaaatgagaaggtagcaactcgtaacataccctgagattgatgccactgactgcagngatatcattaaacttttcaatactt

SEQ ID NO: 28361 - DNA, 2485 bp, Arabidopsis thaliana landsberg
caagaatctcccgtaacctctccttcacatcttcgtaatcctcatccgatttatcatcttcttcttcctgaaaagcatcctcaggtaaagtttccacttctctgtcgataaaagattcgaccagatcccaaagatcttctgtgtcatccggagagtgatcgcttccgctgctgctagcgcacggagggcgtgcacgcgccgccgccacatcaaaagccgccgctgttctgataaatcgtcctcctatctctaccattttatgcccttttcttgatttctcatcttctcggtgacttgtgggatatatatacacgagtattaattatatttagtgatatgttttcattatgttgacagagactttgactttttgacggagtaaacgacaaaatgtaaaatatgacaacatgatggtgaaaaaggattaacggcgttttgtgtaacggagaaaccctaaatcccgttaaattaattacagctttgggatatgctggcggattaattttagattctcaattgttaccaccatattgtccagatacattcacttttaaaaggattatatcagaaaaataaaataattaggcatttagtgttagtcaattaattttcatttttagattcagatttttaataacacctttgtatattttatttacttcaaaaattctgattaacggacgccaacatttattaactaacgtccgtgacaaagtatccataaccagttccagttggagtaaaaactaaaaaagctaggtcacggtcacggttacatagtagcgcgtggacacacgtaccggcaacaagttaaattgtggttaccacgtggcaagttgtggtcggatctttcgtcttgttttttttttcacttcagtagatttgctgatacattctaaacatctgatgcggaaaccagaagtagtagagtaaaccaaacacgtccaagttcaatgaatctgaaatgctgtctagattcaatgtatctaaagttcttgcaattagtagttgaataatattaaaacttgtcaccgctaatggcttcatccggatagaaacttatctattacacgtgacggcactagtgtttggctctgtcttagtcatataaaaaatctcaaattctaacaaatttctaaaaaaatctcaaaatatttgttctactaaacaaaaatcaaaatcactacgttttcatgattctcgtgcatgtggttctatatataagctatatcggactggtctgatcttcttaactctcaaaacccagtagcttcctctaggtttgaacacttctcctttggatttagacagtgacgtgtttgaaacactctgatcactaatcacatatattgaatttagttctgaattttctgccacaaatccactaattccttaacgaatgaactaactaaatcatttgtagaactcttaaaccttatgttgatctgtttgactgacaattgtgggtgattcttgattatggatcgttaagttcttttacaactagagtgtctgaaattgatgaatacagtgatccatttgattgtattgtacctactatgacatgatcgcttatctatttcgaaggatgtgttccttcctgattcccagtttgctaataacataaacttcgattctatcttcatcttgatgatcaagcgcgttggctttataaattttttgaatgttatagctctgtttgattcagagacaataagagtttttgtggatattgtagtttgctttgttggatcatcccttcaaatgatcttctagagagtatttgagatactccttcaattccacatgctttaaaattagtttttttttcttttgtcgtcgtctgtgttcattaattaatattggacattgctagcaatttatgtgttagggatgcatcgccttggatcaatctcgagaataggcaaaatacttgaaccgaaaatgaaataaaaacaccaagttaatgaattttagtctttccaactaattaattttcgttggtaatttgtagttgttgattcagttaaatggtttcttgctatatcttaattattattgtgcgaccctggctaacactttctcaatcattcttttgttctcagcagattaatactgctgggcgttacggttggattgaccatcttctgccatttttataactttacgcttaagtagcttatttgtagatccacattcgtgaatcggagtgtagagatttttttgacgcatgctttcaaaacaaattgttatttcctcatattttaagatcggcatattaaaatgtagatttatctttttcatttttatgatagccaaaatgtatggtaagtttagaggatagtttaaaactgatataatatgattagctataaagtttgaaatgataagttgataagttcgattttttaaagtataggtcttcatattgccgtgctgctctctctttgcatagtgggtaattaaaactcataattcttgatgt

SEQ ID NO: 28362 - DNA, 1000 bp, Arabidopsis thaliana landsberg
taatgaagcaacctaattgctaactaactttttaacaatgacaagaatctatcaaactttttatctcattagtaataattgtaacctctgatgttttcaggtggtcttccattgcacgaaagcttccaggaagaacggataatgatgtgaagaatcactggaacacaaagctgaagaagaagctgatgaaaatggggatagacccggtgactcataaaccggtttctcaactccttgcagaattcagaaacattagcggccatggaaatgcatccttcaaaacagaaccatctaacaactctatactcacacaatccaactcagcttgggaaatgatgagaaacacaacaacaaaccatgagagttattacaccaactctccaatgatgtttacaaattcctctgagtaccaaactactccatttcatttctatagccatccaaatcatctgctcaatggaaccacatcttcatgctcttcctcatcatcttctactagtatcactcagccaaaccaagtacctcaaacaccggttactaacttctactggagcgatttccttctctcggacccggttcctcaagtagtgggatcctcagctactagcgacctcacttttacgcagaacgaaaatcatttcaacatcgaagccgaatacatctctcaaaacatcgattcaaaggcctcgggaacatgtcattccgcgagttccttcgttgacgaaatactagataaagaccaagagatgttgtcacagtttcctcaactcttgaatgatttcgattattagatcccttcttttccctattgttgttacttctcttgtaactggtttatgattttcaagaactatgttttttcaataagttatatctcttctcttattagtacttacttagtacttaagtagtaaccaagtctcttgaaatacaaagctcaaaattaaacaccttttgatacaaaaatagatcctctggctctggaagaaggttttaactc

SEQ ID NO: 28363 - DNA, 3790 bp, Arabidopsis thaliana landsberg
  unsure (1)..(3790): unsure at all n locations
aaaacttcaagatgacggtaagaaaaattagttttgttaaatctttctttttctttaatgtttgcttgcatgtgttactggtttagcttttattgttcatgaacctaacactcaatctgatccaacttcagactattgagatgagagttcacatggattgtgtgggatgcgaaagcagagttaaaaatgcgcttcaaaagatgagaggtgaaagatctttgatctctcaagcaaattgctttaaacattttgtgttaatcacaaacctagatatataacatatctgactatatcactaatctctgctaaattgatgacaacaggagtggatgcagttgaaatcgacatggtgcagcagaaagtgacggtgactggctatgccgatcagaagaaggttctgaagaaagtgagaaaaaccggcaggcgagctgagctatggcagcttccttataaccctgaccacatgggcggaagcagcagcaacggcggctacttctacaaccctcagggctgcaacggcccaatcaaccacgccgcaccagtcccgacttcgtcttacaattattacaagcatggctacgatagcaaatgactattcgtcttaccgccaccaccctgttcatgcctctatcnnnnnnnnnnnnnnnnnnnnnaagtttagtgatgagaatcctaacgcttgttctatcatgtgatttctcattcttaactatttccttttctatatgtatgaacttgagtttgtaatcattagttaacaagccatgtatttgctttcaaggctttgaaatgcatagttatctattcataaagcaatgggactaaaagtcaccaacccaatcaattataaaagttctcaagaacactaaaggaaagaagaagaaaaacacagagtttgaattaagaaaggtgagatttatggaaaagaagaaaaccttgatgataaattgttggcagagagtggtttggatgctgatgaagcgtctttgacaaatgtggagatgcttttgaggttcttcgtcgtctttttgtttctcatctttttcgttgggagcatcatcatcattgtgttgtcattctcatcaccgaaattagtgttgagagatttcttcatagtagctttctttctcttgttcgatttctgtttcggtttggagatttctgatggagtagtttcctgggaattgatgatctggagtgaggtaaagcagcattcctgccatttcagagcttcgatgtcgcttatcacttcgtcgagagttagggatgacgatgacggcgaggagtcagtgacttgtttcagagttgagcgagagagatctagaagatccagtgagtccacggcttcttctacaattttctgtaaacaggcccaatcgatttcaaattatatgagaaccaaattcccagaaactcttgatgaaatcggatttttcaagtttcaaaccaaaaatttaatccaaaagctctataccgcaaatttgaacaaggaattttgaagagatgatgatgatgataggtggttgttaccttctgtaatttgtgaagctttcggaaaccatgcaaatgaaggatctgccagagagaaattatacgagtcgaagattagagagagtgaggaggagaatcgtcgggagaaaggagaatcgatggatagagaaaaacctgattgaggtaagcgatggtgaaatggatggaattcccagagttgcagaactcaacgtattcttccactgttatcttcttctctcctccattcttcattcttcctctatctctctctctctctcggagatgtttgtttgtcagcagtgtaacgaacgagaaggcggtgctgtgatactgatatttatcaaaaaagttcaaaatcagcagctagctataactaaagaaaagtttgttagacgtatgaaaaagacgaaaataccccgatttgtagttcacattttcggattccaatgattatgaaagcaagctatgtcacctagtgtggctaataatatatcagtctcaaatcttgtgttgtgaactatcaaaagttgagattcatcacaaagtttagatcttacatagctatttttattcaaaaagaaatcttggaatcatgattagtggaagagattattactagcaagtaactaaagtgaagaccaagcgttggcttcgacccagttgaatgcaattggactcaagaaggcgtctggaatcccgaatgaagccacgagtgcaagtgcgtgaggtctaagctctccacagagctttgaaacttctttcctcacatctccaacattatcccttgagaggtgaccatatcgcagcagcgatggatcttcttccaagctgatcaatgcgtacattgatcttacaagacccaacacatcctgtcatcaaatacattgatgtcgttactagttagtttagattatttcctctgctagtgcgtagtctcctttgctagtgactaaagctgatgaactattattgtgctcagagaagcaaaacatcccacttgtctcacagctttttacaatctatcgagcaaaaaactatagtttaaaatcaattactctgcacgttaatggctaatcatatgacatggaagcctgaagtaccatccgtgatccctagagctagcaaaacaaccatgattcaactgaataggttcaaaacgtcacaggtaataatccttttgacctacctttactgagccagtaggtagttttgcctcagcatccaaaatggtttgaagtattgctttctctgtgaaagctttacctaagtcttcagcaagttgatgactctgcaagtacggatggaaaggagaagaaaactattactgaatcctaaaggtcggagaacagaaaaggaagcaaattttaggtgaaaaaaatgctttaccaggaggaaagagaattctcgactttctcctctcccttgaagctgtgcaacttcagaagtaaattgctccagaagatctcgctctcttaagcagaacacatttgtctgttagggacaaaatacaagaacatgtttaagagttgaaaattcatctaaataaatgataagtaggaaaatagttaatgaggaggcatatgacctggaattggctgcatctgagggttgatgatgtgagttgagtcggtaatacaggacgtggactgttcatgtgctccaatcccagtcccttgaaaggtttgtttctcttcttacacgatacatattcagcgaaaagcgccttgctcacctaaattccccaacggtaaagtaaaattgtatggtcaaaacagggaaatttacagtattgatcatgcaaatcacaataatgtgccgcttacctgctgcatcaatacattattgtcaccctcaaatgtagtctgcacatcaaattcacctttcaactgaccaactagattttctgttttcacaccatgccctccgacagcttctcgacattccttataaataataggaaaaaaaaactccagtatgactcataggagctttctcacataacaataagtataatgtattggctctcacctgaagtgtgtgcatattgtgccaggtgagaacagctttgaacccacttgaaacaacgtggatggctttgttggtctccggcagttctcttcacgtaaatcatcttcaatttatttgcagcaaaactcatagcatatctgtgataatgagaaataatcaatgaaaaccacttatctataagaagctgggacaaattactacgtatcatgccatgcttacaccttttttcgggctatcactttaaaatttt

SEQ ID NO: 28364 - DNA, 1419 bp, Arabidopsis thaliana landsberg
acctccatcaccgccagctcctctaccagaatttgcaactaacaaatccaaatttgatacatctgcgtttctttcagaccccttactagtatctggcttagaaggtactggtgccccaagtgagtcaccaccatcaattataccgtctctagcttcagatgaaactatgccttgaaactcctcactcacaatcaatgcagacaacacgttcataaatgactcttgatcaatatcatctgacgaaagctttcccttccgcacaaatgagccaagttcttctgaatcagacatttcatcgtcagaagtatcaatggctttgacattggtcttgtcatcttcttcctcctccacatatgatttgtatgtaagccgtagcagtatctcacccgcagatccctttccaaacaaactccaaccaccacgcaaaaccacaatcctgtctgtaggaaccgtatcttgcagaaatctgagatcaacctggacatataactaaataataaggctatgcagacagtaacataaatattaagcaacattcctcaagcaatcattacagagatccacagaatacgtactcaacgcctattattctacagattacaaaaaaaaatatgtacccaaggaaatattatttacctctccagtaccaatagccatatcagcaaacccaagacgatcattgacctcaatttgtaatacttgctctctaggatttgaaacaaggaattgaaagtcctgcaaagttaaagaatacacacttatctatttacatttcaatccttaactaatcataattcaccaccagattgtgaatgaaccatccaaagcagttcacctgattccaaattggctgaccaggagccccaatgacagtagttggactgtttcttttactacggataacttgatcccctaatctgagaattgcatatggatccgttttacctgttaccaattaccgaggaaaacaaaacatctcaccaatagactcaattagtatagctactttattcccaagaaagtcgactgaacttgcacaaagaggctgatacttcagcaatagattgtctgtctattccacttttccaactatgaaggaaacactgacatgtaaaggaactatagcttaccaaaaaacatgtatcgaagtttctgggcgtcaacaagagtaacagatagttccccgacaaaatccttattgccttcctgcatttctcctgatttcaggtcttctaaaacaggtccaacagcttttcctttctgaaagtccaagacaattttcttcggtcggacaaataatcgaggcaaatccacagtcagcagtttggtcaagaacctgtaagagacgatgctgggtaaaataatacgagggaagaaggaacccactattgcacaacgtggaggagcttaaagactccc

SEQ ID NO: 28365 - DNA, 1526 bp, Arabidopsis thaliana landsberg
tgatgattttatcattgaagatgtatgaatcgaactccatgcatcattattctgacaattctactaacaattaaaatatgggagagatgactcgcgcggtgttgtagtatatggatcatgttcacagtgattcgtgcatatatatttgaaacatatgaaattacgaggaacaaaacaactctacttcattacaccattctgaaaatatttggcaagtttatctctattaatcctatattaagaatagaactccaaacctagtacactaaattaattaataaacttattttggtataaccacgggatggatgatggaagaaggggactttcaattttgactactttatgattttctgatgtttgatctactacttaactttgttacaaaaagaataccattgcaacaaaaaatttctttaatcacaaaaataaacattgttttttttccttttatcttggtttcccttacaaagcatcatatggatagcacttcaaggccttatagcccatgtgatgtgacgcatatgaagtaagagatgtgaacttgaaactgattataacacaagtagcctgagatagagtgagatttgttttgttttgcggttcttcatgttgattgatatcaaagtcagagtcagattagcctaccaaatcgaagtgtcagtgattccacctcaataatacaatttcgtaatgtgcatcaacaactatctagcctcctccatcaaccaatcacaacttcatgtagtaggctagtagcattgataatgatatccctttttagacttgtttccattcgtcatataccacttgatgacttgtttaaatccctttcttctcttgagtccgtgtaccaatatttttgcaaagaaagtagaatcatggattactcataactaacagaaacgttgagaaattggaaaatatgttcatagtgctaaggaggaaaactacttcttcttctcttctcaacaattgcaaataccacaagaaactaaaactgtgactcagtcttggcctcccaagtcacaatttcatgtttacaaattttctcctgcaaatatcatttcattttgcaaattaataagtttagtacggtgattatattcccttggatttatcaaataaaacccaacatatgagtccattatgcatcctcacatgaagtattttgcatttccttttatacacagcacaaaatatacagcaaacttcaactaaaacacaatctaataaataaaaaatagaacacttagttcccaccacagattttattacaaaaaaaaacaaaattatcattatccgtattttatatcgtgcatcacaatttgtgattattcattgtattaacgagcccacacataaaagatcttaattatccatctacaccttaaaatctacggaccgtcttacattaatacagctagttcaccttgtgaaatctcggtaataccctcagctgcaaaagataaaaatttcatagaacggtacgtgttcattacccaacccagcttaaatgttgttat

SEQ ID NO: 28366 - DNA, 1966 bp, Arabidopsis thaliana landsberg
  unsure (1)..(1966): unsure at all n locations
caatagtgaccaaagctctttcagatgtttttgcaagatttaataaaagcgggataaaaatagtcaaataatgtaacaggcttatacaatcttggtttccatttgttatatgtcttaatttatgcccaattagctatacagctattaccaacctgcaaaggtgttccagtgagaagtaatctcctctggcagcgataccggtcaagatctcgggccaaaacagattctctgtccttcatccgttgtgcttcatcaattataatatatttccagtcaacttttgagagttttgatcgatcatacataatgaactcataagtcgtaacgaggacattgaacttcatggcgcaaacctcctgttaaagagaacaggggatgtatcaattaacgtcttcaaaacatctggagcaaaagaaactttttcaaattttacctgagagaacaattttgaacgttgatcctttgtaccaacataatatatgcatgaaacagatggcagccaagtatggagttcactctgcagaagaaaacccattggactttaatcaggtaccagagagaagtcaacgaaagatagcaaaaaaacttatacgtattctaaagaacacagaagagttcatcaacaggatatggccatgtcagcgcaactaacagctagttagctagagtcaaagttaagcttagataatggatataagaggcttgtgggttctcgcggaactgagtgagataattatgagttgggagacttggggtctcaaatactcccttggttctaagcattgattctgtggaaaatcataagagagtctatcagaaacacaaaccttccaattcaccagaacagcattgggaacgatgatgagatgcggtccataattccctttaaactccataaggtaagcaatcagtgccattacctgtacaaaacaattagtatattatgataggacaatataataatttattggtcaccaaaggcgaatgaaaagtaaattcaggaattcctgcaaatngggaacagatttaacctgaacagtttttccaagacccatctcatnagccaagatcccgtttaatttgttattatacaacgatagcatccattgtaatccaacctgattggcacagagcaaaaaaccttagaaaccatcaaaacgtggcatgacagtgagaaaaaagcaacaacatagagtatagatggaggagataccagctggtaatcacgcaaagttccagcctgaagcattgaaggttgtcttacaaccacttcatttacagcatgagccagagtatagtacctagagttggacataacagagttagacatcacccacggcgcctattcctaatcttgtgatctgtagaattctctcacatatggatgtgcaggattatcagcattttacagataagcacatactttttaagtattcagctgcattggtaattatgagttacaactagtactttgctaattccctattttaatcattttttgtgtgactaatgcccttacttgttgacagatgaattttcttttggcgcattcatttccgtaaatctatttctgatcacaacttcttctcgagcacaagtagctgctgccctgacctcttcttctgacaacccctgcgtcaaaaacggaaacaggtaaggtactatatatccactatacctttgaaaagaaaaagttctattttctgaaacacgcaaaagtcaacatttaagttaaagtttgaagaattatctacagagtgtaatggatattcgctgtggagtagagaaagcagtatgtatacctgcaatctcgctgctactgctgcagcatttgctgcctcctccacttcctgttgagtttttgtggcagtaatcttacctgcaagtttatgaagataatcttcggtttgggtcaaaaatgaagagagaacagcatatgtttcagcagcatcaccaggcatattag

SEQ ID NO: 28367 - DNA, 2145 bp, Arabidopsis thaliana landsberg
gcttaattgctaaagactatattagaagtctttcattggacatctgagattgagttgtcaacgacaaataactcaaaatcttcaatcacatgcatctcctccggtatgtgaaagcgatctgaaaatcacattcatgagctttcccaaaacaaaacctcgcggaccaacttatgcaaacgctgcaagctccctctatcaagttcaatctcgaagtctgctagtacagaggaagataaaacattctaatattaattttgtttacatattatatgtatttttaaaaataagtgttgttttaaaattttttgatgtagtttatatgtatcgttattttttatgtaaataataataaaattttgaaacttctgtaaaacaacatcacaataatgttttttaaatcacaataatgttttaaagataattgtgttgtgaattacatcaatttatatattgcttctaatatgataatgttcaagaatattttgggatttgtcatatggttgttttgaatgtagtctttgggaggatgaatgagaggagttctcccaaaattaattatgaaacaagtgaactttcttagaattttcctccaatatgttcttctcacaaaattagacgcgttgaactttatcattgacttgttgacttaacaaatatcgtagagtttcttattcccttgacttcaactttatctttttaattaatttcaatttcccataacgtcaaacgtgtatagatgtagctttcatttctttgacaaaatcagacaagtttacagatttttaatgttttttccaccaatttataatcaacgacggcacacataactcagtggctatgatatgatgctctgatcccactaaggcttgagaattagcagacaaatataagatatagcgtgcgtaataagcaaattcctatttctttggatcatgaaaaagtaaagaaaaaaaaaggcatcattattacacttggaaccccacctttgggaaattgaatcagcatcgtcaattttgtacttgctctatcgtggtacactgaaccagaaccacacaagtggcacaaaccaggtttgacaatcgcgttaagctgccgacttccgttattgctgaccgatcttaacgtcacttctacggctacgatttatggctctctaggaagacaaatgtatggctcgggttaagtgtttaagtcataactcataagatcaactgcaaatgatatttgtgttgtgattcctttggacactagaggtctttgatctacatagcgaaatcctcgacccattctaacaagtccctgaaccatacgaccacacttttggttaggtcttaataaccttgtttgatgaaataaatctccattagagaagccacataaataaacaagtaagaagaaaatatgtagatgaaatgtattattttaagaagtcaagaaagtagaaacaagtttaacaaaagaatcaataaaacaatgattacacaacagaccaggaaagattataaaaatctaatctatatccatccaaaagtcatacgagatgattagcttactaaaatcacgatttcttccaatcggattttctttgttcttttttcttggcctgtaaagtagtttccaagtgcacaagtgaaaaattctacacttaaaacgaaaaaaagaaagagagaaaatgattggtttttcactgcttgccttctccccatgccattcccccataagtccacgatgatgattacagatcatgtgtgagtgacaatcatgatgatgtatatagcaatccccatcaatcaaaccatacggaaccaagaaaaacagagtctagagcaaggaaatgcgccttttctgcttcttcttcttttttgctgagtattgagttaagcatagtacatgtacaagctatttgcagcggcgcaagcaattgagttctcgtttggatgccaagcaagatgcagcagctttgttgtgtaatcaagagcattagtattcccatcgactcccggactctctgatcctgttttacaaatttcagtatttattctattcatgccaattttttaataatgcttaaacgagcgagatgatagagagagagataccgacctctacttacgacacgcgttatactgcttagtgctctggatg

SEQ ID NO: 28368 - DNA, 2772 bp, Arabidopsis thaliana landsberg
taaaactaaagatgcaatgatttttattaaaaaaatatctttgaagatgcaataattaaaggcgtaaggtaattttattcatgtaaccatgtcccaaaaatcatggggacactttgacctaatgattggtctaaagatacaaatgtttctttactttatatttgaggttcaaattccaagctatgaaaaagttgttgcaaatggtcgtcttcgttggttcccacactagaccaaaatcatatcaaattacatatgttgcccgttaatacttctatcgtgaatttatgtaattgttccaaatgttgcgaattgatggaaaaaataaatttgttacaacggttacaatctaaaaattacgcttttgtaatttgtaaggaaaaaaacttggacatcaaacaaattcatctcctcatacttttcttgcaagacattagcgtcgttaaacattaccttcatcagacacaaactcaaatctctcaaaatcaatcttactgtctacaacttccatagatttcgccatctttatcaaaccttcaccatgtcttaacctcttctcctcaattccccctacttctctagccgtctccaaacacttctctaactcgaccacaaacaaattcatctcctcatacttttcttgcaaggcaagttttgcatccatgaacttaaccctaaccctttcctccctccacatctcagccatctgcaacatctgcctctcctcctccgtttcgtcccacaccctccttgtattcaccttcaattcatcgatcctcgtcaccagttcctcgcacaccttctccattgtatctctttctcttctcaaccgatttactgatgactccatatccaaaatcttcttctttaacctagaattctcagctttaactcttttcttttcttccctctctttgcttaacttttccttcaagtaatcaacaaatggattagtggtttcttctttctcatttctttggtttctgatgagacatcttatagtttcctctgatttaaacttttcagcctcaagctctttgattctcgtttgagccttccatagctccgtttgaagacaaggaacgaggttaaagtctaaaaactcgtcttcttgaaagttctcactaggttcaacggagtaatacgttcgaagtgatcccaagtcccactccgttatgctctccatctgcaatttatcgtgttagataatcgagttaaccaagagaaatctcagaaaccaaacaaaatgatcaagccaaggaaccttgaccttggaaaggaggccttgaagcctagacgcaagcttcctggccgatactttggatctttctgattttgattgtcgagagagattatgacggaacaaaggtggccgttgttgtctctggtgggaggagatgtgttcttttgggcgatgaagagagagttgatccgtaacgttggcaatgcgagagaagaaaacgttcataagggacacgataataatcaagatttaaccattttttgggggcatataaatcgaatacataacatacatctgcatttacattgaatcataatgtagagtattaagaaagaaatttcgaaaccagctaagacaatgatttggtaccagatttagtctctttaccgcatctgtatagtttaaagcacattatgaaccttttctcttgtaataatcagataattttgggtatactgaacaaaaataaaagtatttgatagatatcttcctatataattatatgtaattttagtaactgttttgcaccggttgttgtccaaaatatagggcacaatcaaatattttcttcctaaaatagaattttaccaatttaacatattgcctactagaagtttgagcctaaaccaaagaagttccgtataaatgagcacatttgcagaaccaacaaacttaggaagcttaaaaataaatgtcaattaaagagtaacaacagtttataaaaacagaagaattattcaacaacaaaactaaaaccagagagggacaaaagcaaagcagaaaccagagagaaaaatccaaagctgcaataaccttaaacttgtctttaagaaagctggcgcctcttgtaacgcaccatcacattgcctttaactccaaccaccatagcgttccagtcaatctcagggaacggtgaaactagctcaagctcgaagttcctcaacaaatgactccatatgtctgtgatcggcaggtaagcagacggctctccaaggcacccgtgccttccccctccgaatgcaatgtacgagaatgcccctgcggctttgtcctcttctcttccaggggagaatctttctgggtcgtaggtgtcggggtctttgaatgatgtgcggtaagcggttggcaaatgcaggggaggttgcaacgatgtgaccctttgggatatcgtaagtttttccatcccgagctgtcacgctgaaatcactgtgcgaggctctcattaacatgatgagtggagggtgaagcctcaacgcttccttaatgcagcggtagagaacatccatctcggataagatatcatgatcgatcttgtctccatgtttcgcaatcaggttcttctgctcatcaagagcagctgagaagtactctttgtatcgcatcagataagcaccggtccaggtggaagtgatagagctcgtgtgttgtcctgcaaacagagcagcaatgagcaaaccagtgacttcagattcggttgtctgtctaccatctttgtactttgattcgacgaaacactgcagcatgtcgttctc

SEQ ID NO: 28369 - DNA, 1718 bp, Arabidopsis thaliana landsberg
  unsure (1)..(1718): unsure at all n locations
actgcttggtagagtatatgaatagggatcgaaggcagatatgataagccaattacctgatcctttgatctgtcacatactttctcatcttcccataaaggaccttgttacgacacgcgtgttatccaccagatggaggagtctctggctttggcttccttgtttggaactgaattccttatacttcccagatttcaatgcctttgtgagttttggtgacaagtttttcgattccaatagggtttcatgcataaacaagttcaagttatatatttatggttatgacgttggtgtagatgacccctcttatctcacgtcatggattgatgctgcagttaagtgtaagatccaacatctacatgttcagtgtcttccagctaaatatatttatgagatgcccctaagcctttacatatgtgagacactagtctacttaaaactctgtagggtgatgttggatgatgccgagtttgtttccttaccttgtctgaagactatccatttagaatatgtttggtttcccaatgaggcaaatcttgagagatttgtatcttgctgtcctgtcttggaagagttaaagatttatggatgtgggaatgagaatgcaataaccttacggttgctctctagatcactgaagaagctgagtataaacattcttaaatctatgtgtgattttcattcagaagttgtgattgatcgctcctctactaagttatttgaaaatcaatgataacgtatcagaacgctatatagtaaacaatttggagtccaatgccaaattagatatttctctcccctttggtttgctagattttgatgaagcaagtgtttcatcgaggacagatagcatccacagttttctccgcggtattttgaaagtcagcgatatgacaatttgggtggacactttcaaggtatgtatatttcaattctagctagtatttgacattgctatcatgaaagtttctgtttctgacccacatcatatatgtatttttggttccacagctcatatgtaaatactcagaactagaatcgctgcctcggtttggttacatgtcacgcctgcatgttactctttgtatatatgatttgaaatggttaccaacatttcttgagagctgtccaaacttgaaatctctcatcttggtaatgatctactaaactcaataagattttccatctgtatatgaagttcttcattgtgttttaatcttcaggtatgtgttggtgataatgatgaaatgctttcggaggagatgattcaattcggttcttcattggtacctgagtgtttgctatcgtctctcgagtttgttgatattcgaataccgttccggggacatcttgaagtaatgaagctagtaaggtactttctagagaattcggctatcctcaagaaactctctctagatcatgacatcttcaagaaactcttcacaataccaagacgctctaccaagtgtcaagtcgtcttcatttgattggtaaaagagaaaacgtgtgaaggttgtcttatatgtcaattctagtactacaattcagtatttgtctaattaattagaaaataaataattcaatttttcccttgagataaaaactatngttttatcctagagagatgtatcagttttggtataccattgcattttttttgtgtgctaaatatgtgacataaataagttnggctaaaccctatcgtattttctaaaccc

SEQ ID NO: 28370 - DNA, 1573 bp, Arabidopsis thaliana landsberg
acagcatgcctagaagtagggaaatgaatagcagcattttttcatttgcgtagtagcataccggtccagcagatttacggtccagaataatggaaaagtacatctcattgacgagtgacaatttctcacacaagtaaacctgctcaaaatgaagacacaatgaataaacaaaggtgcaagagcagtgacaataatagaagaaaaaacaccaatcatgaataacagataacaaaccttgctaactactttgccttgaggaccagtttgcttggtgacaagtacttgtcctagcatctttcctacaagtaataaagatttgaaatagatcaataacttgtacaacaacaacaaaaaacagactccagaaagtcacaaacaagaaatcctgtacaataccagcaatcttttcagcctcatcacgtttaacaatgtgaacaccacccttaagaccactcttgaatgttccaagacctcttccaccagccaaaatctggctcttaacaaccaactgtatcacacgaaaatgacactctttcaattagacaacaactaataatagagattagaatcgaatccctcactgaatttacctcgctttcattagggaaaacatcttgaatagcctttttaacttcttccaacgaagaagcagctactcctttcggcacattaactccatatttccccatcaattcagctccctgattgtatcagaaacacaatacaaatttacattatccgaaacccagagaattctatcaaccacaaatcaatcagtggatcaacacagaaacaacagacaacgacacagatcgtactcgaattctgacttgaaaagcgaatctaggcaactatcaaatggaaatgaagagaagaagaacctgatactcgtggatgttgagacgacgaagctgttggttctgccatttcccggagacggagagagatctggacacgagcttgttcaccaatcccctcatcgttggatttgttagtagtcgaaaagtagcccaagagaaaatgagaaaatgtagaaagagcagagaatagtcgcagctatgaatgatcgagtctaaccctaattttttcctactttatgaattttcaatttaaccctctctattctgctatgtcgccggctcatttaattccaaaatatttttggtaactcttgtagaaaaaatctaagattttattttcaaaaagtctatatatgaaaataccaaagtaccattttaattcactaacaatataacaataaaaaactaagcaatacaatttttcaataaaaatgctaacccactagagattgacatcagatatatcgccggataattttttcctttataaatctataattttattgtatataacatcgactgattgtgtattatttgtagtattattttacttgtgtatgactaaatatttatatgaataaattttatccgacttatcgacaagacaaatttttagttactgtattttagataataattttcagtttatttggttttttcatttccagttatttaattctgagtctaattaaaataaaaaaaatgatcattta

SEQ ID NO: 28371 - DNA, 1417 bp, Arabidopsis thaliana landsberg
tttcgaccaaacaaaaggaaagaaacatgttgcatatgtacggacaagacatcccgatccacgactcggacgccgaagcagccaataaaaggcaaaaaaactttttgctaaggtacgagtaatatgcctcttacacgttatggtgttatagtgtttgtttttacctttaatgatgtgttttagtgtttcacctgtttccacaactaaagtttaaaaagttcaatttacgaaacacatttacaagaaaataattattctggtccaagggaaagaaatatgaaaatcaaccttttgattagtcaatacacgtgcgcataatcaaagtcaaagatattctccaacattgccttgcctgtatgtgagcccaccacgacctatagatttcctcttattcatttgagacgtaaatgtttggtaagaaatccagaaaatacgatgttaagatttcttacattataaaataaaataaagatttattaaattatgttttaagatgtgtgcagaaataagaaaagaatttatcaccatcatttcaattaatgtacatatgtagggttagacatatgggtaatccattcgggttagaataaaaccagtttagattcagctttaatgggtattgaatttattatttaatagagtatttctaattatttggtctcaattcaggtctggtctagtcgggttcggatcggtttggatacaaaattttaggccctaaaaataccaaaaaaatagaaacgggtattttgtatgcaaatagcggatacccaaacaaaaaaaactttaaaaatttgtaaattttaaataatttaattatatttgaatatattttctatacttttgacaaacaataacaaataatttttaaatatttttagttgttttggatatttaggtctaaaactaatttacatatttagatttataagtataatcttagacaattagattatagtaagattaataataataaatattttggacctaaatttatgttcgggttttcgggtatcctatttgggtaacgggttattacggaccgactcaatacccacgggtgcactgaaactgtatccaatgaaataatttaaattgtacctaagacacgtaatccgtcccaacaccgatttttacggaacggttatcacattggatatcggatcaagtgtttctgcccaaccctatatgtgagtctagagcaacaaccctgaaccaaaactataatcgtaaattggttcggatgcactctcctccaaatagggggttccaaaagagaagttaggtttccatttatgcacggattatagacttaaaaactaaatttcccaattgagtgtgctatccaaccctacatatatgaattatagggatctattaagggatcgatcatttggccaccgaatctaagagcgaa

SEQ ID NO: 28372 - DNA, 1924 bp, Arabidopsis thaliana landsberg
aaccaacaactgcaataaaagataggaatcatttgttcatgattatttcaaaggcatcattcatccaccagcttcaattattctacaccctaacttcaactctcaatcctaattcacttttcattattatcttatcatttctgtgttcaaaacgtcacttcgagttggaatgtattttttggtagcactgttgaattaaagttacagaataataataaataggaataatatccacaaactacataaatttgtaaacaaagagttatttacgtataatgaaaaatactaattatgtttcatgtttaaattttcatatcgacttcaaaatattttaattaatacatttataagttcctttttgtatttcatacaatgaaataaaaagagacaaaagtaaaatttagtgaaaaataaataaaacacattgtgaaatagagtttactataaaggatagattgttatagaatcgcacaactcaaaatgtcaaagaagacattaaattccacggactcaattcggttaaattatcatttgcaataatcaattaaaagtaatttgccgcctgctattatgacactctctgacgactacacattttccttggtattgtcagaattaaaaattattcatatctctggacgacacatccagaataccatttaaaatctagcgttttcgaagccgtgcaagtcgctcttcttcatcatagctaacttagccagtttctcagccgctctccacgctgatgctggagtcaacggctcaccgttttcatccatcaacgtcatcgtcgtcgtggtctctctctcgcttcctctccgccgttgattatgttgctgctggtgctgactttgatactccattagttgttgtcctctccattgaacttccaccagctctgcctccacgacctttatgtactcagccgcttccaccgttcccgactggccaagcaacgcacgcgctgatgttagcaagtggtatgcgcttgtgcattctccgtattccactagcctccgcgactcggcaacagcccgagtcgctataaagaggcttctaagccgttcgattctaggagaagaagatgatcgaacggcttgaggaacgcggagagattggtctcgtccatatacaacttcttgtgtcgatgggtccttaaagagacctctaactgacaaaatctggtaggccctagtggcggttgacgggaccctaagctcaactagaagctctctttcctctcctgcgtagaggtccccaagccggactgacccggaaccggaactaaccaaagtaggccgtccattacatagataaatggctgagatttcacatggtccagatcctgatccaacccggatttggatcctgagatcttgaaccactacgctaagcaatcctcctatgcattttgcaaaagcttcctctgcaggggcgttactacgtccaccgctttctccgaagccatgctcagtaacagggatctcaatgtgagcaaaacgtgttgatcccacgttagttattgttgaccgttgatttgtgtggactttactcaactggccctgaccgtccgttaggagtacgatgctagccaccgggtttctctccctacgatcttcaagcactcttgatgctttttttaatgcctcacttgtgttagaaccttgaccacaaagcaacccatctaccacggctccagcagagcgtttgccgtgttcggtcattctcttcagcggaaggagtctcttgggaaccgtcatgacgacggcaacgatagatagccgatcagctgtttttatcgaggagatcacaagcctcatggctcgtttgaccatttgtagttacgcaccgttcattgttccacctacgataactacaaccaccaagtccaccggtgcacgctgagacggatctaaaagcctac

SEQ ID NO: 28373 - DNA, 2032 bp, Arabidopsis thaliana landsberg
tttcgcaactttaagttttctagctattgtacgcaggctattgttattatggtttttctacaatgcactggttgctacagagaagggttagtttgtctactagtttgtgtaaatgcagagaaaggtttgattttttttatcagcagagatgtggtttagttaatgtaaagttgaaatgggttaaagatagagaacttgatgctgttgtggttcgtgaaaagcatcttagagcagtttgtaatctcgtttctgttatttcggcttctcctgatttgagactacctatctttaagcttttgcctcaccgtggtcagcttggtttgcctcaagagcttaagctttcagcttttattcggaggtatcccaacatttttgttgagcattgttattgggatagtgcaggtactagtgttccttgctttggtttaactcgtgagacgattgatctttattatgaagaagttgatgtttcacgggtgaatgaaagggatgttcttgtgaggttgtgtaaacttcttatgcttacttgtgaaagaacactttcgctacattctattgatcatcttagatgggacttgggtttgccgtatgattatcgagattcgttgattactaagcatccggatttgttcagtttggtgaagttgtctagtgatcttgacggtttaaaattaatacattgggatgaacacctcgctgtttcgcaaatgcaactgagagaggacgttggaaatgatgaacgtatggctttcccggttaaatttacgagagggtttggattgaagaggaagagtattgagtggctccaagaatggcaaagacttccttatacatcaccttatgtcgatgcatctcatttggatccaagaactgatttatcagagaagagaaatgttggagtgtttcacgaacttcttcatctaacaattggaaaaaagacagagaggaaaaacgttagcaatcttcgtaaaccgtttgcacttccgcagaagttcaccaaagtatttgagcgtcaccctggtattttctacatttctatgaaatgtgatacacagacagtgatccttagagaagcatatgataggcggcatctcatcgaaaagcaccctcttgttgaagtcagggaaaagttcgcaaacatgatgaatgaagggtttctggatagaagtcggggactgtatcaaaaatctgttgaggctgatttggagaagaacaatatcaagacaagttatccggtttggtcagacgaagaagaagagttggacaataatttgatatctggatacgactctgattgtcctgtggttgaagaacataaacgggtgttttagttgtgagttgagtacaagttttgttacaatggaaccaaatcaagacgttgcagacgacgttgagagtgaaagattacattctgcatctaactgtagcagcctgagcttccggcatcatatggggttgtacgccttagttcattcaactgagtctgaacatcattttccccacaatgctccaaattgggatgttagaaacaaaaatttcattggatggatccctacagaagatagacattctcaagcaagcttttagcattttcgcaagcgaacaaaagctggtttattgttgccggttctccaaacgccccatgaggacatagcattgcagaaagaatgggaaagttacttagggctcttctgttcaaagcgtgcatacacggatacacctttagtcaatctgagttatgacatcgtgtttccgggaatatggttattggaggctacattggatcgttgatagtgaggttgttctatattgacattcgactcggtcccttaacatacaacaaatccaaaaccttattgttttcgtatccggaaatacttttaccactctagaagaattatgaaaagaagtggtgaagtttggttttagtgttcttttttttttttttttttttttgaagatgctacatcttttagctacatagtcgggtcctagtgttactatccttagtatataacaaatagtcaaactc

SEQ ID NO: 28374 - DNA, 1376 bp, Arabidopsis thaliana landsberg
atctttactaccgaaaccgcttttctatcatttcaccattcaacatagattttgaattgtttgatccacactttttttacttgatccgcgtaatacgcttgatccacaattgatctacatgaaccgcttgatctgcctgatccgcaccgcttgatccgcttgcactatacgaaaccataaagttctaatacatctaacataatattatttattttatttacaagtattatggattagagatagaatactcaaaaaccaatggaaaacgtaaagcacaaaaccataaagattacgagaccttaaaacaaaagacaaagatggtttcatgtatggaggtattaacgacggaatacttcgattcgtgtatcacaagacttaggctgtgagaccaagtccagcaagggtttttaatggatttctatagaggatttctaagatgaaatgggcccaaatgaaagaaaaacacaacaatccgtttaggatcgttcccaaaaatggggtttttgagacccaataaaaatcctgacgtggcaaattttgattgggtaaacaagttgacaaaaaaaaaaaaaatagaaaacgcgtttaatttttcttcttcttctctctcttttcttcgagtttgccgacggagagaccaaagtcaattcacttcgtcgacgttaatctattgattggttcatgaaatcagcaacaaaaatatcaccttaacgactgtttcaaccaccgggatgattatcgaagatccaaatcggagacaaatcaaaatcgattctttgaaccaaatcgaaatcgaggatccaaatcggagatgaacttggtgacaatcggagacgaaacggtaagattcctctctgtttccttttgcatgttagtattagggttagattctgtcgaaattaggttgagttaatttgggatttgatggttattaaaattagggttattgtttgtaaacaattttagggttcttgtaaacgcaattagggttatgatttttgatctttgatatgatatgatctttgatatgatacgattttagagatacaatgtatttttgatctttgatatgatatgaatttgattatgattttcctataaatttgattatgattttgaaacaaatttgatatgaatttgattaggatttttgatcctttggtagatcgatataataatgtttttgtttaaattttttgactttgatcatgatacttctttatctctctattttgtgtgaggttgacgattctcaacaaaggtggttgtttcttgattggatataatgcaaggtacaaaggtgacaacaacaatgagatcgaatgcaaggtaatttatcaatttgtatttatttatgtgatcaatatgatttactg

SEQ ID NO: 28375 - DNA, 3138 bp, Arabidopsis thaliana landsberg
tcatactaactgatacatttccatataataacaaacgaatctcataaaaaaatggccccgggcaatttcgtactctgactctcttttgttgtgataagacgacattaacactaaacaactaatatatttgttaaccttcttcctttgctaaagatacaaagacaaggagttatttgccataaactgtacatggcctttttcaaagtatacaaattccagttaaaacttccaattttaaaactcaccaaatatctttgggagagagacacagagaaagaacaaaaaccaaaaaaaaaaaaaagttactgtcaattgagtttgacttttaagacaaacatataccattactaataatagttaagagaaaaaaaaacgaagaaagtccttctttctgctttctcagctttcacttggtcggtccaaggctctcatagaacaggatgtaaccatggtcagtattgctcgaatactcctgagacgatccaaagaatgtttgaacagctgattcttcaatcatctcaacattctcatcatcaaagaagagccaatggttatggcttttcacaaggcttacgtaatgaccatggttgggtccacttcccacatgaaccaccactgcaaacagagagtactccacgtctgcgtatggttccactgtgttgctcagttttagctccaaagggaagacaactctataggagagcttcttgtagcggcctagctgttcaatgtatttgaatcgttttagatgaatcactaggatgtgtggtggcttcttgatcttcatccgcttttgtgcttcttgtaagctgcaaatataaacattcaataatcaggcttcactcccatggcgcctaacaaagtctaacactgtggagcgcttattgaaggattaagagggagcttaaagaccagttttcagtttcagctactataaaggaaaggtgaggaattgatatttgaaccaacattttacctgcagcatttgtcacaaaagaatttgtcttcagcgtgaagcgtctctgtggagctgaagtttttcaaacagctagttatcgaactgttctgttcgatatcaaggcttaggtctaggaaagtttcatctcttgctgttactgtctcacaccgtagacaccttgtctcgttggtaagtataccctgtaatgagtttacacatgctaagtcacttgaaataactggaaaaactttataatatgtgctgtttgctcttgtgattgggtttggtttggggacaaggaaggaatttaagcttatcctgaaatgttattgatgcttactgcgcatctatactaaatgcagctataagtcgatgaccaaatacattttccacataactaatctggtatctaaatgaggcccaaaatgcagtgatcgtgtcttagaaaaaagatgagctatttaataaaagcacctaacctgaaaaatcttgtgcacccaagtaacaattggctctttatgaacaccatttgccaggggagctttcagtacatttgcaatcttttcaggagatgatgaagtttcattgtctgcttttgtggcttgtgtctctttctctaagatctcaacaagttcatttagcaaataattcaggaactcatgtgcatcctgcatgagataagaaacgtaaaatcaatcaaatgttaattgcttatctcgcatcttctgtaaaatagctcccgaaaagatggggagatttgcaaagatcacctggtgcatataactccgaaacagctcattttgtttcttcaacctctgtacaaatcgcttaggcgcaataacacctgttttcttcttctgggaacttatctacagaatgaataactatgatcagacttatgattacaccctctcttttttttccacagaatgactagcatacaattatctaaatgatgacgacaagatatgatatactaggcacttcatcaagcacatttagtatctcgaagatatttaactatttacacaataatatcaagttcatgtaatgccaaaaaaaacattgacttgtgcctataaataattgattaaatccacttatgatgtcaagtgagaaatcaagtaaaccaacctcaagagaaatattgtcagagaatacaagattggtcacttgagttaagacagtatggaagacctcgaaagggtagataaaaattaaactctcaaaaggaaaagaaagccaaagatcacaaatacctgcgaaaacaagtctgccaggcaggtcataagattctcttcagcatcggccacgcttttattactggtatagtattcgagcagttgttcacggaaaggaacacagaaataaagagcctgcacaagggagagagattcaatacacattttgactatttcagttgaagaagaatcgatcactagccaatgataaaggtctttctccagtccagagaacttattcatatacatagcacacagagatatcgaaaaatcaatagagctgatacacaattgcaattgcacacaggatttacattaagtattaacctccttgagtatatcaatctacacactccatccaattcgaaatatcaatgcaaccaaatcatatttaacctattgaaacgaatttaacatcaatcgctttaaaacacactaattcaacgaaatccagaagaaatcgtcaaagggaaacgcgatggggaatcaaacaggcagtgaaagcaaaggaaagagagaaaggagcaagtggacctgcaaaacgctgttacagtagcaagtgttgccgaaattctcgaatccaaagtagcgttcaccttcggggaactggtcgccgagagctttctcgagtttggagcccgcggcgcccattagccctagaactagcttccgtatcaccgttttttctgatcctgactcggagattctctcaaaggtcctcttcttagcctctgcgattggttcgattcgatcggagaattcagatttccaacgagcctcagagaagagaagagaagaggatcgattattttactattaaactttttctcttcttttctggccaaagcgacgaatcaacgaaggaagatgtggatttgattatcaaaaactatttgagtcaaaattgcaacttactcctctaaatattgataaactttt

SEQ ID NO: 28376 - DNA, 1798 bp, Arabidopsis thaliana landsberg
tttgagaaaaagcactgatattattacttgaatatgtttgaatttttaaaaataatattcttctacttattactaattatttactactttcatattataatttaatttgttttataatatttttataaactactaatcactagatcattttagtgtttatttatatatttatttgtgtaaaatatacattccatagctctatataccatgagttatcttcaaataaactgtcaaaggaaaaaagtgtttaaagacttttttgtcttgagaaattttgaattgtcttgattctattggatgtttaccaactaaaattaaaaatatctacttcaataacgtttaatatatcttccttatttgattatatgaggatcctagtctagctatctatatatacatttttgcagtcattttaacaaataaatcctggacttagaacttatttacgactcaatgccactgaatttattttttccaatcgacattttaaatcaaatatttacctaacaaaaatattgcctaaaatgtctctatattaaatccaccattacttcaacaaaagtccaacattacttcaaaaaaatcattcctaaaatctctcttaagtatttattaattttcggttttaatttgctgcaaaaaaaaaaatcggttttaatagtacaaaatattttaaggtagaattttctttccatatttatttaatatttcgtttttacagcatttaatattttgtttataaataacaaattaattatttagcattcaagaaacttttttctaatctatcctttaattatattgacattattgattgatttttaaaatatatagagattcaaatcttccatatatgtttatcatcttctaaggaaattaaacaattattttctgaatctaaactaaaatttagaaaactaaataaataaataaaatcgttttaattattttctaagctaaactatattacactatgatctttagttttgaatcattcattttcattgtaatataaagaatcaatctcatattttccgtgttatacaaataatcaatctcatattttcagttagtaaaatgtacatgtattaaaacgtaacaaaatcatcgttctcaaaactatttcaaatatattacaatctcatatatcacgcagatttcttcaaaatttgaactaaatgtcggtaactatttaaaacaaaaaatgtttggcaaaccaaaatacaattgcaatcccttaaaatgagcaaaacgcacttaaatacatttttttatcaattcactaaatcttatttctccaaaatttgaactagatttcgacaactatttaaaacaaaattgtgtttgacaaactaaaacacaattgccatcccgtaaaatatttatttcaattataaatttaaattagcggggtaccgcgggttttttaacaggacgggtttggtggaacgggtttggaaggatgttacttaataacaattgtaaactataaaataaaaatattttatagatagatataatttgcaaaattttatacatactaatttaaaaaaaaaaattgtctccgcggtgtaccgcgggttaaaatctaatctactcaacatttttgaagtacattttaaggaaaccaattgggtctggatttttgattcaattttgacccgaaatctctaatcggttcttccataattgatttttattaccaatttctattttttttataattattaacgttttttattttattttttttttttgtatatataatatctctaaactaaccatatttgttatttac

SEQ ID NO: 28377 - DNA, 1520 bp, Arabidopsis thaliana landsberg
ggtcaagacattgatctaatccacttcccattgtctccacatttcgttctttcctttgtttttcatctaggttttggttttctgaattggatttacgttagtttatcttgtacttatttattaagttttttttcccttcctcaatcctgtaaattcagatttgctttctttggtaatcttttggatcaagatccatctattttttcttcaatggcacaactccctcctaaaatccccaacatgacacaacattggcctgatttctcttcccaaaagctctctcctttctctaccccaaccgcaaccgctgtcgccaccgctacaaccgccgtacaaaacccctcatgggtcgacgaattcctcgacttctcagcgtctcgccgtggcaaccaccgtcgttccatcagcgactctatcgcattcctcgaagctccaacagtcagcatcgaagaccaccaattcgacaggttcgatgacgaacagttcatgtcgatgttcaccgacgacgacaaccttcatagcaatccttcccatatcaacaacaaaaataacaatgtggggcccacgggatcttcatcgaacacatccacgccgtccaatagcttcaacgacgataacaaagaattaccaccgtccgatcataacatgaacaataatatcaacaacaactataacgatgaagtccaaagccaatgcaagatggagccagaagatggtacggcgtcgaataacaattccggtgatagctccggcaaccggattctcgatcccaaaagggttaagaggtaacaaaattattcaagaacatgcatgcacgtaaaaatatcaactcatcagatttgattacgatgcaccaaatattttgaaaaatatgattactgaagattagcgtcacatcactaaccatataatgttttttaaattgttaacaaaaataaagtaaatatttctgaatgtttctacagaatattagcaaatcggcaatcagcacagagatcaagggtgaggaaactgcaatacatatcagagctcgaacgtagcgtcacttcgttgcaggtacattatacaaacattcataaatcataatcttttaattattcaaataatttcatgattataaatttattatgaccttaaatcatttttgtggcaaaaaaactgaaattaaaggcggaagtgtcagtgttatcgccaagagttgcattcttggatcatcaacgtttgcttcttaacgttgacaacagcgctctcaagcaacgaatcgctgctttatctcaagacaagcttttcaaagacggtattaatgtcatgtaacttttggatttaattctcatgtaaattttttggataattatggaattaatatatgtgtgtttatgagatttttcattttctcgtcgatgcattcaattatcactgacaatatatgagcacgcccaataatcttctctcactagctaatataacatcaaaaaactaattttattctgcagcacatcaagaagcattgaagagagaaa

SEQ ID NO: 28378 - DNA, 2214 bp, Arabidopsis thaliana landsberg
agagatctcaacaatgctctgtttgtttgagtcagtaccaacatcagcataagttgagaattatcctagattggttgcatttgtttcatatcacctgaactcatgtgtggtttcaggtcagcgccaattgtcctttgtgtacacctagggtttcttgtgacgcaagttttcctctggatcgggtttttgcatggagcgcttctcccgagaatctgatcatgttaagaggtgagtgcaagtatgtggtcacttgagctggacagtagcatcggtagtgtcagatatagtccaagaaacgaaaggttacttatgggccaagaaaggtccaagtcaggtcatgtatatggctgaaacactcaaaatccgatcactccatctccgaagaagcttgaccgcgaggacttccaagaaaattccgaaagcttcacacgatgacgagtatgggagacgaatgcatcgacataagaagaggtaaagacgaacagttcggtagtattcagcccattagaagatcaatctcaatggattcatcagcggatagacagctttacttggcggttcaagaggcgattcggaaaaaacgcgaagttccggtggttggagacggaggaggatgtagcagtagtagtggcaatgttagtaattccaaagtgaagagatctttcttctcttttgggagcagtagacgttctagaagttcctctatattgccactttattttgaaccctaataagccgctttgcttatttgttttattttcttgtttctttctacatttgatttctattatttcattttcaaattatttttgagatggatttttttaattatttggtcggtgaggtaggagagaatatagacgtgtttagatttagaagtcaaaaaagttgagttgtattatgtgtgacagagaaattatggactttctaaagtttgaaaaacttaaaaatatttcttttaaacataaaactcatggagggcttcacacttctacgtcaaaatctcctcctcatataatcaatgatatccaacttacaaagaaaccataatctccttgaaaacatctatctgatgttttttgttgtgttaaagcaaacatcatataaattcatcttgatttggatagaacattcaaatgccaaaacgaaaaacaccatccatgatttttaaggatttaacaaacttggtaagtctctttgtactaaatcagactttactagtgttgttgaagtaatggactctgatccactgagacctattatggtatgttgtatgacccaattatttttttcggcctaaaccagccttttacagaaccaaaaggaaaaactgaaaccagagcatctaaaccggattaaaccgaataccatgccatttctttttgatgagtcatcatcaccatcctttagatccagaaatcaaaattgcttactgcttcatttgttctgctgttcccggccaatgaagattctcgtcgccgttaaacgtgtcgtcgactacgccgtcaagatccgagtcaaacccgataaggtaaacgcataacccatctctaaatctctctgtaaccattgaatcaccgttaaatttgattcctttatcgttgaatcagactggtgtagaaacccaaaatgtgaagatgtcaatgaatccattttgtgagatcgcgcttgaggaagcgcttcgaatcaaagaagctggttttgctaaagaggttattgcagtgagtattggaccttcacaatgtgtggatacacttcgtactggtttagctatgggtgctgatcgaggaatccatgttgagaccaattctagttttcttcctttgactattgctaagatcttgaagagtttagctgatgttgagaatcctggattgattttcttagggaaacaggtatgtttggctctgatttgcttgtcaagttttgaactttggttgtgtatgcgtcaaatctctagatcttgttttagtgtactgaatcttagctaaagttgaggtttttcaggttttagaatgcaaaagattcgtgttttgactcgtgtgttgtggattgtttaggatgatgaacattgatctttgtaaattcttgaaaactgtcttaaaatgtcttgaataatgttgagtttgcataatgttttgatgaggtttgatgtgaaggttactgattaataacgttatttttttctgtaggcgatagatgatgattgcaatc

SEQ ID NO: 28379 - DNA, 1731 bp, Arabidopsis thaliana landsberg
tttaaacactataatcttatttcatattttagcatatgatattttgcatgatgctatcttagcctcgactatctttacttcatcttctaaactatatatttatcaaatcttacgtatgcattgcatcacttgtttttacattttgtgtaaagaaaaagttgcattaattagtttttagcggtttagtacaatatggttaatttgataaccacatacttgatacctgttgtatctagagttgtatataacaaaattagaattatattctattggctaagccaatttctctccaccaatcagtttacatcggttatttggaacattattatcgataagcaatgtcattatccaaaattttggaatgttatcgtatgaagaagagtgtagaagtatcttgatcacatatgaatggcttacctcaatcctcaaaaaaaaaaaaaaacaatgattttccaaagcatatgtggtaataaataatgttataatcttcacttgaaaaaaaaaacaaatccattggcacagattagccatttgacgacaacctcataaacatattccacgtggaccaatcaaaatagaatcctcctaatcatcttcctcgtggcaacttggccaatccgcatcgtgtggcgatcagagagttaagccttgaagacgaagagataacgaattggttgttgatcactcgctttataaatctctcagtttcttgctcacaccaacatctctctaagcttcttcttctaccaatctaattcctctcttcagcttcttgtgttgtgacgcatactcgtcgcagtcttgagatatggccgccgcagtttccaccgtcggtgccatcaacagagctccggtacacttcaatctccattagtggtttaatgttacttttaacataatcttaacgctttgtgcttatccaccacttgaatagctttggtttttacaaatatagctcaagaatttgatcgtttgaatcactttgagattctctgacagaacagaagaatctggactttaactaggaaatctaaagatactttgatgcttcttttattctctacttgtgaactatagatttagtagatgtgtttaaatcgatgtatagtaattgaactgaaactgtagagactactactactctttagtcttcaggactagtctataccttgaactatgtgaaccaaattaaagtttattccccggtttggttcggttcagttcctgattgagcgccttttatccttaggaatagtctctaaaccggttcttgaaccatataaaccaaacttgaattcatgattggtgattgaactgtttttgtgtgtgtgttgcagttgagcttgaacgggtcaggatcaggagctgtatcagccccagcttcaaccttcttgggaaagaaagttgtaactgtgtcgagattcgcacagagcaacaagaagagcaacggatcattcaaggtgttggctgtgaaagaagacaaacaaaccgatggagacagatggagaggtcttgcctacgacacttctgatgatcaacaagacatcaccagaggcaagggtatggttgactctgtcttccaagctcctatgggaaccggaactcaccacgctgtccttagctcatacgaatacgttagccaaggccttaggcagtaagttctcatctctctagatctctcattagttccataaagattttggagtctttggttttaaaaattgtctttac

SEQ ID NO: 28380 - DNA, 1503 bp, Arabidopsis thaliana landsberg
gggtgtcattgtcctattcgggtgagtgcatttgtttctgttgctcatagtttcttatcgagtttttcacacattgtgcttttagatttgacatattaaagcagactgaaaaatgagtaaactagtggttctggcacagcacactaggatcttttgcctacagaatgatgatgtttgactaataacaatccatatctgatgaactcatttcctttcaccagtcacttattaattttattcagcttcttgcttaaagttttagcctgttacagtgtctaaccaacatcacatgtactaactttgcagcggattttggtcaacagtaaaggcatttctttcccagattccttttgtcggatggataatacagtatcctctcatggtaagtaatccacaacaacacttgcctttttctctaatgctcctttcttatgctttttgtacattcagagcttcctgtcagggccttgttcttgaacaacattccgtgctcctgcctcaatttattcagttccttgttgtttctttagttagcctttctcggaaatggatagagccaatggacgtttcctgatatttagtttgcacatgatatagggatgaacataaaatgatttagagcgatggactgaattttgttttggaatgatctgtttatttttgcaggttcttgagcaacttgtaagaggtgctcgttgaaaaagatcaatctcaatctcatggctcttcagccgcttaacgacatcaaagcctttctttcttttttgggacatgacagagactttgctctgttttttgtttttttggtaaacctcacctttgctctgttttacatgtctaattttgctgtatatgccaaaatacattttcccttaaaatgatttatcttctcgttaagcaagtattttcaactataactccaatcttgtgccaaatttaatcaaattcagatgataagtttttttttttaaacctccaatcttgtcccaactcaattttcattatgtaacgtgcggataataattaagtagttttgtaacgaatcaacgacatatttaacataaattaaattttaacagaataaaaagtgttcacgttattaaattttgtttttatttgcgtacggacataagttcctaaatgtgtcagccaaagatcaaattgttttcaggatcagacagagatcatcgagtgcggatttttctcggagagatgtctcttcgtgctttcttgctcggcgaggcattgacctaaacccgcttaataatctccgacgaagatccaggacacactcggcgttaagaggggaaagaaccaaaaatcaaacaatcatgtggatttcgaggttgaagagagttaggagaacgattatggttctgggcgttgccaatttcgtcgtgattgtttccggctgcgttcttactctcgtttctgacgcagattgcgacagccccggacaactatttcccctcttcgccgtttgtttcgctgccggcgtcaaac

SEQ ID NO: 28381 - DNA, 1650 bp, Arabidopsis thaliana landsberg
aaaacagctgtctcattggctaaaaaaaaaacaggtgtctcaatgattaaacaaagaatattttctactcgaatttgattaaacaatataatcagcgtttagtctgaccacatcccattatagaagaaggtaaactagaaaccttatcaatcccagactcgaacacaatccccattcccatgaaaaaatgcgattcaatgtggcagtgaaacgaccaaacgccaggattatccgctctaaaacgcaacgccgtccagccaaacggttgaaccgcaaccgtgtttttctttatcgggtcgacccggttataccttttcggatcctccgactcattaaactttccttctccgtacccaagcacccaaaaatcatgaccgtgtaaatgccacgggtgcgtttcactgttgtttgcgttcattgtattcgcgttttgtaaaatcacgtccacggttgaattgaatctcaatctgtagattccatcgctcgtcgtcgcgttagcgttaaggggtttcgcgaatatgtcgtaatttcgagaatcgtagttctccggtgccgtgaaacgccagtcaaacgcgtttgtgaggttttgctttaacgcgattaggtacggcgttttagggtggtgataggaaacgttgttgaccgaccaacgtctgtatccgttgacttcgttttgtgtattcagaagcacaatgactttgtcagaattctccggcagcgcgtgaatgaatcctcgacgcgccttgattgctaggctttgtgcaagacgggagcgcgtgtcgttccattccggtacgatattggatgattccgacgtgggaggacgccgtcgtgggtggttcgggtagtagttgagtacagcggttgccggtggagttgtcgccggacggctaactatgcttgaggtgatccaatagtttcgtcgagggttttgatctgccttgagaagtacggaataagtttcgccggagtatacaaagagattcttcaccgtgaatggttctacgtagtgtccgtctgcttcaacaactgtcaaattatgtccctgttgtttaatttaacccatcttccattagaatacgaaaaagaaagaaacagagaagacaatgaaaatgattggcttgattctcaagctaagtacctcgatttggaaactgagagcagagagagccgtcaagctacctattcgaagcctgtatgtctttccgggaatcaccgtaagaataaaacgcgaacaatcagcgtttgagacgttacatactccagacactaagcttggaggagtggttaggttgtttgagcagttgaatcttcctcttccttgtatcataagcgactgataatatccaaataagaatcatccataaacataaaatttgatcgatcaaacaagaatctgacttttgagtgatggaaaaaagaactcacttgtggctcaccgacccacttgaagggtatggatgctaaaccggtggctttctctgacatacttttgtgataccaatcagttaacaaaaagttccggtcataatcgtatgtaaacggttcgggctctgtggccggaggagaaacttgaatcattccgattaatccagactctctctgcatcccacagtgtgaatgatacatgtatgtaccaggcaacaaaca

SEQ ID NO: 28382 - DNA, 1861 bp, Arabidopsis thaliana landsberg
  unsure (1)..(1861): unsure at all n locations
catccctattattaaccgaaagaaattgattactcaatttgacatttgtaaagactaagagcgaatttattggagaagataaaactttttagatttttaatgttacttttaatagctaaaagtggttacattgctgcaccataagtgtaatgattatgaaccttttatgatccaaaacatgattcaatatggaaatcaccaaaagaaccatctttttggagcagaaggttttggggactgatcatggtgttggttatgttcatgttcaaccttgttcctgttctccattccctgcttcagtgactccagtctttttctgtgacatccacacacaataaaaacaattagctttaagctaagaaacaaaccaaagtaatacagactgtagcacaaagggtttataggcttcactttcgataatgctaaaaatcagatctatgtacgcagcatttgggaaggactatgatgggttcatctactctcatgcagcaaattaattccatgatatgatattatgagcgttggttgttctataaggttaggttttgttacagtacttggtatccgtcatccgaccgtgtaaactccatctccggcgaaatccttctattccttcagctccacttgctagaatcaagtgcctgattataaaacaaatgaactgttttagtgaacatttggatttaagaacatagtttcgatttgtgaacatctgtagatatacatgattacatggtagcacaaactcttcacgtaaagaaaatccaaaacaaaatataactgcattgttaagaaagagtacctctcaaaagatgtggcttcagcttcaagctgcgtaatcctttccttagcgagttcaatgggcatagacaatcctaacttgtgttcgctctcttgaagtctaactctcaatattttgtcctacaaaaaggatagaagaacaagaaaagtcaaggaaatggatgtggatatgatatgagaatgaaaagctttatataactataatccgagccgatggctaaacaacaattaccctcttttcagcacattgtcgatacaatgcaagctcatcttggcaaaatggttcaatatcattgatttgcaaacctaaaacaagaaaaaaaaaaaacaattctactcactgacagaagtaagggtagaattataaaccaaaccgaggatacagagacatacacaggaatagattcctcaaaatcccatcgcacaaatcaacaccttcaagcacatgtgaagcaatttcaggagggataacaggagatggaggacccgtcattaggtcatcaccgaccagtatagtctcctccatcattggttgtgaatcaactnnnnnnnnnnnnnnnnnnnnnnnnnnagttctcgaaaaatggtcttaggattcaaaaaccatgcaacctcaatttaaattttccaagcaatttctacgcattgatggtaatgcagattgggattttaacaagttatactaagaagttttacatcatacaaaacaatagcaaagaacaaagctttatagcattttcctaagtttctacatctaattcaccaattcccaaagataagtgaagaaagggccttccttgaagcaaaaacaaaatcacaattgcacaagaatcattcactcaccatccatgactgctccgtatcaaatcacttcaagaactgaagaacaaaccaaacttgtaaaccctgaacattcatttataaaaaaagatacatcaaacagagagaaattgtaaaaacattctcacttatgcatttcatcgaacaggttctaggcataacaagtacatactcgttcgagaaatctgaactccgcanagtacgaggagattcacgcgtg

SEQ ID NO: 28383 - DNA, 1296 bp, Arabidopsis thaliana landsberg
  unsure (1)..(1296): unsure at all n locations
aatcaagcttaagtcgacccaaattgacagaaacttgcgattgagaaatagaagagaaccaatacttacatccacttccgttcacaacgtcgcctaaactcatcacatcggcagttgtcgttgttgctccgtcgagacagctaaccggagaattacatttgctgagatttaaccggttttcaacgaatttattgcggattaagcaattagaagacttgttctgtttcttgcatccttggacgagaattatgttctgtaatttcgacggagcaagattttcccggaaaagttgttcgattttacggatgttgcgtttgcaaaccggcgggatttcgacgtagatgttggagtttgtcacttcttgcacagcgaattcaccgatcacggcctctccggttatctcagagcagttgaatcggatcggataaccgtcggagaaaccaaacgggtaacggagcaaacttgttttgcacttaaccgaaccggtggtttgtgtagcaacggttagagtgaagacgaagaagacgaagatgagatacggttgaggagtttctgccatggagagaaagaaggataatgatgagatcgaatgattgtcccaatggcagaaactgtaaattctgcaacttcgtttccggtttttatgtaatttttaagatatgtttttgactgtnnnnnnnnnnnnnnnnnnnnnnnnnnnnnngttgaccttgtattatagttcagagtctgaacttcagaccattgaggcattgaccaactgcgagctgataataagggggtagtcttgacattttggctttaacgttcgttaatcatgcatcatagcctcgttaggtgattgattaaatgaaatttgcccccagtgttcgaataactacagatatgatactaaccaataataagagattgttaatacaaatatgtgcatgtaactatggaaataaaaattcaattctttgtacgaagcaagtgtagaacactaaacagtagaagctaaatctcctcaactctgttttgagacgtacgataagaactaaaaacttgttgaaagttttgaagtgcgaacttggagtgaatattccaacttctaagacgttactaataacataaattatgaacacgcaacacaccagctaagttccatcagcattgaagtttcagatgaatttaccaaatttatcttcgctgacgttacttttaacgtgttgcatcggaatcgaaagtccgaaaacaggctaatattcattgctgacgttatctaagaatgttttcctcgacggttcaactaaaaaa

SEQ ID NO: 28384 - DNA, 1720 bp, Arabidopsis thaliana landsberg
agtcgtcaatagatagatgggacatacaaattacaaaagcggtttgcattatctttcgttgaaaaaaataaatatggaattggtgccctcatatataaacccatgtagagtcgtctctctcttaccaaataagaacaaaacaagacataattttctctgttttcctagctctctcctctcaaattcttccattgctctctgttttggcaaatcgtgaactgccacgtctttaaggcatcagtgaagcaaagatggactttgacgaggagctaaatctttgtattacgaaaggtaaaaatgttgatcattcttttggaggagaagcttcttccacgtccccaagatctatgaagaaaatgaagagtcctagtcgtcctaaaccctatttccaatcctcttcttctccttattcgttagaggctttccctttttctctcgatccaacacttcagaatcagcaacaacaactcggatcatacgttccggtacttgagcaacgacaagacccgacaatgcaaggccagaagcaaatgatctcctttagtcctcaacaacaacaacagcagcagcagtatatggcccagtactggagtgacacattgaatctgagtccaagaggaagaatgatgatgatgatgagccaagaagctgttcaaccttacagcgcaacgaagctgtacagaggagtgagacaacgtcaatggggaaaatgggtcgcagagatccgtaagccacgaagcagggcacgtctttggcttggtacctttgatacagctgaagaagctgccatggcctacgaccgccaagccttcaaattacgaggccacagcgcaacactgaatttcccggagcattttgtgaataaggaaagcgagctgcatgattcaaactcgtcggatcagaaagatcctgaaacgccacagccaagcgaggttaacttggagagcaaggaactaccggtgattgatgttgggagagaggaaggtatggctgaggcatggtacaatgccattacatcgggatggggtcctgaaagtcctctttgggatgatttggatagttctcatcagttttcatcagaaagctcatcttcttctcctctctcttgtcctatgaggcctttcttttgaaaaagtttagaaacccacattgtgttgtaggttatagtttagggttatgctcattggcatttggatggaggcaatttttgtgatctcccattccaccacatatcagtcattatatgtgtctaccttttctctgtatttctatcattatcattgtttttattatgtgtctgtatgtgtttccctattgctacatacatagatgtcctctttgttcattgagtttgttatctgtacttttacaacttggcaacatcacatagtctgcagaggttgttataatgacctctgcctatcatgcaagatctttatgcatctttgagtttctacgagaagtctctggagaagtcaagtgacacttccaaaagaactagagggttcgatttaataggcaagaagaaagtcccaaaagtcttaggctcaaacaacccttagtgcattactttgtatgttcgaacataaagagaaagaataggcgacaaagaaacagaggttaggtgagttttgggtatgtttgggagcttggttaatcgttagttgtaactatactagctcaagaaagagaatattgtttctagtggattctgaaactc

SEQ ID NO: 28385 - DNA, 2517 bp, Arabidopsis thaliana landsberg
atcttcaaaatttcaagcattaatcctaactgtctagctaaatcaggtgacatgtgtcaagtctttgtcgatgtttctccactgttttcagaacccatagtggctgatgcaagaaaaaaaaaaaacgaaattaagcatgttaaggtcatcatgaaacaaatccgttaatcgactaggattatctttctcatctagctcactatggtcaatagtatgacaaagtaacagagcaatcaagtcacatttacatgggattgtgtatcaaattatccacattttcatagaatatcaaaacaagcggaagtacatcttctggagaatacattacaattctacaaaaatgacataaagaagaactcactgagacaatggttttggcatggccaaggtatctctgaatagaagcaccttcacacacgacaaaacttgcattgcaaccaataaaccatgaatcgatgacctttgctccttgctctccagcaacctttaacacctaaacagaccacattctatctaaagaagctcatagaaaagactgtacagcctggccaaaaagttaaaagcacccaatgtgataaattaccttaaggcggagttcatctgaaatgtctgaatcaacatacatgcaatggtcagcaagactcatgtctacactagtgccagactctgttccagaagaagatacttggtggttcttcgttgatgtgccaaaatgtacagcttgaatttgtcgaggacgacaaatagtttcgaggtcaaaaacccggctcagctcatcccccttttcgcaattttgtctaagttgtttaacattgtaaagtgattcgctcatcctgactacaaaattacagaaaaaaatatcaacttcagacacacataaccttttaacttagttagaatatccatgagctctcttttccaaagtaaatttgttctgattgagtttgatacactacaaacgaactgaaactatttagactatttcaatatcatgctgataatagatcacagaatatctttagcaaactaggagaagccagtgtaggactgctgactagaaggttttattcctctaacaataaagttgaaagagtcaacacaaagtcaagggtccatgaatttgctagcaaagctttcacaaatttgtaccgctatgaaactgaggcagtaaccagcaaaactgaatggtcaaatctatgatactaactctggctaacctataaatccttgagcaaatattttaaacagcattgaaaacttacagttcctcttgacgctatctacaaaccagccaatcgtaacaacaaagagaccatttcttgccccatgtttcaaagtgtgctcaaacttacgtccacatgagctgtaagtttccgttaagcatcccaaaaggcaccataaaatgtaacaaaatgatacgaaacaaattatctaaagaaatgctttagaaggacgtgatcatgtttgtttctgtagtcaaaaccaaaattgaataaagatcaacagaaatgagaaaaaggatatctgaacaaccaaatgagtacatcgctggtgaagatgaggagtgtactcgcctccgagtctctctgtcgcttccttgacttgttttcttgcatctgcaaagaaacaaagcaatttaacatatcacaacacaaaaccaatgttatgaatacaacaagatcacattcacaacagcatctgaaatctaaagattgatgaacataaatatcctacttctgagttctgactaatggagattgaagaggaacaaattctttaaatttacaaacataaaaccaaagttataacaacagaatctgaaagtctagaagaataaaactttaatattgatggaacataaaaaatcaaactttctgcctaatagagattgaaaaaggaacaaagtctttacctttggataaaccagtgacacaaatgacaagagaagagaatggaccattggactgagacattgaagtagtagtaagaggaggagattgtcaaacaggatacaacttataacaaccctttgaatcaatcaaaccaacatttcttcttctgagagcacccattgtgatagttgatgatagacaacaaaccaagctccaatctctgcttttttataaatccttaattcaaaatacggaatcattgcagaaagactaaaaaagaatcaaaatcaaaaggaaatcactttctcagaggaaaaagaaatcggggaatgtaagaagaagcatgaaaaggattcaaaggagaaaaagattttagggttgagtgattgtggacaaaatggtgctttaagtgatgaatcctcggaaaaagatggttactttggttgtcggagctttttcgtggggctaattttggctttatcggcgtgattccaaatttggggaatgagagacaactactttttctattcaaaactgttacacaccgtcttcttttgcagtgactagtgagactgggagataactcttgtgagtcaaaaacagatgggcttgacccgacccgacc

SEQ ID NO: 28386 - DNA, 1359 bp, Arabidopsis thaliana landsberg
gaaactattgaaccttgcgtgcatatatattcatataaatttctaattctcgccaggttcattataattttttttagtctatatatctttctttctttcagaaaagtaataaaagtcgaagatatttatatcaacacttataattgagttttacgacagacgcagaggaaaaagaaaaaaaaaaaaaactaataattgagatttgagaagaagaagaaaaatcatgagggaaccaaagggggcacaaaaacatatcaatcagataatcaaagtcttagatcccttgctggatgtcatgattcctacatgtatttgtcattctatgagacgtggtctagtatgtgtaataaatattttaatttagtgcatctgtgtatggagtgtgtgtgtgtatatatattcaaaaaccggaatccatacaataaaaatgaatgtgtacgtatttatctatcttcatatgtatattatttactaatactatatattctcatatgacacgtattttcacgataccacgactttccataatttttagctgcatagtgtatatgtatactacgtattaaaaaaaaaacaagagagtaatgaatggaattaatgaatttggtgtaaaaaaaagttgagagtttggtggaaagagcaaaatccctaatttgatgggaaggtagaagaggagatggaacggtgctggttcggaaccaaagcagacaccggagctaagccagatttttcgattgttgctgtttggtcgaacgttgctttcaattgtcgccttgatcagactcctccagtgcacgtgcgtactgtccacgcgccggtggcccatgaggattgattactcagttttcgaagtaaattacaaatgcaaaatggcatgagaggagtcaaagcagggacaccggatacaccaatacaatttcatcatctccctaccaacatttcatgtgtacacaacattgcagaattattgatcaggatgtatatcattatcaaaatttcaaagtcaaggtgttggataggtaattttactattcataaaaattgtagaatgatcagcttatgtgtttagtttggtaaaatgaatatgatttaactttcttagataattgattctttattcgtgtatagttttctgaatattaaagatataaactataccgttttttctgacaagtaatgtgttacttacattacgtaatacaaatatttaaaatatgatatgaaatgatcatttttttgtagtgaattatttttgaatcgtttctttaaatttattcgggaaaaggttaagctaaattagctaatagtaacatgttactatcttttagtttatgattgttacatagggatgcaatgatc

SEQ ID NO: 28387 - DNA, 612 bp, Arabidopsis thaliana landsberg
  unsure (1)..(612): unsure at all n locations
caagaggcatatacagagaagaaagtcaagaaacctcaactttcgccggctatggcggcggcgaaaaaaccgactctacaagacgttgtttccgatgaactaaactatgaactctgggctccaaccttgaaaaatgctctaactgaaaaaggactttgggatgttgttgaaaatctaatgccggcggatctatcgaagagtccagagctagcgacggagattctaccggaagatcttctgaaatggagtgattttatggtaaaagacagaaacgcgcttcagattttgcaatcttgcctcccagtttctgttttgagattgacacttgagaccannnnnnnnnnnnnnnnnnnnnnnntgctggaatcagctaatgaacaagccaagttagacaagaaactcgaacaagataaggtagaagaaggagaacgtatctcctcattgttgacgaagattgctgataacagtttatattccaatcttctggctatctcccaaatggtaatctcgctgtcagattcatatgagcatgaaacgaacgagctcatactcatgggtctgaagaagcttttctttaccgatttcgtgaccttctcgatctactggaatcat

SEQ ID NO: 28388 - DNA, 840 bp, Arabidopsis thaliana landsberg
cccgcaacgcagcaaatgcgctagggggccgaggcatatcgcttcctgcacattgggtattctcgaatgagcctccgaaacgtggccatcatagcgcacgtggatcatggcaagaccaccctggtccatcagctgtttcgccaatcgggcaccttccgcgacaaccagcgcgtcaaagagcgcgcgatggattcgaacgatctcgagaaggagcgcggtatcacgagcctcgcgaagcctacctggatcgagtgggacgaccacatgggccacaagacgcggatcaacatcatcgacacccccggccacgccgacttcggcggtgaggtcgagcgcggcctgtcgatggtggacgccgtggtgctgctggtggacgcctccgagggtccgctgccgcagacccggttcgtgctgcgcaaggcgctgtcggcccggctgccggtgatcctgtgcatcaacaagaccgaccgcccggactccaggatcgacgaggtcgtcaacgagacctacgacctcttcctggacctggacgccgacgaggaccagatcgagttcccgatcgtctacgcctgcgcccgggacggcgtcgcgtcgctgaccaagccggagaacggcacggtccctgcggacagcgacagcctggagccgttcttctccaccatcctgtccaccgtcccggcgccggtcttcgacgaggaggccccgctgcaggcgcatgtcaccaacctggacgcggacaacttcctcggccgtatcgcgctgctgcgggtcgagcagggccacctgaagaagggtcagaccgtcgcctggatcaagcgcgacggcaccatctccagcgta

SEQ ID NO: 28389 - DNA, 2877 bp, Arabidopsis thaliana landsberg
aatcaacacggatatagcaatgctgtattcactagactctcaatcatgattcaacttttgatactcctaaaaaattgttcattattagtaaataaaagacccaattctctctcttgttccacaagatataatggaatgcaataaaaccctagccaggagctccaccaagcgttctctctctctctctctttctctttttagctcttctctggctctaatggttccaaaggtttatcgtgggtaccaggcgaaggatcaacgatgtcagtaacgttgattctcaaggtttgttggggtccctcgtttgacgggacatggacaagtgcgtccattatcagaatgtcccagtccctttgctggagaaacccgaacatgctatcttctatccccaagcagaaaaggggatccaatgagtaagaaaaatggcaaatgcagatacctaacacatatgttttgtctttgagtgactgttcgggtttgagaatgtttacctccattgcgaacagctttgagatgcaagattcctgtgccttgtggtccaatcacagggaatgaacaagacactgagtgcctttggtgagaaacagctagtgaagcattgtaccatggccctttctcaattggctctccaatggcttcaatcatcgccttactatatcatcaccttctccatcgccttgctgaaaattaagcatacaaagactttttgagtaatcgccaatgcagatactacattcttgaaaatcatgtccatgttattgatttgatgatacaaggagaagatcatagagaaattcatgacagaatggacaacaaataacaaaatggtgcgtatagaaatccaaaaaaaatatgtttgttctggatattacggctgacttttcactcgattcctaaccagcccaggtagaagaagtatcattactttgtaaagtggcggcacaagcacaagatagactaccagactcaacatctttctcttcgtttgcttaaccagtttcactaaagcttgaagccaaaatcgaaatatggagacagtatcaattcacgtacatgtatcactagcaggagaatttgagtttcgtttgttgtctttccaagttgatcctttaaaccccaacccattgataacaaaatatggtcaaagaattgatggtctcagccaccacttcaacaaaatggtttaaacattatctaaacctgttgtccaaacgagtctcttgctaataaagccttgtcaagactccgaatcgattcacaattcaactatcagtgaaggttacacacatagtatgtctattgcaatagctaaacttcaatggaaagataaatgcaattttgaatgaaacgaatatgtgatgggagattacctgctacatccacgatagatagaaagatcatcgagagcactcaaagcaacaccaccagtgactgtaatcaagacgaaagacactgccttgcgaccaaaagagcccaatgtcccaactttcacggccttttccgagctgtttcaaaaacattcttcagctcattttcactcctaaacgaccatatataacataaatcatccaaattttgaatctaatccatataagctcaagtcaataggtgtaaatgggtatatagatcatttcaccaactagaaaaactaggtcgattttgaaatcgcgatagagatggaatgaattcagatgcgcgaagaagagaaatcgatcggattctaatttgtaagatcgcaaatcaaaatccgaaattggatttttcacggtcaagaattgcaaattcaagcagaaaaatcagagaagttgcatcatttttgggtaccttgaggttgaagatcctttgaagaacgaagtgaaccgcctcgcgaacatttttctcaggtgaattttgacccgactcgctgattcgacccgaagcagcgaggtaggggatgatctgtagggttctgggttttgcaacttcccatttagattttattatttttacttttttcgttgaaataaatatagattaaaagaaaaacaatagtatgtttaaaaaaaccgaaaaataacatttttaccctttaatgtttaacgtgtcatttaacagcctttaatcttcaatatagttttactaaacattataaaacattttgtaccttaaaactagttttcttgtttgtaccgccataaaaaaatgacggaaaataacatctactaacatgaaatagttaaattatatttgtttaattttaattttaattaatttaatttcaatttatctatttaagagattaggaatgccatctctcctaattaatactatgatacagagcaccatttattttcgggctaatcttaggtgatgaatattaaattgccatttttatatgtgattatgacctctttaattcatcttttctgatgtttttctttacggaaatctgtcattttttatagtgtcacaaacatgaaaactagttttaaagtttagaatgataataaaattattttgatggtttatagtgttttagtaaaatacagtaatatctaggtttaaagtgttaacactttgaaaattaaaaatatcacatttccacgaaaaaaacaatacaggttttttttccaggtataaatgattttaaatacgagttgttactaaatatttttattcccatgagatttgttatcttccggataaattcaaatctttgatcattgttagtaaaatcatcattttgttatataaaaaaaaaaaaaaatagtgagaaacactttgggctatttgaaaaagccccagcatacaaaatttgttaaccattcagaacattccacgtaggaaaattagtggcatttgcacgcgccgatctactcgcgggagagaatgatgact

SEQ ID NO: 28390 - DNA, 1528 bp, Arabidopsis thaliana landsberg
gaaagacaaccaaaattgcaggcattccagttccattgctctcgaaatttccatgatttgatgtcaaagacgaatcataaatgtaatcacaagaactgtatccagtagctataactacaacttggttcaactgatttaaccccaaaaccgcattaagaaacgcaagcacctacacataacagcagcaagctttctgcataaaaatcgaagcattgaacaaacaaacaatagattcgttagagacacttacatgagaaaggaactgagagaaggtaatcgatgtagtgctccagaaaagaggattcgtatcaagcaacaaaactagaagactaacatcgtctgcgaccaaaaaaacaatcacgagccaatcagacttgtttccagtttttgggatatctaatctacatacttatacgattgaggaatgtgagggtttcgaagtaagaggaatttaataataacctgaatactgcttagaagcaatggcaggcatagtttcacagacgattccaagtcagaatttcagtgtgccgggaaatcttcccggtgggaacgagatctgataatgctatttcagtgccgggaaatcgtttttttttcttctccaatatatcttcacaacaggtctttgagttttccgattacgaaccagagttaaagaatgaaattctcggatgctatagtaacttactgaaaaattcaaggatttttagcttatacagaaatctgaagtgatttggtaggagccggatccatcaaacgggtttggatccgaatcagatccgactataaacgtcgtatcgtaagccgggcttactaagcccaaatatggcattagttcaaatttttagataggcccagttttctttatgaactaaaaccgcttttttttaagggccctttcgtatttcctttgttcctttcctttttggaaaagaacaccaaaatctcaaggaacaaatttatttttcaaactggctactgatacgaaattcagtttattcaagctttatactatcggacgtcgatatattaattttaatggtaaaaatttttggttgaaatgttgtttgtttcaatactaaaaattagtaaattcacacatgtcctgatatccaatccatcctatgaaactatagtcatgtttggagatcgtcttgatatataatacatggggcataaaaagcttactacatttttttgggagtaacaactaacaaataaacaaacaagttttttggttggaaaaagaagcaaatcacattcataaaggtttgattgacttcatataatttgattgttattcatttgattgacttcgtattatttttattcagtattctttggatatatacgcgcatgacaatcgacatgctaaatacttgtaatccgtagggtcatgtgtgactgtccactaagaatctgaagatctaatcatagtttttactaaaatcatattaataattaacttggcaatattaatggcgatggccattggaaagcttttgcatgatggcctaaatataaa

SEQ ID NO: 28391 - DNA, 3910 bp, Arabidopsis thaliana landsberg
taccactttcaccaatgtatatcgtaaggtgttcgtgtttttttaattggcaaaataagaaaaaactagtattaattttgaccattgattttgactttgaaggaaagcattctttttccttttatgatgcataaatttgtcttgagtacttcccttgtagatttttcttatttgcctagcgcttgtttgtttgatgatgcgcacaatatcttttttccaattttttggttttttctttaacagctttacacaagtttgaaccttcagaaaccatttttgctcaatctcatagacagagagagacaatttacttagctaggttctaatagctcactgtagagttgggttttgactagcagaggaaatttctggtgaagtgtgacggctctcgaaggaaaagctctttatacagatccgaacaagtttgcatttttgtcatctaatcagataatctcgcttatctggaatttgcattattggtgatctgggttttatctgtttagtgttgaagcctgttgtccgagtatttagggttcaaattatagtacagtgttgagtgatgtgtggtttttagttggtgcttggaggttactgtcatactcaagtctgggaatttttgtttcttttttgtttaataatttctcttagtaaagtaagtgacggtgtttgttcaatttcagtttttgataagaagagtgttggtgaagaagatgttagaatctggtcttgggatttagatgactacacctgcacaggctcctagggaggaggtgtcactgtctccatcattggcgtcccctccaccaatggcgttgcctccaccgcagccttcgtttcccggtgataatgccacttccccaactagagagcccactaatggcaatccaccagagaccacaaacaccccagctcagtcttctcctcctcctgagactccagtatcatcaccaccaccagaaccttctcccccatcaccttcactaactggacctcctccgacgacgataccagtatctcctccaccagaaccttctcccccaccacctttaccaactgaagctcctcctccagcgattccagtatcaccacctccaccagaatcttctcccccgccacctccaccaactgaagctcctcctactacatcacccagcctgccaacaaatccaccaccaccaccggagagccctccttcactacctgcaccagaccctccaagcaatccacttccaccacctacgttagtcccaccatcacattcacctccacgtcatttaccttccccgccagcctcagaaattcctcctcctccacgtcatttaccttccccaccagcctcagaacgtgcttcaactcctccatcagattcagaacatccttctcctcctcctccagggcatccaaaacgtcgtgagcaacctcctccaccgggttctaaacgtcctactccatcacctccttctccaagtgactcaaaacgtcctgtgcatccttcacctccttctccaccagaggaaactctcccacctcccaagccaagtccagatcccttaccttctaattcgtcttcaccaccaacattgcttccaccatcgtcagttgtatccccgccttcgcctcctcgaaaatctgtgtcaggtcctgataatccatctccaaacaaccccactcctgtgacagataattccagcagttctggtattagtacagcggctgttgtgggtgtaagtattggagtggcccttgtgctgcttactctcattggagttgttgtctgttgcttaaagaaacggaaaaagaggctctcaaccattggtggtggctatgttatgccaacacctatggaatcctcctccccaagatcaggtaatcataatctcgtctacttttataaggcagttagtctttgccatccttaaatgtcttggcaagcatggcagaaagaagtctccttgtataattgattgtttgaatcttattaagacatgttactttaaactgaagagttcatagttattcagagattaagatagtttgtgtcaagagttcataagtatggatattgctatgtatattttgattatcatcagtatttctggattttcatctccatatctttgttattatacagattcagcgcttctgaagacgcagtcatccgcacctctagtgggaaatcgttctagcaatcgtacatacttatcacaatcagagcctggtggttttggtcaatcgagggaactgttctcatatgaagaacttgtcatagcaacaaatggattctctgatgaaaatctcttgggtgaaggtggatttggtcgtgtgtataaaggagttttaccagatgaaagagtggttgctgtgaaacaattaaaaataggtggaggacaaggtgaccgagagttcaaagccgaggttgataccataagcagggtacatcaccggaatttgctttctatggttggatactgcatttccgagaaccggagattgcttatttatgattatgtccctaacaacaacctttacttccatcttcacggtaagtaagatttctagacataaaatcacaaacccaaaccacatttacttattactatctttccatggtctttagccgcaggaactccgggtctagactgggcaacacgtgttaaaattgctgctggtgcggctcgtggactagcttatctccatgaagattgtaggttgctacaactcttcaaaaatttatggataaaagaatcaaattctttatgttattcttttggttcttggggactacatattatttgatgaatgattttaatggtaaaacatttacaggtcaccctcgtatcatacatagggacatcaaatcatccaacattctcttagaaaataacttccatgccctggtatacattcatctgctcttctgaatttgcaaagctgctgattaattaaaaatcatgggttctaacactggttagaatcttattcgtaggtttctgacttcggccttgcaaagctagctctcgactgtaacacacatattacaactcgggtcatgggaacattcgggtaggtgctggttaaggtcccatatgacattgctcatgagcaaaacttctttctgtatatgttccatcttataaacgattggtaaatgttttcagctacatggctccggaatatgcatcaagtggcaaattaaccgagaaatcagacgtattctcctttggggttgttctactggagttaatcactggacgtaagcctgtggatgcatcccaacctctgggagatgagagccttgttgaatgggtatggtataaataagcatttaaacttttgagaatggaactgtttcttcaatccaatgtttgtgttgaatgtttcaggctcgtcctttgcttagtaatgccactgaaaccgaagagtttacagctttagcagatcccaagctaggtagaaactatgttggtgttgaaatgtttagaatgattgaagcagcggcagcttgtattcgccattcagctacaaagagaccccgaatgagtcaagtacagaccttctcttaataagccagatttttttcttctttccaaatcgaaactcacatcaattttttacagattgtgagagctttcgacagtctagctgaggaagacctcaccaatggaatgagactaggcgaaagcgaaataatcaactcagctcaacagtctgcagaaatcagattgtttagaagaatggcttttggcagccaaaactacagtacagattctttaactcgtaatagttatataagcaaagatgaaaacttgtaaatatcagaaacaaaacacattgcagaatgatttttctgaggaagagatctcaaagcagaacctttcttgattaacttcaaattgggatcctcagtttc

SEQ ID NO: 28392 - DNA, 1621 bp, Arabidopsis thaliana landsberg
tagtttccgctgaatcactgcataacgcggtgagtgtcagtcaggcatactcgatagaggaggaggagacggatgagttggagtttctaaacacttgtaaagagtcaggtgttgttcatataatggggaacaccgtggtgaaagcaagaactggatcatggcttccaaaaaagattgcgattgattatgtttatgcatttcttgctaagatttgtagggccaatagtgttatcttacatgttcctcatgaaacccttttaaacgttggacaagtcttttatgtttaggtttgtttgttttttgctttgtaaaacaattacagagaaagggtaataaaaggataccaaatttaagatcataccactgaaactgttactggcctaggtcacgtagaagttctctattgaaagtcctgacgcaatccaatcacgcccaagaagcaatccgatcatgtaaaaaacttaagttttatttatcataacatttgcaacagtttagtaatttacattaagaactgtagttacatttagtaatttacattatatgcgaactttatatctctagttacatttagatcaccatatttatatttaagactttcatcataaaggttttcacttttcacttgttttggacaaaaacttttggtaattcacaacagtcaagtcaacatgtccgattcaatttataaccacaagaatatgatgtcttatttaggagaggtcaacattataatcaatctttaacttttccctacgcaaattcaactagaggaccaatagaaacaggtatacacaattgccatttttcttagagcttttcctagttggatattgtagcagattattgacctttcaacgctatgtaactatatcgttacgattccctaaaccgaacagtttaaactggcagtagttaaccgattaagcccctacagctgaaccgttgtacttgttgtagcatattataccaatatgaagtatctcactcaaatacaattttcccaatcggttcgttagaacgtgattgtcagaaatcaaaatcgtttacttttctcgccatagcactgatattttcgataaaaacaaatctgttcgcgtattgtactgttttattaagttaacttgtagcctttgtacggcttattatgctcatttcgacacacaacaaaaccgaaccggtaaaaaatatatgaaccggtttgttcatcatattacactgatatgtatattcaaaggaaacttcccatgcggaagaagaaaatatcttcattaagttacaatcacaatattcgttacaattttcttgacaagttaagttatataattaagggaaataggaaaacaaaattcaaaagaaaaatcaagactattaaatgaggctatataagtaacatgtacaaagaaggaaaaagggattcatagccaaaaccatgaagagcacgaacgacgaatctccttccttgggatacgacttcgccggagttagcatcaaggacggaaaatctaagccgccggcgccggtaatatgttacgatggcttgttcggagagagagacgtgattagaatcgtgctattggtcacgaccgtgacactttcttgtctattattctacaaatct

SEQ ID NO: 28393 - DNA, 6244 bp, Arabidopsis thaliana landsberg
tattatttgtttaaaagtaaagtttttcttccatcaaaatggaaaatgtgatctggtttttttcttagaagatattaaaacaatcggagagaggattgcaaattttttatttttgttaatttgctgtgtgatgggtctggttgattctttgttaggaaaagatgcaagaaaatttctcaaaaggaaagatagtgatgctgcagaagcaggtacgtcattattataacaacaattcatgaatctgcctccatattcttcatttgatttgcctcatcataattcagatttctcatgatcaaaaatgatgctttatttattcccacgttgtctctgttcttcaccgtttaagttaaatggttttgatcggatctttaatggttttgatcggacctttaggcttttttgatctgtttgtgaatttgtaggacgagctttggaagaactcagaagttctttgtacaatgagcttaaaacatcagaaggagctaaaaggcaacaacagagattttgtggccctgttgttgcaatgtccctttaatttcgttgttgctgttggaatcatccttgccaataaattagtaatttggtttcttcaatctcaaattcttctttctcttttttttatttactatgtgattgtaattgtaaggttgaattgtgcaggtgatgggaagagttggattcaatttcccaatctttctaacattgattcattataccgtggcttggattcttttagctttcttcaagtctctctctttgcttccaatgtctcctccatcaaagacaacacctttctcatctcttttctctcttggagctgtcatggcctttgcttctggactcgctaataccagtctcaaacacaataggttcatagctcaatcgctaaagtttgaatcaagattcatagcttaagcttgaaagcttttgttcttctttgtttccagcgttggattctatcaaatggctaagatcgcagttacaccaacgattgttcttgccgagtttgttctcttcaagaaaaccatttcttccaccaaggtttcgcttatatcttttacgacatgtcaacaaaacaatcaagaattcattacatgtttttggtgcttactctgttttttgcaatttgtcctcttacaggtcatggcattagctgtagtatctctaggtgtggcaatcgcgacagtgacggatctagaatttaatttgtttggtgcattagttgctgttgcttggattattccaagtgccattaacaaaatactctggtctaatcttcagcaacaagctaattggactgccctagcgtaagaaataagaatctctctcttttacttttacttgaggtgtaagcaatacaagtctcttaaaataaaggctttattgaatgtagattgatgtggaagacaacaccgtttactgtcttcttcttgttggctctcatgccatggcttgacccacctggagttttgcttttcaaatgggatttaactaactcttccgcaatcctcatctcggctcttctcggctttcttctccaatggtctggtgcactcgctctcgggttagtctttttgttctcttgctttggttggaagttcagtcttgaggttataaaatgctaactaaatttgttgtttcttacagggcaacatcagcaacatctcatgtagtattagggcaattcaagacatgtgtgatcttgcttggaggttacgttatcttcggctctgaccctggtttcatcagcatctgcggcgctgtcgcagctcttggaggcatgtctgtctacacgtggctcaatcttccggggaaatccatcgatcacatgtcaaacaagcagctgccaaagcaaaacgtcaccgtttcaaaacctaaagccgaggctgacgacggaggaggagagaccggagtaaccgtagtttctgttgacccacttctctccaagacgataactgccaatatcgtatagttttacaatttgattagactgccaaagagaaaaaaaatgagtttgactttttcttcttcaggttttagtttgtaaaattggttcagttttgatatcaaattagtgtagtaaagtatactaataaaaatattttgatatcataatgtgacaagagggcttggtgggtttatttgtacgataatgaaatagatggtgtagtttagaagtaatgtaaaacttgatgtgtattttttttttttgtcgtcacttgatgtgtattatgaggtgcaattagtaaatataataaacctttttgactttttctataatttcagaaactttaatgtagtaaagtgaaaacttgtggggaatcgggttttcggtgataaaatcgggctgacccgaacccggtttagtgcgagattccactgtccgtcgttaactattgagctaaatctcagaacgatttctcgatttgcttttgcgacattataattttcctttcaattgactcagtgagtcgccgatcgagttagaaatgggaatgggaagtaacggagaattgaagtatgagatctcccagaacgcgtacatcaaactcgttcttcactcgctgcgacacaagacggcggcggtcaacggagtcctcgtcggtagaatcagccctaaggacgacggagttgtagagatctcagattctgtgccgctctttcactctaacctcgctctccttcctcctctcgagatctccctcatcatggttcgtatatcttcttcttcgaatcgatttgattttatgagctttgaaattgaattttgaaagagattatgatctgattgcattggtatgtatattaaattacgaattctggaaatttttagttcgcgtactaagcttgagctgcatatgttgttataagactgttcttagttttctatatgtttgcttgattctcagtaaagtctcattgttgtttctattttaacatagaaatttcagatcttgaatcgtttgttctgtatctgtgtttgagagagatttagtgtttgtatctatatcctttatagaaaaaacttacggattcaggtatttttttgttgtggtagatagaggagcattatgtggctcaaggattaagtattgttggatactttcatgcaaacgaaaggtttgatgacgttgagctctgtggtgtggctaagaacattggtgatcacatttctcgctatttccctcaagcaccaattctcttggtaaagaattgtcttatcctttactttcaagtgcagcaaattcttgaatcgttaggttttaactatcttatgttgcacctttatgatgtttgtagttgaacaacaaaaagcttgaagccttatcaaagaataaagagcgaagccctgtgatgcaggttggtatttctaatcacgagaatgattttaaaagcttaggagaatatgaatatgagattgagaagttagtcaatttagtaatgaatatgagatcaaggccactctacaccagtatagcttcttggtatttgaaaatatggttttggtatattgttatgctcaatttaagatcaagagaaaatagtggaagactgagactctcaaatttcgtagtatatgctaatttatggttagtccaggctcttgtttcaacgctgcattcatttttcaaaattgcatcctaagcaaatgctgtaaattatacgatatacatgaccatactgtctacttgaattgtgctaccaaccttctcgacaccaagcttacatggtccattttaatcaaccctttccttttggtactttctgcttgatgcaaatttcttttgcagctgttaaaaggcctatttatcactttttatgggtttagtaatagtgcatgttgtatgtatatgctagctctgtgtgaaggacgcttctaagaactggagagtggttggagcagatggaggaagcaagctactcttaaaagagccatccgccaatgtagttttgtcagattacatttcatctgagaaatggaaggacgtcacagatgttgatgatcatcttgatgatgttacaaagtaagttacatacacgaactgacacaaaaaaagaagctaggacctttatgtaccagatggtaaatatctcactcatattcactgtaattgcagggactggctaaaccctggacttttcaactgaagatgggtatgcgatatagctaaattagacttttgctttcatcatcttcagtcgaaaaacaaaaaaaatctcagagacccttgtttaaaatttctcttgaatcttgttttaaatgttatccagctacgcagcagagcttaaattacttttaattggtacacatcttaaaccttagttatatcatttgaatgatatcttttggagcttgttcacgtgatccattttcgtctctctggttacattttgattatatagttggaatgaagaaagctctactttatttggctactgttcttaaacttacaaagggaatagttaaatactgaagaacatgaaaccaaatctagtgctttacattgttcgaatcccttaacttggagggttttacacagatataaggttaccaaagcgtttttcgacatcaacagttacccctttcaggacaacgttgcatctacatcaatcttaaaacacgggacaaccttcaacaacaacacctttggctagagggcaatgcgctagagggcaatggtcagaattctcaagcccccaccagtcaggtaagcttatatcattgttctggagtgcaaagaatatcaacactcccataatcgcagtacctgcatcaagcgctgcagagaggatgtagttgtgcctcgcccaccaagttttaaacctcctgaagatgtagtagttgaacacaacaccaacgatggcccaggaccagtaatgcacagccttggcttgtggcattgcgcttactgcagagaagatcaagggaacatggatctgttttagccatttcttctctgggaacttcttcgataggtaccagaagggaactggagcgaggagaccgataaggaagaaccagttcatcccgggatagataccttctttggtaaacattctccctggaccaatcactccccatatgattgatgcattgtagaacacttcatctccaggacaagtccatggactacccaccgggagcaaatcgacattacatatgttctcgacggatgtaatgagccaccaggttgttccgaagcagacagttgatgcaaccacagttgcaacaagctggacgatgaacattgatcttggaggaatcttcatgtagtgaccaagcttgaagtctcctacaaagtacaaggcttgagacatactgatgtatccgtatgtcttgaaagcaacattcgctagtggctttcctgggtataagtacccgatgatcagttctgttataacgttaagacccatttgctggtttgtagttgcttggataactccgataggcaatgtgaagaacaaggcgatggcacaggcgagtataagtccccaccatggaagctgaagctgtatgcaaagccctcacaagcatagagtgcgaaagcaaaggatataactagagctacgatggaccgccattgaggtgcggattgataattcttcttcatcaacctcgaatgcacatctcggtacttgtcctttgtaactgtctttgccttcttccacattccccatatagaccttaagatacaagcacaaaagaagattagagagagtcatcatataaaatcagctattcaaaagatgttggaagatccttactttccatcatagagggcaacatgagagatggtagcgcaaagagaaccgaagctgagtccatagagcaacgcgaacatcacactcaaatagagcttgctgtaaccgttgtaagcgtctagattgatatcgaaattcttctcattgaggatacgggtaatgttataggtgtgtccagtctgatcaaaggtgtgtgaagtatagaatggaaacttctgagcatcataagcattagtccagtagaagataggtagaacaatgtataaaaagatgaagaatcctccaaagaaattggcaatggcgaagaatggtacagccaacggactgcctaagaaaccagcaactgtggaccagtcaagaccgaacgaaccaatacctaaacccttgagcccagaaccgacaatctgagcggtcactgagctttttcaaatccagcaaacaaatgaaattgcggaaatggaagggaaaaggtagccgg

SEQ ID NO: 28394 - DNA, 2246 bp, Arabidopsis thaliana landsberg
gatgatcagcgaaacattaaaaaaaaaaccagatcaatcaagataaccataaatctgtaagaacatgaatcagaagagcgacgacagaaacaaagtatagtacctctttccatggcggatttgtgcctagagaacccaaagaacgttgaatccaaaattctgaatcaaagagagcgagagagagaccaagagagagtgagagatttagagagagattgagaacgagtgtagacgaatttgaatttaggagaataagagccgttggatctaaagaagctttgtaacgtctatattttattaccattcgttccacaaagaggagcgtcataatccggatccgaattcgtttattattcgtttcacttgaagtttcaaacctctcttttccagcagagagaaggataaaagttttcacaaattaagtaagacccctaaacttatattttatttataaagagccccaaatattataatttcacaaatacacccatgtgttccagttgtaaaagtaaaatctacttcaattgattcgccaaaggcttgcctcatggcttattcttcagtaccaagctgtttccatggctatcttctccatcgttgttcgttctccaccacacaatttttctcgggttctctctcttgtggcttctctgcttctaccaattcaagactaagaacatgtgtcaaattcgagaagtttcagggtgactctcctcttgaacagaacacttcagtttcttcttcctcttctgtttcacaggaactaccattagaagaagctcaagaccaactagaagaagaagaagatgatgatgagttcagtaattttgtccgtttgctttctttattattcgattatactttattttctgtgaattgggttttcattgtgaaggaagaaccattgaattcaattcaaagttgatcacttttcatcagtttctttgttatttttgtgtgactattggaacataaggctaaaaaagatgtttttatcgttactgtttttcagctgtttgcctaatgatttggaaggagctgttaggcaatcaggtgaagcaggtgctgcgtttgtgaactcaggaggaaatagagctattgtaagggctagtagtatacaaatttgtaatctttggtggggaaaaagaatgagatttggtatcagctttaagattctgactctgaaatcttgtaggtggagcttttgattcctcagctgcagtttttagacgatgaaggtgcacaagctgaactttgggacctttcgcgtgttttcttggagactctcattaaagaaacaggttgtgaggtaagctaaaacagtttgtataatacctttacatgaaacattttatcagtcgatgactcgtagcgcttgaaaatgttgttgccagagagttaaagctgtatttccagacgctggagctgctgcattgctaaaataccggtggaaagatgcaacgttcggatttgctaggtaagttggcttacatcttgagagcttaatagtttttcgttcgaaagagtctgttagtaatatgcagtcatgttctttgttgtgatgcagcttaagtgaccggaaacctgtggagaaagaagatgagatcattgtcatggttgttcctgattaccaaatgctggaatatgttgagaaaattgctaaagggcttgctgatgacccggtaactaaatctgtcaaatctttaatttcaactttgctaagaacctttagtactaacattaagaaggcatttctttgtgttctttcaagccaaggcctctcattatgtggaaccctcgtcttataagcgaggaagtcggggttgggtttaacgtgagaaaactaaggcgttacttcctaaggtaaaaggcaaaatccttaatgagacttgacaaggtttttgacgtaacatcaataactgttcttttcattttggctcttctagttcattcactacggtttactctatgagacctctggctgctggtgctgttttcaggtgttatcctgggtaagactcagacttggtttttcttatttgattaagtccatgtagatacggtttaacgagtacaagctgatcattttctatcctcatttatttttctagtaagtggaaagtcttctatgataacaaagacagaccaggccgatacctactcgctaaagaactcattggtcgacctgatgcagaggatcttgaggtcaattgagtactagatttaattgaggtgaactgagagca

SEQ ID NO: 28395 - DNA, 1349 bp, Arabidopsis thaliana landsberg
ggattcatttccactgctcaaacattttccactggcgaatattgttaaatgctataactacattatttaagaaccaacaatatctgtggaatggtttcacaaagagaatattcctagattgagtgcataagctcattgaaacataaccataagtgaaaagagagagaacatagcatgctgattcttccatgaacaagaagaattcagctgagaacttaggatagacagaaagacgacgaaatggaattgatagttgaggcagtaggtaaaccattggatgacagagaaatagatgtccacaaagcttacttgaactcaaatgatggcaccggaggagcatcaaaactctccaacacctctgttttactttcactgcctggttgcacctcctcctttttcttatcaaaaagccctccaaaccatgatgatgatgatgatgatgatgatgaagctgtattctggttttgactctctgaccttatctgtgcttgactctgcatctgccccatctgcattccttgcattccttgcatcccaggcattccttgcattccgggcatcccaggcattccctgcattccctgcatcccaggcattccttgcattccagggtcctccatcatcatattctgaggctgagccagtaccttgttcaacatgatcccagctccttcaatcaaagcaagcaaaacccctccaaaaatagctgatctcgaagcagcaccagccccttgccgcatagacagaaaccctccagttgcagcaccagcaatgatagagttccaaggatcctccttttgccttaggtacaccatggtacagtcaaatgtcgagaataaacctccccaaacagcaaaactgcctccagtacgaggtgcgttcatgctcaccgattgtgttcctccaacaaagcgactacctttaggagaattgtaagtccctttaatgaaatgaaaggcagatcctccaacagctcccataccaaaagcaccaccgatatcatcgagtatacgatcagggcaaggctcccgagatgtctctggtgttcccattattagatgcctcaggcaatgattctatcaaacctgtaatcaaatgaatattgattcattaacaaatagtaagaaatttagggttttgtaagtcactgcgaaatcaacaaatagatctctgactaattccaattaaatactgaacatatacaatcgaacgaagaagattagggtttatcaaagatccgtactttacgatcgaaagcaaaccatagaaaaaggtggaaacttgtgtatagaaatgaatctaagagaattgagaaagcacttgttgtgatgatagatgagaatcgaaga

SEQ ID NO: 28396 - DNA, 4782 bp, Arabidopsis thaliana landsberg
  unsure (1)..(4782): unsure at all n locations
gttccttatcaagctggtcgccaagctcccaatcgttatggatcccaaacgttgttttaaaacactgaagaacgaggttgttgctagaagaccaaagacatatgagagtaaaaaagcctttcatgaacatttcagggctttctttgatcaaattggtaacgaatccatgaaagcaaatccttcagtgtcaactattaatatttgaaacaaccaatggtaaaggaggactgaaaactggttggtattaaaaaagagacaagcttatgatgatatctgattcaatcggtaagcttcctgaaagagcatcctactgtgagcttggccttgcctcctgtaggttggcacagaacgttctgacactttccgcataccacgactgtctgtgagtgactgaaaatagttgtgctgcagtaaaagaacaaagcccataataagttttaagtttcttaattttatcttatgtaacaggaaaatattgatttcaaatcttacatgttgatacagtcagagcacctaacaagctacagtaaaattaaacaaaaatcagagtccacagaaagagtagataaacttcatacaagtaaattagaatccgattaaaaaacttgaagtattacagtttctaaacagagagatttggtttttacaggattctaaataaggagaaaggtttcaaagttttattaccatgaaataggaatttggtgatggaacaagacgcttgagcttatgcttcctcttctcnnnnnnnnnnnnnnnnnnnnnnnnnnnnnnnnnnnnnnnaagaacctgttccatatcaacaaataataacaattaactttgcatctcatcagtactcaaatcaaatgacacaaccacacttctaattagcttacttcccatctcgttaccgtgattaaaagccttataacaaaatcaaatcaggagatgtaaatggagagcatccagtgcaagagatctaaccatcttcgcaagactctcaagagacgacggcgaaagctagcaagcaacggcaacaattcgcgagagaggtttttataattactcactgccggttgtgaacaaacgaggatgggaatatattaggtttacttagttacttggagacaaattaatctgaaaatcttctagaatgggcctaatgggcctagagcatctacatagttaagaaaacacaacaaatttgacctttcagtcaaagtagaggctttatttacattctcttttttttttgaacacgaatttacattctcttttatccataaataaacaaacaaaaaacatcctaaatttgtctagttttttttttttttttttttaactttttcttatgtaagtcttgtttccaaacatttttcagtatgtagagagaatttcaatgatatactaatactacatccataaggcacactgcattaaagcaaccatgaggtgaatctgattctggtagctaagattcataacatcaaaactcctcaattacgaatgatgtggttgcaaatataaactcaaagtaataacaatgagccagagattacaaaggtttgtggaatgttcatcacaagtagttggaaacgatcaaaatgatcaaggctctgctatttcaatattcatccaccgtgcagagtcgaaatgaaaactataacatctttatcttctaatgttgtatcgagctgaccactaagttcccaatcgcagtcattaaccagcacgagaactccaggcctcctgcgtttatgaattccaaaccaccattgttattaaacactaaaaacagagttcttgctggaaatcaaggaaagaaaagagagaagctttacacagtatctcctttcatgaacatctcaggtctctctttgatcagatttgtacgaacccatgaaagcaaatgcttcatggtaaactatactgaatgaaacaccagtgagaagttttacatgactataataaactcaatggtatttaaaaatcatcaaaagagagaagcttacgatatcagaatcattgagtaagttgatgttaactttatgaatctttacggagtcacagagcaattctaaacctccactgcaggagatcaacaagcacatattttcatgttaataccaatacgaaactctcattcactaccaattgatctgatgatgaccggaatgtaaaaagtctaaagtcatttatgattttcccaatccaaaaatcattactttattagcactgaataagcaaaacaaagataggcttatgctacaaactgtgcattataatatcccaagcaaatagagaaaccataatctaaagcactaagttttcagttttttcccgaccaataaacaggcattgacatttgagagtcaatcaaatgaaatcaaaatataaaccactatgagagtgggcaaatgacacaaacgagtaatagtgtacccgaactcaagagtaaattgcatcttcaatgaagttttgcggtaacaaaacccttcttcttctttttcttcttctccgattctctccgataggatctccgctttgagttcacgcaaaactccatacgacgtcgttttcgttttcttggtttgggcccttaaagttaggcaacatgatcaccaaatatcaaagcccttcttaaaaatacccaaacgcttattgaaacagaatcacaacagtttgttttcttaggcaagaatcaaaacagtagacattctccggcgtgtgacattcaacacgtggagataggacgagaacgagatttttccgcgtcatcatttaaaccgtagatatcacatagaagaatgaaagtttccgccacgattccgccgaataaaaaaagaccatataattcgacagttttcaattgtggctatatctcatgtgacattcaacacgtggagatagtacaagaacgagatcttttccgcgtcatcatttaaaccgtagatatcacatagaagaatgaaagtttccgccacgaatccgccgaataaaaaaagaccatataattcgacagttttcaattgtgactatatctcatgtgacattcaacacgtggagatagcagagatctttccgcgtcatcatttaaaccgtagatcatagaagaaagtttctgccacgaattcgctgaataaaaaaaaaccatataattcgacagttttcaattgtaacatctcatgttagccctgggcatgtggatattcggttcagattcgggtctatatatacattttcgggttcagatcagttcactttgggtattaattgaagaacccgcgaattaaccgaaaatatttttacccatttgataaactgtattttgggtgtctgctattattttgaacattttgtttgtagtttgagtgttttctaacgttcgtttggtgttttttggtcaagttgtgttgactagttttgacttgtttggtattttttactcaatcgtaattttgagttttttttactagcgctagtttgttatttttgttggttttattcgcttttgagtgtttagactagcgattgtttggtattttttaatcaatagcaattttgagtgttttttgactagcgattgtttattgttatttttgtgttttcctctctacgttcactctctgtgcccgtgttcaccctatcattcatctattatgcatatgagacacattcatgccgcacattcacttcctatcatacatctattatggatttatgcatgagacattcacaccctatacatacatctattatggatttatgcatgagacattcacaccctatacatctatacatccttcataaacaaaaatacacatattgcatatacacagccgtgttaacaacttcaaaaggctggccagtggccaagcgcttcaatggggaaactctcggacacacacagtcacttgtccaccctctgcaatatcaatagaaatcttcaatacaatttttttctctactagtcaacaatttcggtacatgaataagtacgtttcttacaaaaaaaaaaaaagaggaaaattctctcttggttttcacaacaattataaacccattctacgttttcttagacataacatataaacaactcataaaaccatcacacataaaattaatctcacatcaatgaagtcatcaagtcaatatactggatgtacaattaacgaacaaacatatataactaaaaatcagttttattaaagacgtacatatatatatatatatatatatatatctaaaaccagtttacgatcagagacacatcattagagtcaagatataaaagggatttaaaacgtttgttgaactccatattttttttttgaaaattgacgaacaaggttattaacggagactaacaacaatcttttaatagtaaacaaactatagattatttacctgtaagatgttgcctttatgtttgcttgagagattttgagtgacaacacaagtgtgaggacggcgaacagaactaagatgataaaaacagagtgtatttaacatttgtaagaaaaagaacaaaagaacgagtnnnnnnnnnnnnnnnnnnnnnnnnnngaaagtagtacttatagagtccattatcttaattttccattaaaaataataattcaaacagtcataaaatgttaccgtttcacaacgttcgtttattcctaatctcaaggcagactcgtgtaagaataagagtccattatcttaattattttcattaaaaatatctaattcaaacggtcaaattaaaatgtagaaaaagttttcaatttaaaatatttattcaaaaatgttacc

SEQ ID NO: 28397 - DNA, 3023 bp, Arabidopsis thaliana landsberg
  unsure (1)..(3023): unsure at all n locations
gaagataagctatataacttcaaaatatgcctatcttttgtttatagtttatctatttaaaatggtaacgggcccgtaaacctccaaaaaaaaatcatacatcaagagacccaaatttattttggatgatttaaaccttattttgttattttattacttttaacaaattaaaatttgaagatactgatttattactaaaatcatgaatatcaacattatattaaaaattatattaattagattcataaattataaatataataatttctgatagactaatataatttgccataaaataattaaaactaagactttcaattttaatactttctgtaactttgatcaaacaaatttttatttaaatagaatcaattttttaaaacattaattgaataaattatatttttttttgtttgtatgtacgagatttttctttcagtccattaaatatgtaaatccatatatatatatatatattaacaaataaatgagaagctgaaatgacttatccatcattattttgtttgaaaattctataactcccgtcaaaccaaaattaggcaattttcattttttgaaaagattctctcctaatttttgataattttttccggattctatcaattttaagaacatttaaacttctactatgatattatcccaataagacatatagtaacgtatattgacatctattagattattaccaaacatatgtacacacacacataaagcttgattgtataaaattataaatatatgtagccataacacaaatacacacaaaccccaacacacaaaaacgcttgtgaaaaaaaaaaagagaaacccaaaaacagaacaaaagaaagaaaacaaaacgttcttaagagtttaaatggcaaaccgtttcctccgaccaaacctcatccaccgtttctccaccgtgagtcccgtcggtcctccgaccaccgtcatcccagaaatcctttcctttgaccagccaaaaccagaagttgatctagatctctccgaccaagctcgactctttgcttctgtcccaatctccaccctcctccgctcaaccgcaattctccatgccacgtccataggccctatggtcgatcttggctcgtggctcatgagttccaagctcatggacacgaccgttacacgcgatctagtactccgtatcgtgaaagggacgttttacgaccatttctgcgccggtgaagacgcggcttcctcagcaaggtgcgtgagtagcgtgtatgagtcgacgggacttaaaggtatgttagtgtacggcgtagaacacgctgaagacggtggcgcatgtgatgaaaacattcaaaaattcattgaaaccgtcgaagctgctaaaaccctaccttcgtctcacgtaagacattctcaaatctattttatttgtcttgtctcaaaatttcatcttttagactttttctatacatttctctattttttccaaagcaaactcttcataagttttcacggtaatttgttttctttctgttttggtttagaattactttaattattcgatataaccatcactttaatactgatcaaatatttttagaggggttacatatataatcactttgtgcaagtcggatctacaaacaaaccactatacatgtttataggtgtagtcgtgtagaggcaaatggagagaaatgaggtcaattgaccccaatagttctttgctatgtttatattaattttctgttggataatttgacacaaaactacctccaccagttcgattcttctatatgttttcagatatttttattttttgaaaaatgatgccactagattttttgttttcaatatctgccactccaaaaacgtggagtaaccgaccaattataacctttataagaaatacaaatatataataaattaaattacaaaagagactaccccgtttaataaaccttaaaaaacaaaaaaagaacaccaacttgtctgatttttttttcgataacgatttcttctttgtttgttttaaacgacttgtctgaattttagttttgtgttttttttttgtctgtaaatatgaaataacaatcaaagtcacgtcggttcctcgtcagacttcaaagttaacacgttaatcacgcaatgaggacatatttgaatcagaattgtcaaccacacgctaggaatattcctcgtttacaataatatcggtttaaaccggttctactgctaataaactttttattgggttttgtctgaacagttaagctcagtggtggtcaagatcacagcgatttgtccaatgaatgtcctaaaacgggttagtgatttgcttcggtggcaatacaagaaccctaatttcaaacttccatggaaactcaattcatttccggttttctccggcttaagtcctctgtaccacacaacgtctgaaccggaaccattaaccgtagaggaagaacgagagcttgaaaaagctcatgaacgcctcaaatccgtgtgtcttagatgtcaagaatcgaacgtaccgttactaattgatgccgaagacaccattctccaaccagcaatcgattacatggcgtattggtcggcgattatgttcaattcggataaagatcgacctatagtttacaacacgattcaagcctacttgaaagatgctggagagagattacacttggctttacgagagtcagagaaaatgaatgttcctattgggtttaaattggtgagaggtgcttatatgtctagtgaagctaagttagcagattccttgggttacaagtcaccggttcacgacacaattcaaaatacacatgattgctacaatgactgtatgagtttccttatggagaaagcctcaaatggatcaggcattgcggtcattctagctacgcataacacagactcgggtaagacattgaaccatacttattactccataaaaaaatcttacacatgaaaattcattntttctttttatgatccatgataggtaaactaggggcaagaaaagcaagtgagctagggatcaa

SEQ ID NO: 28398 - DNA, 2440 bp, Arabidopsis thaliana landsberg
atcaatgcatatgccaagagctgttgtggttgttcatatgagatactacagttatacaaaaaagactcacaactttccggtaaatgagagattgccaagtatcggtgggataggaccaacaagctcattgtcactcaaatccctgtgaattgaataggattcacaaagtcagacgagccaaattcaagaatgtactttgtcgttacttttccatatgaattgaacttacaaaacagcaagagcctgcattagaccaataacttctggaattctacccgtcaatctgtttccttgaagtgaccttcaaaaagtaataatacacaattcaataaccgcatgttaacaatttactgatgaaactaaggtaaaagaggctcaatactcacagagtagcaacttggaggaagccgatattgtaaggaatctctcctgttatctgattataagatatgtccctgtaatatcaaaaggtatgagtccaaaattcactcctatagtggaagtctaatgtttaatttaagatggcacatacaggatttgaaagcttgtgcaatttccgatgctctccgggatggttccagttagattatttcctctcacatcacttccaacatcaaaacacaagttaaaaaatataactcacgacttgaatgaatcagagaaggaccaggatctatacaagactcaaaagatggcagagcgttggatccacttacaagtaccacaaaccggttagctgacacatatcagaagataacgttccagtcaacatattccctcgtaatccactgcagaaagaaagtattagatggagaaaattaacttcttctatggtgtagactatattgagatcagagaaaatgactctgacgaacttacagatactgcaaaacttcattccagtaaagcaatctcgatatctcacccgttagatgattgccagcaagatcactgcaacatcatgattggaaaaaagaaaatgagtaagttcaaaatctattcccaaattttgattcatgagtaaatgatgtaactaaagaactcacagtcttttaaggttcggaatctgggttaaggttgctggtacaggacctgtgagctgattgttcttcagattcctgatacatccacaagttcaaaggttcacaaaaatccactcgaaaaaaaaaaagaacaagtagacaaaatttgaactttaatcggaaaaacaaaatgttgaagtataacacatacagagtttcaagctgcttgagtttagagattgagaaaggtatgtctccatataacagattctcggacaaatccctgtacaacagaggatatggacgtcaaaactaaagacatgaaaattgaaaactcaaaaaaacaagtttaataagacttacagataaacaagagaagcacagtttccaatctcatctggaatttgacctgctagtttattaccttgcaagtctctgcaattggaaaaagcctttatgaacaaaagctacaacatttcaaagttcaaacatgcaaatcaacagagaaagaaagggaaaaaaaaccattacattgattgcaaattccgtaggtctccaatagctggagatatctcccctccaagattcagactggacaaattccttcacaaagtaaaaatagaaaaaaagcagaatattacaagaccacaaaagagagacatttttcaacaacacaagaattattattgaactcaaataagattcttacagagagacaacggagtagctaacgttgtcgcagaaaacacctcgccaagaacacaagtcactgttgtgaacatcgtcccaatccaaaagcatattcactaagttgctgaaagagccttttatcgccatcagagctttccctgtgggttttcaaaattcataaatagactcaactaggattagtaataaatcatttgaaacgcggaacatcagtcacatagttaaatatacataaaccaaaactaaggaatttctgtaaatttcatgtcctttctctccaggacactagggattaagcttcgtttttttctcgggaaacagcttgaaaaaaacacaaactttccatggtacaggaacaggcattctctgtgtactaatcatgatcaaatttcttgggaaatggagaaaagattgcatctttatatgcatttgatgaagaacaagccagagctaagtattgggtatgaaaaagctttcaactttaactctctttttatggggaaaccaaatgtttgacataaaccaaagattttatgtcatgataacttctaacacagacgattttagattcaaactttcagaaaaaatcagagaatgggtttaaggagatatacctaactaaaccctaatttttgaagcacataatcaaaattttaaacagagatctcaagaaaaaagtcaaaaagggagagagttagttttttcaaacc

SEQ ID NO: 28399 - DNA, 1753 bp, Arabidopsis thaliana landsberg
tagacgatgatgatgaacattgctcgttgttttatgactgtggttggaaggtagtgttatgcgatcactagataggcactgatgatgatgattatggctattatgattatgatgattcaagaaagtcatgatctcttatgagagatgatggaataaggttattttgttcttttgactgataaagattttgtttaatttaaatcttgaaagaatccattcttttggtgtttactaggacatacaaagtaccaaaaaaagttgaaatctctgcaaatgtttctttagattcccctactggaataggacaaacaagaaacttaacatcgaaatggggatgatatatttataaaattgttcccacacaacagtgtttagtataccgtacaggactgaagatcttcttggacaaaaagatggcagttagtaccagtttataattgaaaatcagccaataatgtaaaagaaaagcatctcaaacagagaagaataagacaaggctataaaaaaagagaccaagttgtgggactttggagctaaaatgggtcatcgaaagatagcaacttgtattgattcgtgggtccagtgacagtgtaattgaaggaaggttcgtagtagcccaccacagcttaaaataattttttaaaaagattgtgcacttaatggttatggtacatccctctcacgtcctactcaactacacacacttgtcacgtgacagtgtcacggtgacactctgtaatctgtacaattaagtagactgacgcgtgtggctttcaagcgtaggtaaaagtatctcttctggggccaacccaaatcctgctacagaggtctcgatataatgcttttgatgcagcagattctggttgggtcagacgaataatggaaatgaagctatattgggcctaaagaaaagcccaaaaacagaattagagtccaactaactgactaagcactactggttgacctgaaagccgtagaacaagaaagtctagtgagatatgctatcagatttcatacagtttcagttttaagaggtgaatttcagttataaaggtgtaagaagacaagaaaaagaaaaaagaaaaaaaggtgtaagaagagttctttgcacctaacatgtataaaccaaagagtttggtaacaattttcgactgcataaggattagaacacaatctatgaggggagccttagcttagctacaaataaaatcacgaactggccgaagcatgaaggatctgaaaatgttctgcgatcctagtaatactataccaattacagtttaacgggaaggatgttttagcctattaatatgccaagcctgttcctttggatcagatagtttcttttaaatagataaagatagaagcagtgtaagaagaaacagagctaaagaaatgttaaagaagaagatttactcaaacagagctaaagaaatattttgtgtacgaagaaacagagctaaacaaacaaacaaatgagaaaaaagaagcaactatccttagaacagcttagtgtctccaaaaatataactttttaagacgaatgatattcatgagacaacaaagctgcaaatgctaagatgcaaacaacaaaaactgccaaaaatcttttcaaagactaacataagaaatgatcataagttcatagcacagatttgacatcctaatgaacaaacattggtaaacaatgtaggaagaccgagcctaacaattgaaaagaagaagatttcttaaacagattattctacctttt

SEQ ID NO: 28400 - DNA, 1061 bp, Arabidopsis thaliana landsberg
aagaaaaatagatttttagtccaaatttattcacaaataatagactagaataattattattaacacaaattgatattgttgacaaaaaaaataaaatccaagtgaattattcatacaaaaatctaaatattttaattatattcggcattgtaattgggttccacctttttttgttgttgattaattgggttccactaaaaagttgtatgaaatggtaaaaataatagaagaaactataataaaattcattttgtatatatatatttaactaattgggctccataaattcgtcaagcctttttgcatagtaaagagactttgggccgttattagaggccttaatcagatacttcccgggtcgggtaagatcctcctatacgggtcgaatttagggtagatatttttaatttattttttaattgtttgacatgtgagaaacagagacaacccagaaaaaaaaaacagaggcttaagaaagcaagggtttttaagcgagggtttaaggcggcttcgtcgtgtacgcttcactcaccatttgtttttattttcttccgtctatgaaactcttcccaatttttcatttttctttgctcatgcgatcgaatttattcaatctcgagttggttattgttctggtttatcgattttactcaatttttaagttcgattgatgtccagtgctcaaaccccactgttcttggcaaatcagactaaggtattcgatcacttgattccattgcataaaccctttatttcttctccaaacccagtttcccaatccttccccatgtggagaaacattgctaaacaagcaatttcgaggtcagctgctagattaaacgtcagttcccaaactcgtggccttcttgtgtcttctccggagtctattttctcgaaaaatttgagctttcggtttccggtcttgggatcaccatgtcacggaaagggttttcgttgtttaagtgggatcacgaggcgagaggagttttccaagagcgagaggtgccttagtgggactctgctagagggtacacgagtgtagccgaagaggaggtcttatc

SEQ ID NO: 28401 - DNA, 911 bp, Arabidopsis thaliana landsberg
acacatctgaagttgcaattcccaagacgacgttttgaaaagaaaaagaaaaattaatcatcagtctcttttgatcgcttcatgaggttttttattgtatacgaaaccttcagaaaaaatacatgtatccatgcttgttgttgacgtcaaagttcagttcatcaaaaagatcttatctaatgagaaatgctttttatagaagtgtaccttaaaaccttgaattaaaaaaaacattgtattgtgttaagcacaaaaactgtggagggatacataatttgaagagcctctgatagtattaactcattcttcgctatttttctttctcctgggctcactcaatgccttcttagcctttgcccactctttcaaagaagtcgagcttctcataaatgtgcaagtatcccccgacccaacctttctcttaattatcttcttcttcgcacccaatttagctccttcactcacattcttaccattcagacgctgccgattctcatctaaacttctcacaggggtactatccacagggactcccgcagccacaaaaccaccgctgctagatgcgtaatctgtttgtttcattgcacttgcagtctggttagagttggagaactggtttcctacattgttgatcactccagctgcttcgcccttgtctgaagttaaatctgggaagagttgagttatactgaatgaagaagtatttttgtcgctaaccagctgagtccacgaagccttctgaagccatgaagaacctcctgttgacttgttactagctttcagcggtcctttacccgcctcttcttcatctacaacattttccttcacgactaagctttccttttctgcattcaaatcctctgctacattttcatgcttctccacattcgacttgccgtccacactatagt

SEQ ID NO: 28402 - DNA, 1727 bp, Arabidopsis thaliana landsberg
  unsure (1)..(1727): unsure at all n locations
tatgttccttaattacaagttcacaacatcaaaactccccccaagaattaaggagctggcgcgtgtacccacgcgatatcaaacgcgtccgtaattcaacaaaactctacgagatgcgtacgttagcccaaccaccgtcaaggctaatctacgctttctcatttctaagccgccgctgattaaaacgacaaaaaggacacaacggtaattaaaaaaagagtctgtttacctgggataaggcgagcctttgatcggtttttgtccgtactttctccaggcccatgaatcggacggtggatatacttcgcctctgctcttagatccttccacgtcagctatcggaactgagacaactctcttctctacgttcctcctactacacaacaattattaacattttcagatcatttatcttgttttccaaaacaattcgtaataatagccaaaaaaaagttcacaaaccttttctttggagttggttttgagatctttgagtcttcacaagaagaaggagattcaggaacgacgtcgttgtaagtctcatcttcttcgtcatccgattcttgaattgctgctctacgatgcatgattgatctcgaccgtccgatttcgccggaannnnnnnnnnnnnnnnnnnnnnttgttgttgttctgttgagagccggagagggtggtgattaagaaggtgattagtgagagggttttaatcaatcttgatgtgattattattctctacttgtttggggacgtgcaggcaaatatcaaaggtattatattgttattatatcggtcattgctattttatttgaataaagatatgaccagctgttttgtagtggattagtttatttattttttgaaaggttctcttctctcgtggaattttattttattaataccatgaggtttgctaatcaaattatttctttaattagctggacattttgattaagtccatgcataattatgcaaatctatattataattatccgcatctgatctatagactgtgatctttttatttttttgctgtccatctaagaaaaaaaagaaaacattatgctcatttttgtaatttccggaataaagttagttgcaacccatctaatgatctaaagctggttaattatatgaactcctaactagagatgttgtaatgcgattaaagttcaaagaattagtttaaacttttaagtgaaactgtacatcggttaagatgatagtagttcttaggctaaggttagtgaattttcccaaaatgcatcatgtttgtgaacgtgacatattattcttgtatatcatgcttacttattttcttcttattgtttacgatttatccattttggactaaatctatattccattgaaaattaaccttaatttgaatcttatgtcaaggtcattttcataagaagtttctgttatttaaaaacttgatgtacaatgttctcttattctctgctaagcttagttttttcgtatatatccccatccaagatcttattgactcctccgttttaagaagtttacataccgcgagaactctcttttcattggaagctagaggttaccaaccctaatatataaaatgacattgagtaattcattatttaccaacaagttcacatgggtttaaccgaattagcaaacaaaaaaaaatctggtccaaaaaataagtgatcagaggtccaaaaaataacgtgcaatgaaatcttgataccaaaaaa

SEQ ID NO: 28403 - DNA, 1787 bp, Arabidopsis thaliana landsberg
  unsure (1)..(1787): unsure at all n locations
cctatagaagaacagatcacagctcaacctcaggcttcggttcaatcacccgttcaagcacaacctctgcacctgacttgcgagaactcaaaatgaaatctgatgagcaagaagaacccatagagaagctagctcagacagtcgaggaacttaagagtaaactggatcagatgcaagagaaagctcaatcaagatacgggaatgacactatcccgagaaaaaagattacttcaagatggtctgaggagatagattatccaccagaagacaaagaggcctatttnnnnnnnnnnnnnnnnnnnnnnnnnnntactcatctctcaagagaggatgctgaatatgatgatgagatcagagaggactatgcaaatcctctctatcacccattttcttcttaatgagtgtgaggagtcaagctagagactttaaacaagctcacttgggaggaattcccaagactgtttctgtaaataaaacttttattttcttgttatttttgatttgtttttggctgtgtttgtgattctcatgaatagagaaatagcgtggaggtagagtaaaaatttaaaaattttactctacaaagcaacaggggatcgagtatctctgaaattcaagaatttaaaaaacttctgttgcactcagaggccatgaggtcgagtaagttggtcgagtattagtgatgattttaaaaccaaaattttgaaataatacttattctcgaccaacagaagctacagagacttgcagggaggttaacaagtttatagaggattacagaaggttctagtagacaggatacagtgcttcaggacaaacagaccaagtacgggacaccttctctcctctttgtccccccaggcgtttctagtgataaggaaatcccaagggttcatcatagccagtcgatccaacctcatctcttcccaccgacgccatctctacctcacaactctcactcgaccaaacctcactcgtcatctctctcaccgtctctctttcactcgattgcgacgtcctctccaattgccgtttactcgaccacctgaccttcaccgtctctccgtcgccttcgttcactcgaccttgccgttccagcttcaccattcctcacagctccgtctccttctcactcgaccacaactcgacgtctccgcgcttcatcttcatttactcgacttcgccggagctcctcgccgttccagctttgccatctctcaccgctcaccatctctccttcactcgaccacttcacgcttcgcctcaacatcttcgccggagtttctcgtcattcaccgtgcttctgtcgcctccgtttactcgacctcacgccgttcactcaccgcaagcttgactcggctaccaaggaacttgcctctccctcctcaccccctctcaaccactcgacctcattgttgcatctctaatcaaaaccgccaccgtcttctctccattcgccgtttactcgaccaaactgccactacaatcaaccgaacaagcctcgccaccattcactcaaccacgccgttaccgtctctcattcactttcactcgaccgcaaaactcgaatccacaatttcaaactcgatcgatttactcgaccgtgtactcggccggtttagtgtttgcgcttattgaaactaacatattgacgtttagctttgaggtgcatttttttttccaggaaatcaatataagtaactacagccgcgagtcctctatgaatgcggattacaaaatcgaagaagctgagtcttggtcaactagaccggagagagagcagcagt

SEQ ID NO: 28404 - DNA, 3429 bp, Arabidopsis thaliana landsberg
ctcgctagttcgtggtcaagggcctagttaatgacacccttattttttttctttgcagtcgaaaaatccagttttcattaaccatgcttctccttggtgttggaattgcaaccgtcacagatcttcaacttaatatgctgggttctgtcttgtcgctgctggctgttgtcacaacttgtgttgctcaaattgtatcctatgcctagcctttggtttctcattgctttattctttcacctttctatatatcttgtcttaaaccaattcgatgctgttatcttaaccaattgtacacagatgacaaataccatccagaagaagttcaaagtttcatccacgcagcttctgtatcagtcttgcccatatcaagcaatcactcttttcgtcactgggccatttttagatgggctcctaaccaatcagaacgtgtttgctttcaagtacacttctcaagtagtggtgagactcaatttcccggggattctaccaaacttattaactgatcttcttgcttccatgtcgatcctgcatattaacgagtgcttctttgttgattgcagttcttcatcgtcctgtcttgcctcatatcagtctctgtaaacttcagcacatttcttgtcattggaaaaacatctcctgtcacatatcaggttctaggacatctcaaaacatgcctggttctagcatttggctatgtgttgctgcgagacccattcgactggcgcaacattctcggtattctagtggctgtgattggaatggttgtttattcctattactgctcgattgagactcagcagaaggcaagtgaaacctcaactcagttgcctcaggtatatttcttcatctctctgttccctctaatatatttctgttggtaattagatgagtccctcaaatcatattcctttttatagtaccattgattttgcaattagattgctataaaaaagcatcagtatcataggcttttttcaggtctatctatatatactgacttgttatattgcttaatttggtttactcgggtttgtcagatgaaagagagcgagaaggatccgctaatagcagctgaaaatggaagcggagtgttatcagatggcggcgggggagtgcagcaaaagacggtggctcctgtatggaactcaaataaagattttcaagcctaaaagctttgatcatcgctatttttttatataatatcaaactctctttgtattgtccccaaaaaaacacaaactttttaatttctctttttttttttttttgttccctttttaaatatgcatagcagagaagtaggggagactgaaaaatcaacaaaccttccacaccatatggaaaaaagaagaaagtagcgagtgaggggagaaaagggaacagctttgatgacccattttattatacacagcagctctcttttttttttttttttttttttggatttagtattacaactctgtattcaaaaggctgtggctatattcatcaacactgaaaacatatatttgatttttagactcttttctatgaatctacacaactcattctagctttcttaccaacttgtcccaattcttattcagttattccatatcttgaccaaaccattttgatgagagtaaaaaaaaaggtttctggtatttattttaaaacatagcgtctggttcaccaaatcaccagctggctagctgtctaatagcacattcgagcattttcagtactctgcccagattgccggctggcgcatgctctgggatgaaattggctttagtattggttgggtccaatgcattctcctgaatatcagatgatttcgtctactctgagctctatttttaattcttgtttttggaatacggcgattctaggttcgtgcaaactattggtatcttgtatctgccaaaatagcctgctaattccacagaaccaattatgttcaagagcttgagaacagaacgtttacaggattcttcacattaaatactcaaaaaagaaagtttacccttttatgtttgacagctactgccaattacactggatgcatttaggtttcaacacatcaaaaaaaatcaaagcaaaaatatcaattttcttgttctttttatatggatttcccagtgcattccatgtccgccatcaagcctagacaggaagaaagaattgctctgttgccttcagcgccaaaatggttggcatggcacagctcatctaatcaaattttctgcttaatcctaagataccatctgcgttggtcaagatacatcaacagctctcttttggctaacttgttcatggtgtattatgtctgacactttgcttggtggccaatagcgaaacacagatctccctatgatgttctttattggaagtggacccctgcgttttacattcaccataatcaatcatcaatggggacgcacattctcattaatcaacacaattgccaactattaaagacattaaaagaatgctcataatcgatcatagagtttaccagttatgagagtcaaagcttttgttgcggttatcaccaaggacaaagacatgacctttggggacaaactgcaaataaacatgaaaagcaaacattgttaacaatctgatactcaacaaggatgaacaagtggtaagtaaaagttgctcaccattggttccatttcatatgacattggttctaagacaaaatcttcttcttgcacaatgtcattcacaaagagcttcccatcacgaacctgcatggtacatcatctacaggttagacaaaaatttgattaaaaaaacagaaaaaaggggttaggtccatttctgaaaaaaaaaacttgtagtccgagaaagcctctacacaaataataccgaccgaggtgaaaaaaagacttcaatgggtgaaaaggatcaatcaacaagtggattggatataagggcttacttcaacccagtcaccttcacttgccactatcctttttatgaatacatcattggaactgtagccatattccggatattcctgcaattcaaagggagaatatcatcaaattctttagtttacaaaagttgatacatctgaataacaagaacaatgaactgtgacttaccagcaaaattggaggagccttgaagattactatatctgaaacctctggcttcctgaaaaagtatgagacctgaccaacaccaaggcacacaaacgggcagcttagtcataaagagactaaaacagcctcattcacaaacctacatcaagcaactaaacaaagctcagggtgaagtctagcaatcacctatagaaaaaccttcacaagcaatcacataagagtatcatacagctatctccatgctaaaacatgcaagaactaattccagaaccgtgtagaaaaagtcaccatccatcaatagctatggtttatgattacaactatacatgacaga

SEQ ID NO: 28405 - DNA, 1788 bp, Arabidopsis thaliana landsberg
gcacacgtaaagaaaatatttagttattatttttaagaaaacaatatacgcaggccatctttggctttccctattttctttttaattgaattttgtatgcccactttaattttgtgtactatactattgcttatttaattatttctatttattaattccctcccatcggattccagctaaaaacacgaatatctatatattcctaaatgaaaatttaatataaatgcagtgtgagctatattaaaataatcacgctattaaagatttccttttcgcattattgtataaaaggaaaaaaatggacagacataaacaaatgttacaatataaaaatcattatataaaaagataaaataccttatttaatgacaagataaataaaccattttttatttcttcaatctaattcacaaagcataaataaatctaatttccttcactttcctctccaacattttcttattttccttcctaatttccaacctctgttcttagcaatatattttttctccaaaaataattctcagtttgattttcttcttctagctcttaagtatatttctttgttgttatttatcttttaatcctttaatctcatctttgtttatctttaatcaaaacccaaaatttacatgggttcttgaaaatctagaagaaataaaggaaacataacaaaaatagaaagaaaaagaagctaatggtcttaaatatggagtctaccggagaagctgttagatcaaccaccggtaacgacggtggtattacggtggttagatccgacgcgccgtcagatttccacgtagctcaaagatcagaaagctcaaaccaatctcccacctctgtcactcctcctccaccacagccatcgtctcatcacacagctcctccgccgctgcaaatttcgacggtgacgactacgactacgacggccgcgatggaaggtatctccggtggactgatgaagaagaagcgtggacggccaaggaagtatggaccggacgggactgttgtagcgttatctcctaaaccgatttcatcagcgccggcgccgtcgcatcttccgccgccgagttcacacgtcatcgatttctccgcttctgagaaacgtagcaaagtgaaaccaacgaactcgtttaacagaacaaagtatcatcaccaagttgagaatttgggtaattatatcttctttgctctgttttcttctctgttttttaagaagagtatttaagaaagaacaaaagataaaactatttttatcttgtcggaatcttgtttcgtagaccaatctaactctattgacaaaaaaaaaaaaaatttgggtctgggatctcattttcatgcatgcttaagtaagtggggtctctgttttgtttctatgtttaatttgtctatggttatagatgtgtcctaaagctacaagtatctacacatatatgtcatgttgttaattgtcacttcttaaatgcaatactaagcttaatttagtagcagttttataagttaaacatgttggtcaaaattagagatttttgttttctacttggctacttaaatttagggacaacaaagtacatgattagtcaatattacaaattaattaataaaaatgttcctcttgtgttctgttatgtgtaggtgaatgggctccttgctccgtcggtggtaatttcacacctcatataatcacagtcaacaccggcgaggtaatctcatcggaatttttctttagatctagacatcaagtccttttttctatcttttacaagttttgaatgatgtattttggca

SEQ ID NO: 28406 - DNA, 958 bp, Arabidopsis thaliana landsberg
aaaatggaagtgggacatcaaaactatattgtaaaaccaaatgttaagaaaatgtctatgtcaaataaagcaaaattgaatttagtaacaaccacactagatcaaactttaaaaaatatatatccattatataccacttccaataaaattctatttttttgtcggttacacatatttttaaacacaaaattttaaaactaaacaccaaaatgtgcactcctgatcaaccccatgtgataatagccaccgacaacattgatcaaagactaaccaaaaactaaaccgaaccgaacttttttccaaactaaaccgaaaaaggttcgggttatacatttttcataaaaaaaagaaacaaagagaatctggtgatagcaacatgacaacaacattgatgaagatgaattagacactttttaaaagaagtttcagattttagaacttacagagccagagccaatagtgatttgcaaaaagctaagatcaatcgaagaaaaagtgacatgaacaccaaaaaaagtgccagtgttcgggtacaacattctcagtgtcgcgttcatagtgatcatatcagttcctatacctccagcatcttgtccagcttgaaccttaagttgctcaaacgttatactctgcaaaattcaattctacaaacgtaagcacgactctagatctgaaatctgatctcgatctactaagtcaactctcacaaaccttaacagagatcttaggtttctgaggtttagcagctgcataaagaatcaaagagaagaaagcaaagagtagagagaatccaacaatgaaagctaaaacataacatcgacgaggcaaagcttcttgttctctatctccatcatcaagaagaccttcttcttcaatcatagcgaactgtttttctaaagagtggcccttacgttttgagccgttgatattggagaagcggcttgagggagagtgagaa

SEQ ID NO: 28407 - DNA, 1047 bp, Arabidopsis thaliana landsberg
atgcacactgttcttcttccacctttggaaactctttcgactgtcgaagaaacttgtgttagggagaaagctgttgagtcgctttgtagagttggctctcagatgagggagagtgacttggttgatcatttcatttcgttagttaagcgacttgccgctggtgagtggttcacagctagagtatcggcttgcggtgttttccatattgcatacccgagcgcgccggatatgttgaagactgagttaagatcgttgtatactcagctttgtcaggatgatatgccgatggtaaggagagctgcagcaactaatcttgggaaatttgctgctacggttgaatcagcgcatttgaagaccgacgttatgtccatgtttgaggatcttactcaagatggtattgaacactgagcgtttatttactctacagcatatatatttgtcgaatttcatcttacgtttttttcatatcagatcaagattctgttagattattggccgttgagggttgtgctgctcttgggaaattgttggagcctcaggattgtgtccaacacattcttcccgtgattgttaatttctcgcaggtgattatgtctgtaggcttttatgctgatgatctacatttaaaagaaatgcttaatctttgtactttttcactgagcaggataagtcttggcgtgtgcgctatatggttgcaaatcaactctacgagctttgtgaagccgtgggacctgagcctactaggtaagaacgttttgcataaacctaatgcagcatgttttaatacctttgatgggctaatttaatgttcaatatagaaatgcatatcatccaataggcttaaggaacttgatgatcccatttacttcctcttgatactatttactgtgtcttctattttaaggacggagctggtgcctgcatatgtgcgcctacttcgtgataatgaagctgaagtacgcatagcagctgccggtagagcttcttagttatgacggaatctgtctccttagattgctatccagcacgttctcccctgtgtgaagg

SEQ ID NO: 28408 - DNA, 1575 bp, Arabidopsis thaliana landsberg
aaaatgctagtagtaatacaataggaactaccgcgatgttttaataactgaaaataccaaatatcatccggagttcctctaaacacttcagtaaaaaaaagttaccgaacggataacattttttcaatgaagtgctgatataagaatgagagttgacgtgaaagctaatggattcactgatggaccagctgataaactttatgaagaacttgctgatggactagctgaaagactttctgaagaacccgctgacgaactatatgacagaccattcctactcacatgaaccacccgaccactttgaagacttcctgttgttttatctcactcttttgaagactacacaacgtttagaagctgcatgaatgaatgtgtcaagctggagagacatgggtttagggatttgtattccaaattcgacgaatgcgaattatttatgtggaacatagttaattgtttatcaaatccaagctatgagacgtttgattatgtgaagatatctccaattgatcaaaacccggtttgatagtaatagttaagatttgatttactgatttacgtaggtatttaatgcaaagctgtctgattttaaatttggattgcacaactagagtaatgtacactatgtttatccatatctatggataaacctcgacaaccgcttatacgtatctaacattacgaaaatgtgttttcaaatgctttgacctttatatctttaagccattcaaacaacaattaaaaccttaaacatctaaaatgataagatggaagtgtttaccatataaaatctcgtctcgacctgcggaaatccgttgaatgggtccgggagttcccccaaacacttcagtggataatcatttagaaaaattgtatccccaatgaagtgctcagaggaactctaggagacatccaaccaagaatattgtttcttgagtatttcatgtactatgagtggaatacgactatacgagtacaagaggttgatgtaagttttgagaagatgaaagtagttacgtttctttatatatagactatagttaaaggcttaaaggataatctccatacatatgtttattattacacagagatagcgagacagagagatcataagatgatgaccaaggaaagctttttgaatatagacgcaattttgggttaaaggaaagagtaaaaagaatactaatgttgaagaaaagtccatacggcttttcacatgatagaaaggatgcaaaacacgtagagattctgttttataatttatatgcttttagtacccataacggttatttctcactacattctcctgcttgtcaatcttttaatattttttaatttttaatgttatgactatggagaaaagcttatggatgttgatattttttcattaccaaaaatccattttatttgacattttgacccgcactgattaaagaaatgatgaaaaacgaatactagctgcctacatatgtggcgcatcgtatgatatgtaccaactagatattgcatggaacaggtgaaagtcccctcaaataaatgatgttaaagtcgatcagctgaaataattaatgctta

SEQ ID NO: 28409 - DNA, 945 bp, Arabidopsis thaliana landsberg
gaaaaaaacgatcttaggcttagctgaagacaaaaaaactctccttaacaagaacagagtacttgatatctaactggattgggtcctaaatcctaagtttcacagcatcagaaagcagacatttgctactctgttcacatgatgcattctccacaaatgtttcagttgtaacttcaactagagaaaacatgtctacagttatcatcttaagaacacttaacttgaggaaacctaaggggaacagaatgatagcttgaaagacaagcaaataaaaggagaatcttgtatggtgagtgtaaagagaacaccaaacctttctagagatatcaaattgatccaatataacctcagctgctttcaatgccttgtcaatattctcatgagctctccttatagaatgtgttcttatctacacaaacacaatcacacccccaaaattaaacgtcgaagaagccaaccattttatcaccaaatccagaatcacatttcaatttcaacagaagatagatctcaaattccacaaccttgagactctaaaaatccaaaaaacagagagatcatgaagaaaggacctgtgtgggacgcattgcggtttcaagagccgagagacgatgatcgaaagaacctaagattccgaccatgttatcggtgatggtctggctcttatgcaaagactctttcatcaaacttgctcgctcggttagggcttccattgcttgagccacccccattttcttgatttggatcgatgaacaaaaaagaagatggtgaaaattgatagagaatagttttggttgcgtaaagattcagaaattttttgaggattggaaaaatgtaattgtgtttgttggtgttgttagacacgctcctctacgattcgtgagacgacgaaacaattaaaaagtttcatgcgattttgctggagagaccccaccacataagcaa

SEQ ID NO: 28410 - DNA, 1783 bp, Arabidopsis thaliana landsberg
actaaccgcatcagtccagcaattttaatgatccaagaaaataaatccagtgaagaaacgtgcagcagtatatataaaatccagcgaagttatatcccaaactactttttacttgcactgattacatatgtaatcgaacacatggatcaataaccgtctgatgtaatatcactcaagaatagaattggcccatccgatatatgtaacttaaatcctcggggagacgaccaagaagatggtccaaaaatatcattggaaccacgtgaatcttgataaatatttggtactccactcaatactattatttattatatgaataggacaattcttttatttgtttcctagactaaaaatctcactaaaagtgtgaatatatgtgtatatagtataatattccaaaaatctcacttcaagtataccctttgttttcttctgcaaattctggtaaaaacaggcattacaaattacaaaatatatcaatatatattcacctcctctatgaattaagactattactataagtaaaaatgttgctatatttctaaaaccactaatatttttccttttgaacattacaaaaataatctaataactccacaggttacagctagtttctcccttttttttaacaatgttacagctagctttccctatatgcacatatatcacaacaaaagaaaattactaaaatctaaaataataacccccataaagaaaaatgcctacaaattgggaaatatgtactgcaaataatacagaaatagcctacgttttcttatagagaaactaccaccatattatacaactaatttgggaccataaatttacacaacttgaaacaaattggaagctaagtttgtacctttaaagcaagcaaagaaaactttacaaaacaaagaagaagaactaaaagcaaaattaatgaaaaagcattggataaatatgttctaacatgtccgagatccggattgtgtttttaggtaccattcttgtctcctcccaaagcttcaccacaactattttcattttattttaaaaacacataataatatatatctctttcaagaaaatcaaaagtaagcctcgttcttctccctctgtctctctcttctctcatctttagctatcttcctcccatggcaactatctctcaagtcattatctaactttttttccttctttttctttttatattacttacttcttatggatattggtgttcatgttcttgggtcggttactagtaatgaaaatgagtcacttggtctaaaagagcttataggaactaaacaagatagatccggattcatcggtgaggattgcttgcaacgaagcttgaagctagcaagaacgacaactagagcggaagaagaagaaaacttgtcttcttctgttgcagctgcttattgcaaaacgatgtcgtttcaccaaggcattcctctcatgagatctgcttctcctctttcctctgattctcgccgtcaagaacaaatgcttagcttctcagataaaccagacgctcttgatttcagtaaatatgtcggtttggataatagcagtaataacaagaactctctctcgccgtttcttcaccagattcctccaccttcttactttagaagctcaggtttgataatgtcttctctttattgattggattttggtgaaatgggttgtgtaaaataatcaaattttttacatttttgctgtggaatgcaggaggatatggttatggtggaatgatgatcaacatgagcatccaagggaacttcacaggtgttaa

SEQ ID NO: 28411 - DNA, 1747 bp, Arabidopsis thaliana landsberg
ctctctctctctactttgtgttatttaccatcaaatttgttgtttcttttagagatttattcgtcaaaacttgaatcttttgtttcaatgtacttcaaatggttgtaagcaattatctcgacaagtcatcgatcattctaatttcgaatcaagcttctaattatcgattttatttttggtaacaattgaaatcgtgaacacactttaaagtatcactttgtgcatattccaatgcagatgccgaaattacttattgaccactttgaaaacaaacgagaaatggttgtttaaaagttgaaactataaacacattttttgcgtactaatctctgtgtaagttccaacgttaattttttttttttatatggtttgaccattttgctaaacaactaaaattggaatttttttgagtttaagtttaataatgtggaaaaaaatgcgtttattttcgttagatgactgaatgttactataagtctataattcgttaagatttagtatatttatccactaatcaatttcgaatcagttaatcacttacttgaactagaaactaggaacaccattgactcgcacctaacattcttataaaacatgctatatttattccggacatattagtttttgcaacgatcttcttaggtgagagaggtagagataagcaaagcagagattataaagtacattgaagaacagtgcatgcaataaggagtcaaagaagcaacttttttagttggtcaaacactcaacaaacttaaaaaccaattcaatacccacttcacaagtagctctctaggaatcgtaccatgttggagaataaaagcctaaccagtaaccaacctctcttgtttactgctaccaccaagtggtccaatattttttccatcagaaagcaaatgactttatcataaatgtaaggccaaaacacttcatgtcaatcaaaatatacaatgcgaagcaatggtcttctcatgttcttgtaactgatcaggttaaaatttcactatatatgttccctttggcagagcctttagttgctgaaagaggtgaagaatcattctgatggccatggcgggtttatgactgtgagctggccagtgggcaaaacactcatgcgtgggtactctactttttcatccagttggttctgagtccaagtcaacatcttcaacaagtctagaagtttgggacctgttaagtcacaaacataagatcatcatcgacttagtatattgacaaagtttcaagaggaaatcttgatgacacatgtgggaaactacggaatgtaaaaatagctgtctcactgtaattataacagtttttggcatcataaccgattgatcctatatattgtttgcatatgaactgtgctggaggtttaagctcattgttttacttgctatcttaagccataactagtaagaaagttgatcacttacattttagaccagtctggctagtaagaatcgctgcatttacttcggcagctgtcttaaaccaccgtgagttgtcaagaagctctctctctgcctccgggatgtcagggagatctctaaaacggagtatagccacagttttttccaattcttccagaaacgccagctgcataagttgtggaaagttttatgaccgtgatgtttcagtatactctaataggatcaaagatcagtggcatttgtggactcagcaagcaagatatagattcattacacatagaccacatcatctttaaagcgtattgaaacct

SEQ ID NO: 28412 - DNA, 1225 bp, Arabidopsis thaliana landsberg
tgtaaaaaaaaaaaagaaaaggacactatagctatggtcgcaactaaacaaataggggacactatacatgtacgtaataatattcatttattttcaacgacaatgttccctaggggtggtaacccaagtatttttcatagatattatacttctagcgaaaagccatcaattgagaaaaaaggcctccacgtttgacccgttttgcctataaaaggattctttaagatatggaccttactcatcttctccgttaaacccatttaaatagttttcattgtccttgtgaaaaatgcaattctcttcatcttctattacttctttcacttggacagttttaatcacagtgggatgtcttatgctttgtgcgtctttctcctatgctcaacttacccctactttttacgacacttcatgtcctaccgtcaccaacattgtaagagataccattgtcaacgagctaagatcggaccctcgtatcgccgggagcatccttcgtcttcacttccatgactgctttgttaatgtaagatatcacttttcatatatctatagcgttatgaaattactgtacttaatctcttcatcttttaaatattgattaaatcagtgtaaaaaagattatagttgttgtcagcattagcaattgttttaggtgtactcttagttgctttcaatttaatgtcattttagcttttcttttatgtttcaaaatttggattctgaatgcaaattttaaaggaaaaagtaatttaacatcacgtcaaaattaatcaaacagacaaagaatcaattagttttggaatcacgtagtagtataatggaacttattaaatttccaccatattttggtaatataaatttttctcttactgaatttattttagtgaattaaaatgggttagaacttagaacttagaagagttaatacctccttacattgttttccttaactcagttacttgcttcagaggaacaaatggttttgatggatgaaaaaagttcaacgttaaactgttacctttggtaaagatgtaaactatggatgacattaactaataatttgttaaataatattttggacttttgaaagggttgtgatgcttcgatcttgttagacaacacgacatcatttcgaacagagaaagatgcacttggaaatgcacattcagcccgaggatttccagtgattgatagaacgaaagctgcggtggagagggcatgccca

SEQ ID NO: 28413 - DNA, 2901 bp, Arabidopsis thaliana landsberg
tttatccggtgaatcaaaatgctcacaaggctatctcatcatcatcccctatgcatatgcaataatcctaattgaaacactctagactcgatcctaaatgtgatgcaactacatgaacactctttttttgtgaaatcattttctgaaatttttcaaatttttttggtttttttatgccttagatgaatgcagactcaaaaatatacacaatgcaacacacactttctgagccctcccccaaacttaaatcgcacagtggactgtgtgaataaacttggaagagagtactcaggacaaatccaatcacataaacaaaaaaaatgaagaaacaaatcacaacagatgatataatacaatggtgaagtgaggcgcttacctcagtcgaagaatgaacgtagttgcccgtcaatggctgcctgtgattgctcccaggccatagacgaaccaccttgttctatatcagctccagcaggtgggtactcgacctcatctccttctgctgcggccagcaccgcggtcgcgtaaactacgagactgcagaagtcgtccgctcctactgctaaatcgagtgagtgtggtcctcctcttcctcccagattcacgaggctcgaatgatgaatgcctcgcagggacatgcggaatctcctgctctctaggctcaggactgcgccgacttggctcgggcgcgtcatatctcctcgaaggcatgtccttagggagatgtccctgcggaatagttgtagtggaagaggagcagctgagcttgttcttcataaacttgatagccctgaggcacttggcgagtaacttgtcctgtttcatgcaccacttctgcagcttgctattgtttttgtgagcttcgctcaaactcctgctttcccttgcaggaggtatatgctcactgaaatgatacatgctcgtgtcaaactccgcctcatctatatcatccgtctcatcaatatcttctgttgtagctccttcggtatgactgatctcctcagttggcggactaccctcgaaataaagttcttcaagtgcaggcttgaagtcaatgttcctgccctcgagaattctagtagcgtcaatgcaggggagaagaatgttggcgattttaatcgatgaatgctcaaacctgtatcggtgaaagtcgccagccatgtcaaactccaaaaactcacatcggcgcaaatgatccaagtccatcatcctcggtgctaaccctggttccttgagcggtactccacaagcttccagaattggcgtcacaacgccacccacgcatagtgctcctctcaccttcttctttccgttcgtcaacgcccatttcctgtatccacacagatggatcaacagagacattactggtggtgcgttgttgagatcgcctctcaagacattctttcccttcgtctgacggagaatccctgtaagtgcataatctatcatctccatgtccatgttagacacggtgcctgtagattccctggagtaaaagacgttggcaaccgatctctgaaagtagcggatcacaggactccggatttggttgctcgtggaccgcgccgagtttagcggtagattgttccctatagtggccataaatccttaagctcttctatgtcaaatctgggtttggttcgctttccactagggaaaccaaacagttcttccaacttcttgatcgaaagctgataccgctgttcattcactaagaacgtcaagaagcctaaccccatggtattcagctcaaagtctgtgagtgcctcatacatctccacttgcagcgtggaaagaaactcgattgtctcctccttataggcagggtaaggataagacatgagtgtctccagatgacacttctcgaacagatgttgcacgtcctccagtaaccccagctgggctaaagtctcatagcacggataccgcgttccccagaaatcattcatctcaaagaacctgatatactcttccactgtaacctcgtcaggtatgttcagcagcttcgtctccttgcgccatgactcgggctcatactcagttttgatatcttcatcaatcagctcatatctacttgacatcgccctctttcctctggcgatttcagctcttctctgattacgtcgggctgcagagcgttcgaattcatccctgaagctctggtaaacatgttgctctctcggtctagcagaccaggactctgcttcatcaacattgtaatcagggtccatagaggattctccactgtagttactcatgatgaaacctgaaaacagacaaaacttaaaaataaacgtttatacgttagtaacagcaaaccaaaaacacaaaccaatcaggtgaactggtcgagtgtaccaaaaaacaaattttctttttttttcagtttggtgaactcgcggtcgagtgttaaagagatggtgaggcggtgtgtcttggcgaggtcgagtggctgtgaaaggcaggtgaggagtggtcgagtgacgaatgtgagcttgaaaggcggatgtgctcttgccgtgaagtcgagtgaattgagtaaagcggtgaagttgttgatgatttgaaatcgagtacttggtgagaattggagtgagcaatgatgagagagatgcagtgaatcgagtgaagtggctatgaatgagaggtggtgaagcggtcgcagtgagtttgttgaatcgagtgactcggctatgaagatggtggtgaagagatcgagtggtagtggagaggtgatgagagctttggccgagtgatggttgtgggattggcgaggagtattcgagtggttttgagcgagaagtatggtgacggagaacgagagtttgttgagctagagagtgagagttgatgagtgaagtgagagtcgagtggtgttggatgaaataaaggagaggtcgagtg

SEQ ID NO: 28414 - DNA, 1648 bp, Arabidopsis thaliana landsberg
agactccgcaacagagataactcatcctgataagaacatacaggcacatacctggaacacagtctttaaaagaggtttatttgctgcttgttcccgaccaatatcatgacaccacctgcattacaaatccgagaagatataagataaagacggcaaaagaagtcctgttatctattaatatcaaagaaaacaaagtaaagaacaccacttacatgtttataagaactatgtctgagactgcaagtgcaaaaagagcactctgtttctcgaaagcagtatcatcctatccatatacaagaaaactgtgtaagtaaagctattctgcactgacacattctcttttagacaacaatttctttgtgtgagctccttaagatttatacagtgcatgaaaccatgttatgactctaatcagtacaattcaaatttcatcaaagtcattcacaattagtgcaaaagctaaataaatactaactgggcgtgagatgctaaatattaaaagaaccgaatatgaaaagggccaaggttacacacctcaccacgctctctcccatcggtaccctctaaatccatcacaacggtgcaaggctcaataccagcgcatctagcaatccaaattcccttagtcgtctgagacctgaaaacaaagaattgcagcggaaaaataaatataaattagaagctaagtattcttctgatgaagtgtatacaaaaattagaacatgccttcctctaaatgcatccatttctctaaagttggttccaaacaaatgattcaagagcgtactcttccctgcaaattcaaccagaatgacataaaatcagccaatatacaaaaaatagattccaaagaagacactttttacattcaaggatttgatacataccactactttgtggacccataatcgagacaaccgcgtatgaaagaccacattcgtccaatttaacctccttgatgaaatgatcaaccccagaaacattaaagacaccatccccatcgataagctgggtagagcaagcggcatctgcaacgtccaagcaataaagaaagtaataaaattagcactatgtacaagtaagcccaaagtgtctctgaacaaagcaagatctgaaattcagtcttcctattcaataacatcttcaaaatctaggctttaaatcttccccacaagttgcatcgagtgtctcctttaaacccagaatccttaatttttgattgattcctcgcattttcgaatcactaagataactgttaatccactagaaacctagccaaaaaatttcattgaaaccccaaatttcaacaacaattaagcaaatcgaaactcggaatcatctaatacactgatctgctactaaatagaagaaagaagaatcaatcacctaccatctaatgagcaaaagagactatcaaaattttacatcagacagatcacaatccaaatcacagagcttagaaagaaactgaaatcgaaaacgagtaacgcttggtcaaaacgaaaactgatcagatcaaagcgaaaaaacggatccacgagatcaggaacatttatgagcagagaagagatggatatataaattacccattatcgctcaacgaaacgcagatagagtgatgaatgacgaagagaatgggacggagatc

SEQ ID NO: 28415 - DNA, 1843 bp, Arabidopsis thaliana landsberg
  unsure (1)..(1843): unsure at all n locations
tcgaattcggagtttgttttaggacattgatgaaaaaacaccttttgtgtatatgtatttttttgtttaaggcactaggatatattttgatgattttgatttaaattgtaggctgatacgagaaggaaaataaaatcttagaccttgttgtaaatgtgaatgattgattcgattttattttgtgtccaaaacaaaacaaaacatgatcgttttgagtttacataatttcagaacataattgcgtagtaactggagtgaataataataaacctgtgtgtttttgtaaactacaaaagatattatcactatgattattttgagttaatgataagcatgattgtttttgcaggattttggatttcacattctatatgatatattttgagttggtgagtgtggaagatttgtcaacaacccttgatcttacaagaaccaaattgcctttgtgtgtttggattatagctctcttggaacctttgttgatgtattttacctatgcttttgcttaccttttatggtattggggaatgcctatctttgttgtatgttaaaactttgtgatcttagaatccttctacctttgtacttgttttctcttgtagatgaatgaaaacaagcatttgcccaaaaaaaaaaaaaaaagattgctcggagaagtagaggtgttccccaatgtttcaaaatcattaagagttaaagactacaaaaggaaagaactaatactgtatactgtaaaagatatgtgaaactcttaattaagtatagattccctatacaatattagtgaataatttttataaannnnnnnnnnnnnnnnnnnnnnnnttggatttaaataccggagaatttgagacatacatagttacatacacatgatagtagtaagatcaaaaacaaatcttaagaggtcaataagattcgcttatttattgagtttgacccgacccaattaagcccggcccattaagcacagaagaagaagaaagagagagggtcaacaaaaagtcacagtcgaacaagatactgagaaagaaacgaaatttcacctggcactgtcctcgcgtgtactctcacgcgccgacgtaatactctgccgtcgtcaccgacattgtctctacgccgttgtcatttgcttattacggccaatattcttcactatgtaagtcaaaatcgtcgaatcctttctctgtaccgagctcgctttaaaccctaaccctctcgtctctgtacttagtaagttcttctaatttccgacgaaagtcttctcctttttgagtctcatcgtcatctgaaaacgctattagctctctggaagagaaaaaacaacgttttgttagagtttctttgtgcgattgtgttttcttaagaggaaaggtttcaactttcttaggatattcaatttctgagtcttttctgctacttgtggttagtctttgctgctaggtagatgtctgtagtcttggtttgttgttgatttgctttaggtctgtctttgcttattgttgtaatgttttgagttctggccacatttatttccttactgaacggctcttcacatcttgtttcttccgcattttgataggacgaggcaaatgagaagttacaacttgtttcacgaaagcaatcccacaaacagttttannnnnnnnnnnnnnnnnnnnnnnnnacctaatctgcatatcaagaaagcatttatggctatgagggctatgggaatagaggatgcgcgagtgaagccggtcttgaaaaaccttctcgccctttacgagaaaaactgggagttaattgctgaagacaattacagggttcttgctgacgctatcttcgatagccatgaagatca

SEQ ID NO: 28416 - DNA, 3281 bp, Arabidopsis thaliana landsberg
  unsure (1)..(3281): unsure at all n locations
caaataaaaaataaaccaactaactccaaatgaaaactaattgctttttaatttgtacttaataatatagtacagagaaatgaaaatccatcatagttatgttgagaaaggacgaaatttgttttgttaagtacatagaaatgaaaatccatcatatttatttttatatatacataaaaacgattctaaaaataaataatattcaagctgttgtagagctctgtacaaaaccaaataaaaaataaaccaactaactccaaaagaaaaactaaaggatttttacttaatagtgacaagatcataaaactggacatccatgcataataacgcctttagcggtaggacaagacgcgaggctacagtttgtgctatcatcagcgtttccccaccacaacaatccaattcctttgcgtccaaccgataggaatataagtattgtcataaacgcagtgcccgcgtctaaaccacccgacaaaacgtagttatactttttccaccactgtctcttgtacttatacaaaaagtgtccaaacacaaatgcaacgatgcaccaactcgtgaagttaaccgccatcgcgggtggcatcatcgaggttgctcctaaaatgaccggaaaatgaatcttcgagatccatttatgagctgggaatgctttggtcgctagccagacaaagaaaggagcgattgcacctacgaggaagaaccagtttatggctgcgtattctcctaagttaccgaacattctacgtggtcctacaagtccccaaataactgaagcatcaaagaagacacggtccatgggacatgtccattcgctatctggaggaagcaaagatttgtcacatagatgaggaatgtctaccattaaccaccaagcagttcctgtgtacactaccacagacacaagcgtcccaaccacctgaaaatgttgtgttagtatataattatatcgcgtttaaaccaataactaatgatggtttaagatgcaataacctgtgccatgaacatgcttctaggaggaatcttcatgtagagtccgagtttgaagtcttggatgaatgttagagcctgagtcatgctgatgtatccatatactttaaagcacatgttagcaaccggacgttctggatagagatacccgattacatattccgtaatgacgctcaaacccggttcctaaagcaataggagccttgttagattaaaagttgtcacttacaaaaaaataaggtaaaagagctctagctctaaatagtaaaaggacaatgaatgagacatagatgaatgaaatattatttgtaaaagaatatcgatattttaatcaaaacttcttttaaacttcttttaatgaaatattattttttcaagggtttttctagagtaatttgtgcattgttttcatgattttgttataaagttagcaaaacaagattcacaaaaataatttgttagaaatttattcagtttctttactttcatatttggttttaagtagatacctgattagtggtggcggcgataacaccgataagcggagtgaagaagacagcaatggcacaagctagcaacactccccaccaaggtagctgcacggttgcattgtagtagaatgatatgaacatgatgannnnnnnnnnnnnnnnnnggatcacataaaaccaccacataggaacttccctatagtttttcttcatgattctcgtgtggaaatccattttcttgttcctctgaaaagcacctcttgtttgtttccataaatccctggaaaataaaagagagttgcaaggaaattaattagaaactttcaccaaagactactctcggatatctagttcagctaaaaaaattaaaaagtaaaatttaggtagttctgaggagttgatagagttaaatcccttccgttgaagactaaaacatggacaatggtggcagacaatgtagcaaacccgagaccataagtaacagcaaagaaggtgctcatattgatggacccggtcctagagtaaaccacacggtcaagatggaatttgctatcaataatgctcaaaacatcataacgtgagccattccccatgaagagctgactagagaagatagggaaggtcttggcatcataaatgttaagccagtaacaaacaggcgtgacgatatacataaccagcacgaaaccaatggctacattgacggaagcgaacaaaggactagctaaagggcttccaagataagcactaatagtgacccaatcaaaaccaatggaaccaatgccaagaccatgttcacctgaaccgagttggtttaccagaattgatttgggattgagccaacagacccatgagattgatgttaacatggtgaaaagataaccaggaaagatgtagtaagcaaagctagctacgaggacgattaagaagaattgagttctactcatgcctcctcttgatttcttttctttctcgtgtaacgcaccaaagagagagacttgaacaagattgcttggccaccacatttcaccaggctcaacaaggtgtttcctgaagagaccagcccaaccaaatccaagaatctaaacacaagaaacgatttcaaggttcaataaactgcaaaacaagaaacagaggataaagtgaagtgagagtacctgagtggtgatcatgacgagaaatgcagggaggaaaggaagagaacgtttgtagtaaagcttaatagcactaagtatgtgagtagcgtaaacagagccggcgccggaatttgcaaagatagttatcagaacatgttccttgacgttgaaggcacccgggtttaaggtaaactgaaacctcgtaccttccaagaatctttttgtcggaagcactctcgccatgagatgaccaagcggcacgacggcgatctgagcggagattccggtgatactcaacggcatcgttctgtaccagaaaaactggttgataaaggagagtacaatgcacgcgcctataccaagaacccacatccgaaatgttaaaaccggtaaagttgaatcgtcggtcttgggtacagtgagctctacctccggtacaacgcaccggtcatcatcatcatccataaccggcgtgaactctgttgctatctctcccatcgttttagaagagtgagtgttccgttctttgggggatgaatctttttttatatgtaagatcttgattgatactctatcgcaattattgaattttgatgtttatatccattaaggaagtctgtctttttccactaatatttatactattttctcactcgcatgttat

SEQ ID NO: 28417 - DNA, 1624 bp, Arabidopsis thaliana landsberg
caaaaaacatatccagaaaaggaaactcaggacatcaaaactttttaaaaggaacactagatgaataatatatatatatatatatatatatatatatatatatatattgtgggtaaataagcatcaatcaatcggttgattcatatgaaaacatatatcactacaaacgaattaagtggaatatagaccgctggatggatttccgaatatttatcatagcaacgaacatgtgacgaaacgaaatagagatagatatgccgtgtatgtagaaaacaacgctttataataaagaatgatagatataaagtcaaaaagactcaaaacaattgatcatgggtctcatcgaaaaagagaaattccacaaagatttttttttgaaattccacaaagagaaattgtcacaaagatcatattactcatcatatttattggaccttcaattgacaaacatgaaactttgccgaattaaaatgcggtgttatttataaaaatctccgtttttatgtgtcaaagactttttttagttcatgtacaacgagctagtagctatttatctcatcttaatgttgaacataagaactgcatgaaccttattcttaactaagaaggtgcaaaatataaatattcgaagagttataacataaatcaacacatgaagtcgcgaaactataggggaatcaacataattaaggctaatatattaagccctaactgataaccctaaaaactccaagaaaacccaaaccctaattcaacgatacaagaaacaatcttaattacaagatatgatttgatatatcatacaagtgacataattaatgaacaaaaaaaaagcaacaagaacaagatgataattgcatatacgtaggacaacacaaaccgatcaatagccccacaagtcctcatcatttgaattctccggagagtcctccgacggccgagaacccatccacgacggcggcgcaaccatcatcccttctgccatattagccagcagattaggcattttcaagacttcttcttcgtccatgaactctgtcccacaccacgacgaagatccaacatcattatctacgtggcactcacgcgctctcgacttcgaactactactcttcttctcctttgcctctttctcctcctccccttcctcacatcccttcattgctgctgcggctgccgcagcggcgtcgtatatctgctggggatgttgattcaggaaccgggtatgactgggcggatccaggaaagttcaagacagcttctcttcctttaagagccatagcagccacatcataggcggcggctgccatctctgccgtggggtaagttccaagccagattctcgtggttttcctcggctcacgaatctcggagacccatttcccacttcggcaccggattcctctgtacaccggatcctttctccagctacctaagccggcagaagccattgaactattcatactattaatagtatattagtagcaagccggagaagggttttcacacgtggcgaagaaggatttgtcacacgtgcgaggtggcaaactaattaaagaaaatgaagaagttttgggttaagatcagggacatttggtatgatttatatggtgaccatcagcca

SEQ ID NO: 28418 - DNA, 1994 bp, Arabidopsis thaliana landsberg
ccaatatattgactagaaataggtcaaagattatctatgcttaaatcaagtgtagaagttagaggtcaaattaaatatgactgttaatggttgtgatgcaacttcagagacacggttctcagctctgtaactaagtaattcacaaactgtggaatggatcttgatatggacttgaattgttgtcacctcgatcaaataaatatgaacttggtttcctctctatagattatgaacaaactgaggaaaacttttggttttggtatatatggagatttggaatctaggctttgagtatatcggttaacttttttgtctttgttgcagcaaaccaacactgcagacatgttagaagaagcagtagaatacgtgaaagttcttcaaaggcagatccaggtaaattatctaagttaatatatatacacacaaaaccttttagaggaacccaatagatgaattaaaaatgattagtcaacaaagtatatagtaaaaagagttatgagttggtttattttggtgtggataatataggagttaacagaagaacagaagaggtgcacatgcatacctaaggaagaacaataaggtttgctcctgatttgttttatatttgcttaacggcaatgatctgatcgaaaaattcgaaagatgatcttagcttgaatttagatggatgtcatgttgaaaagtatattatttgataaatggatgtaggtgtaatataaaatttttgtacaataatgaagaaagttaaaaagaattaatgaaaacatatattctttatgatattagtgaaatgactttgatttcatgttgtttgattatagtaaagtattttcaagatgtgtattacagtgtttttaaaactcattcatgcagttacagctaacatactagattactaaccatcatggaataagattgcttagtggtgcaaccaatccgcaacgagtttgcaaacgaggacagaattgctcgatgttttgtcgaaccggcaagataatcgggtctttgtttattgcagtgtagattaaatcttatagcgaaaaagggttaatcatcttactaaatccgctgcaatcagattcgaaataaatcattccgcataccgagctaccaaaagtagtgtagtgtcaggagttcttagtgtaaagacatgaaatatatttgaaatcctttcaaaccaattagatgaatctggttgaagccatcaaattaaaaccaaactggctgcacatttttgttttggttttccatgaaccatcaacttgaaaacaaagaacaagggagttcaaaacataggagggatgataagctttggaacgactcccatgccttcaccaatatactctgctatgcctaatcttggactcgcatccacgctttgagttcatctcgcaatcacaaaatatatagctacggatctggctgctacatatttagtattgctgtcgctcctcgctttcgagttaaaccaagctaaccaagggtagaactcactatgttcccttgctcgatcttggtttaggactctttatgatagaaagtccaaattcgtgaatagggaattcgttgggaacaccacatgtgctgatggaactgagtcaagtattataccattctagactctttgtctcagctacgagctagtcagaattaagagtatattttcctactcaattagatcatgaattcggtttatattccaccatttagcctcctgatcaatcaatgaatcaactccaaaatggggatatcaatcttgtaatcaaccaaaaaattcttacagtaaattatgaagatgatggtctttctattatttctcttttattgtccggctataacattaatcaaactatagcataacacctattatcacacggattgtttcgtcccattcaacaatttttggaacattgcctactattttgcatatagagtctatgataaagttagaaagacataacgcgtcgtcattccaatgtactgtaggcctc

SEQ ID NO: 28419 - DNA, 3148 bp, Arabidopsis thaliana landsberg
aagcacgagctataggatgtatgatactctcattgtgttgtttgggaagttggccagcgattctgactctattggagagaagaggtcgtcttcctcaacacacgtttcttgatttcgcaaccgcgaatctcttggctgcaatcgtgatagcattttcgctcggtgagattgggaaaagcacgtttctaaaactctgactttaccactcagctacctcaggtttggttcgttctatatacttcttgagattcctgataaagtttatacgaacttgattggtaatatgaggttttttacaggataattggccgtcggtattgcttgcagtcgcaggcggtgtgcttctttgtcatcgggaatttagcgactcaatacgctttggcgtttgtcggtttatcggttactgaagttataaccgcaagcattaccgtcgtcattggtatacttcctttggtttgtgatgaatcaaaaacttatgtttctatggtttcttgcgtatcacggttgaattttataggtacaacattgaattatttcttggacaacaagataaacaaagccgagatcctcttccctggcgtaggttgcttcttgatcgctgttttcctaggcgctgcggttcatgcttctaatgcagctgatgttaaagagaaactcaagtctttacctagcgagtataaagctgagacaaactaagatgttgctctttcttttgcctttgttccatgttttaaaaatgttttaacaaaactctgatctttttcagagatttatattcttctattgaaaatggtgaagacaagcctgaaataggtaaaacctatatatattgatttgtgtgaagatatatgcaaagcaaaggaatgaaaattcagttaaaattagaaacttttggtggaactttgatcaaagttgtgatgttttcttgtttgttcttaccatgaacagagaaaactgatgtcgaatctcaagagaaactcgcggaaaaggcgaaagcagggacggcaggattctatgtagagctagagaacaaaagagcaatcaaggttcaattacaatgaccaagagaaaaacctttagcaagattacgtagcaaaggagagtatacaactactctcggtgcttaaaacctcatcaatgcgcaggtctttggaaaaagcataatgatcggactattcataacgctgttcgcgggaatcagcctttctctattctctcctgcattcaacttggcaacaaacgatcaatggagtacattgccaaaaggcgtacctaagctcgttgtctataccgcctttttctacttctcaatcgcgggttttctcatttctttgattctaaacctcatctttctttaccggccaatggtaggcttagcgagatcatcgcttaagaagtatatatatgactccaaaggtagaggttgggcggttttcgctggattcttgtgcgggtttggtaacggtttgcagttcatgggaggtcaagccgctggatacgcggctgcagactctgtccaggttaggcttctttagatttagtaatctcaaagtttacattttggtttttgcaagtacatgagctctgtttttggtttaggcacttcctcttgtaagcacattttggggtatagttttgttcggagagtatcgaaaatcgtcgaagcgaacttatgcccttttagttagcatgttggccatgtttgtggcggccgtagctattcttatggcctcttccggtcaccggaaatgatgatcttatcatagttgtattatacatgtaagattataagtgaatgaagaatatatgttctgtttcaaaaatgttatgttttttcattctaattggagaaacataattttttcgtttcgtctctacttaaatgaatattcaatgaaagaaaggagaaagaaaaagaaatgttaggtacttgtctttttccagaattaatttctctagtataaacgaaaatattagaaaggtcaaaaagtatccaaagattggaacctcactatgaagattccaaggcaaatcaaaaattttgtatatcaatttgagttaatgttcagtatctttacattctctggacaaaagatctaaaagatatgtggtggaaactctcttgaacttatttgcagaagtgatattatcctctgttcttgcagaacctagcaaaggtagtgtctttttcatatacctattttggatgatttggttctacttatcttttaaatctcaaactctcttgtcatgaatagtttatggacatatgtatcttccatcaacatgagaaacaatcaagaatcttctctagtcttatgtggattgtttatctgcttttaaggattagataattctgaaattctccaagcatatcttttgcctaaaccaacatttttgcttgcagggctgatccatttagagcccgagaatatgtatctagtggagagcaaaggaggtgccatagcttgtatgcttttagccttactatctctagggacttggccagcagttttaacacttttagagagacgtggccgtcttcctcaacacacctatcttgattactccatcactaacttgttggctgctattattatagctttcacttttggtcaaattgggtctacaaaccgcgctcgcccaaacttcatcactcagcttgctcacgtatacttaactcccttgtggtgttacatgcaaagagacagtttcaatttgttctgaccaaccacttattcactaggataattcgccgtctgttatgttcgcaatggcgaacggtatcgtgcttagcctcgcgaatcgtatcaactcaatatccatgggctatagtaggcttatcgagttccagtatgtcatcaccatcacgcatcactgtagtcataggttagttcatgaacttatatactccggtttgaaattggttagtttccgaattcttgttttctaactttcaggcacaactttgaactatttcttggatgatagaatcaacagagctgaggtccttttcccgggggtcgcttgtttcttgatcgctgcttgtttcggttccgctgttcataaatccaatgctgctgataacaaaaccaaactccaaaatttaaaaggttgaaaaagattcattctattggtgttccgtttg

SEQ ID NO: 28420 - DNA, 2109 bp, Arabidopsis thaliana landsberg
  unsure (1)..(2109): unsure at all n locations
gttggtagagtgttgaatggttgtggtgtgatgaatatttattgcacaaagttggtagaatattgatttgtatataaatgtaaaatggaattataaaagtttgttagaatgtggcttttattttttacaaaattatgggtgaccgataaagtgattaagacataacttgtctgaagtgttctatgtaacaattccaaagtaaatggacctacctagattcaaaagtttatttacatgttcacacttatgcacaagcaattaacaactcattcatatatctttcaaagttttctccttgactaattttattttcgataataggcttatcatttcaatcttcaatcatacaattattatgtgatttacaacataatcagnttttatgtatattatatatttactaataattcaatgtaatcttttgtaaaaaaaatgctatagttttttaaaatgtaccaatgctatagcctatagatatgttaatgtgtgcaacttttacacctcaagttgtaactttcccagtcatatattactgtgatattgagttttaaaatattgatacacgtcactatgcgtaggacaaaacaactttttagtgtaactatatcacttttatgtcgtatgaaaaaaatggagagaagaaagtgataacgaaaactatttgagtcggaacaagctagtggacccgcggctgctttaatcggaccaaaacatatttttaacattttgtaatttgactatatgctgatgtatttaagaacgaccaaagagccacttatatagaagttagttgtcatatgcttgagatataaagagtcttctttaacaattttggaattacataataacttcatattctcgagtttagtttattttttcgcctattatatcccgataatataaagtgggagtttatggtttcccatttagttggatcaatttaggttttttcatagcattcggaaaagggatgcctttatacacgatgactcaatttccacatcactaacatgaatcttaaatagagttttattagctaatgcagtcaacataaaccatatgacttctcgaatgatacgtcacataatcttaaaatttcatagttaacttaaaaaaagaaaaaaagaaatggagatgtttttggccactaatgaagaagagcctagggagctctccatgtggcaacaactcctaaacctaaggagaaatggtttatggttccttttatttcaagcttaaagacggtaatatatgctttttctggtattccttatggacagcttctaacattgactagtgtttagctaacgctactaatgaagagggttggcagttttctggtgcttaaatccacaatgttgaggttttcctctgctacttgacattaatccatgtctcacaaacaacatgcagccacttctggaagtccgatcccttggtatcatcaagtatggttctcggattcagtcccaaaacatgctttcaccatgtgaatcgcctgtttgaatcgattacccctcctctcccgtttatgctctttgggaattgttggagataagataacactttccctctttgtaaaatatatgtgaaaacaagagacaaattgtttcaacgttgtcccaatagctatgacttaattgtgacgatggtgcacatcatgattgagatgccacatcatgggactctcaacttgcctcgagtctcctcgacatgataaccaataatccatccttcgtcttattgcaacccaagctgttatagttacacctaatggcaagaacgtaagaaccgaatcttctgtgttatttgttgaaacaagttgaccgagtaatacgcaacaattactctgcgagacatttcttttcgtggttttgagactctttcactcggtaattttgttgttttaattgctaaaaatcagagttgccaaacccgaaagtttgatgttctgtttttgtaagtcatttcttttaagaagtaaaaccaaaaattgtaacaaaaaatataatagaaaagaaagatcgatcatcctcgatagaatccaggtttcaactattacttagaggtcataaaatatctaatttatattaaaaataaaatgtaatc

SEQ ID NO: 28421 - DNA, 1936 bp, Arabidopsis thaliana landsberg
gattatatttaaaaacgaagatttgtaatttggatttgtacataaacataaaaactacaacgtgatttacaaccacttaagttggtttaaaatttctttcgtaactgaaacatctctatcataaaactaatgcttgctatacgactacgagggtgatgagacaagtttctatgcatgttacagactgaaatcttttaaagaaaaaaattcatgtaaattgtttttttgattaattaggttcaacaatgtctcatctttatgttattctcattctccatgtataaatatattatccataagcttggccggctctcgaaccgttctattaacaatagctactaagcaagaacttcaatatgaccactctcattttcctgcctcgatcaagcaacaacacagctgagaaagtagccaagctaattatcactatctctaaacgcttgtgattctagattgtacacgttataagtaccaggatatatggaattaagttgagtaaaaacaaagagtgatagtcactgactcaaacaaaaacgtcttggtcagtttatattacttactaaaaaaacaattaaactggttatgccatttgaaatttactactcatcaatcatcatgtctgttaaattttcagtatattataaaaacgcatttccattaaatcaaagttaattatgccaattttcagtattctattgataactcgggctaatccacatcgaagctcgaccaagtcccatgcatatggtctaggtgatcctctagaactaggacggttgacataaatttcgtacgaaaacaatacttttatcattcagtactaaaccaaaaaaagcggtttctttacgagagaatgtatttgaaacaagatacggagaaaatacggaccagactaaaaataacaaaggataaaaccaaaatcaagaagaaacttaaaagacaaaaccttctgaacgcaagagagagggccaagttgcgaagacagtatgggacccaaataccgactaagcggaaatctaacttttaacatttcctaccaatgaaaaattggcacgtggaaaagcaacgtcgcccactttaccctccgcactttgaaatctttgataagcttatcgctctcccattggccgtaggctccacgtggcatctctctgatctctcttctgctaatccttttttacccaaactggcatgaccccacccctaaacccctattgtcctttctaccaacaattacttaatgacttatacaatattctaattatattttaattatgtaattaaataactattgatcccatctccatagtgacatgtctcactttttcttccacaaaaaaatgcgtcactcttgattcatcatgttcgtagcaaaatccacgttattataaaagacgttatacattttgaaaggtaatccataaaatagtgagatggatcaagttttctacgcaaccctcgtagaattttagcaatgatccaaagctactgtatatatatagttacgtttcgtaacacaacatgtattttaccatgattatgcctcttttttttttctttcctcaaagtgacttatattggatttacatccttatttggtttaggctgagtttgttaacatagcatcaccaatagggacaattttttttttttttttacaatctaaatatctaaaatttaacttcacatgaaattaatgtttctaatacagttcttcaatcttcatgtacaatcgcacatttttgtgaaattattattacttaatcattttttctcttaaattaatccaccgagaaccgataaatattaatattgagtacgattaattaaacgacatatatgttccgtcacatttttatcactatttgaaaaatatctggcaaatttgaggatgtactccctgtttttgaattgaaaccttcaaagtttaaaaaaa

SEQ ID NO: 28422 - DNA, 1502 bp, Arabidopsis thaliana landsberg
  unsure (1)..(1502): unsure at all n locations
atgacctcttctcttgatggaactgaggaatttctaccattggacatttcggatgttaaatttaaaactagtatatcatatgtccactaaccttagctccttcatcaccgatagggtttccagaaagattaagaatttttaacataatatttgattgaagaacaccatcaaaggctttaactcctgcagctgtaattccatttgcagaaaaactgacttcctctacagtctgaaacacaaacatgggtatggttagtcaatcaacataagaatatcaggactctaatgagttggtagatagcagatgtgaaagaaggagcgaactataacctgattatacccaaggctttcagcaagaaagaataatccttcatctccaaagttgcatcctgcaagataaaatatacaggtgagctatatttgcgtatattaagacaaaaggaagatggcactacagatcacatttaattctaatgtaaatcagtaataagtaatgtcataacagttaaaatcattcaatgcacctgacatgtcaacacttctgaaggacctaagttcttttgcaaattcattaagcctctgcttggcctctctatcaaccttagcagcaaatccttgtaacaaattagtaccggccccgatcgaccatttcactccctgtgtagaagagttgttttctccagcagaagtctttggagacttaggcgacatgaacttcccaaccactttccacaaaactgtcagctgaaaacacaaattagtatagaagatttgagagaaaagacgaaacttttatcattactattctcgtatagatagcaatcaccgaattacatgacaagcaaactaatttccgctctattacttccacatgaaagaagaaaacacagtaatactagtccaagttttgagaagtgacggataaacaaaactagctctcctagcaatgctcgtaccgaaagtgacgacagcaaatgatcccaagggcaagacggaagacgcaatctgctgcactttagcattaggaaaaccactagccgcttgtgactccttataaaccctactacgcttcgagcctccatctgagttatacgccgctttgatcgccggaagtctcggacttcggtgatgaatcaccacaggagaaacaaacaatcggttcctagaaacggagctacccaacaattcgtaccggaacccactcttccattggcccaacccagaagaagccttcaaaattcacagagaaagaaaccgaatttagaagctacaagaattgggaaaaaaaaacaaaggatgaacagtagaattaccttggggagagagtggagattgagggagctggtggaagaagaagccattaaggagctgcttaattacgcatagacgcttgaaactctcgctgtgtgaaaaccaaccactngagaattaggaaagtgtaagagactaaaagagacgaattggagtagaagagaagagaagagacgatgatgaagatgaag

SEQ ID NO: 28423 - DNA, 1952 bp, Arabidopsis thaliana landsberg
tgtgatagccatatggtttgccatccatgctacgagcattttcccatacagctgtaacattaaactgggctcgataatcagaatgcacggtaagcaatgcaatgtggggattcgagtcatccttggtttgttcaaaactcccaccactcttcccatggcaatatcgctattacatcttctccctatgacccaaaggttcgaaggagaagacagccaaaaaatcatgatatgcataaaaaaaaggaacaaaaatgcagttccattaaaagaatcagtttccacaaggctggcttggaaagaagccactgggaaaatatgaacatgtcatatcaagttcagcgaaactataaatgttactagtcaagcatttcgatgatgttcaactaaatcattttagtttgttcttagcagagataagcatctagtgatactcagaacacgaactaactcaatggccatactatttttcaatagaacccaaaaatttaagttttaccttttcattttcattcccggattcaccaacccagagtttcccttcagagtccctcaaacagacagcagtgtgaccagcataggctccacttacccacttctctagggtctcaaaaccaccccaccgcccacggattttggagatagctagtaagtctccagagtgaatttcatcggtagtaatatttgtaacccaaggtttaggacgaggatagaaattagcacccatatgattcttaagaaacgctatgttagaattctccccccaaccagtattggtaaacagagggaagacatcccacagagctcggagagttcccaacatccctgcttccatgaggaatatcgaaactcctttctgcttaacctgatcaaccgtgagccagacaggcaaaacaaaaatccattagatatgttaactataaactggaaaagacaaaaagataacaaagaaagaagagcagagcagcttacatattcatactcagctttaccctcccactccttgaattccatagtgtgctctctcgaagcaaagtaccaatcccatgtcacacgatatggtgtgacaaagacataaatatccatgcacgtccaactatgtgccttatcgacctgcacaaaagacgtttcaacagaatcaattaagtattcatcattcgaaaaacagcttccaaggtgaagaggaaatgtaactctaagcctataattttttttgacaagtctaagcgtataatttgaaatgttctccgaaatatcaggaactcagaagcctaatatctaaaatctaacagcgtgagaacataaacaaacagagcttcgagatttaagctcatcaacaagtttctaagaacctcaaaagctaaacccataaacaaaaccctcaaaagtgaaaccaagaatatgaaaagcaacgattttagagctcaaattcatcattttgtaaccttaatgtgaagtgtgccgccgccgaattcggaaccggacttgttattgagctccaaccaagctttgttctcataaaagcaagcacctttccactccacggcgtcgtttctaacagaagcggagccgatgaaagtagggaggagatcgacggcagtgttgagagaattgactaccggccacgagacttgcctcggaaaaagcggaagcaggtctcgagggtgaaatggtaatttcccggatgagaaagtgagaagcagcaccagtaaggtagtggcgaagaagatgcacggagacgatgaagcagccattgttaagtcggttactgtctcgcttccgtgttgaattcgcaagtctcgatttttcgatcgtccatgactggttttcttaacgtgtttatttataatttatttcgtctatcctccagattgatgtaatgatacattcaaattaatttaatttagtataaccatttttgttggtcaaacgttctaacatattcgaatttcgca

SEQ ID NO: 28424 - DNA, 1693 bp, Arabidopsis thaliana landsberg
agatttttttaatctatttcttattaactagttgcacaagtacatttatccatggtgttgaagcttcttctcagaaagcaaaaacaatcaggtcttatgaaggatttctctcagacagtgtgtctgttgcaatagcggaggaggccctttcctcggtaggttaaagtttcgcatccttgctcatgcgaaactaaatagtaaatagtaaagaaactttgaccatacaatgtgtctgtagcaacattacagcaggaagctacactaaatagtaaagaaagtttcgcatccttgcacatgttaaatgattcaagcagaaacattgttataaaaaaaacacaagctgcacaaaaaccaatccacacttaacaaatccaaacgcaccaaataactttgtcgacaactatggtctcaatagtttaaagcacagaggtaaatggatccatcgcaacctttacagtccttgtactttaattttgagctgatagtttttcccctaattgaggtaacgtacaaatcaagaaagacattgattactatgtaaataaagtgcagtgtaggtataatgttatatccgtatagagataatacatataagtaaagagcatgcatgtggtataaagaaagaagaaagagacctcaagcaaaattgtaacgatgaagtcccatcttagcataaagcttgactaagtggtaaggattaggagggagataaagacagttaaccttgaccattttataaccaccgcatacacgtccatatgaccatatacaaacatactttcatcgtcgtcggatgatgacgatacagaccaaaacaaatcccaatcacaatcatggttagacatataattaacaagaagatgagagaaagaatatcgattggttttgagaaatatacgatattcggatattcccatgatcaaattttcaatatcgatcggtttgaaatctggtcgatctcaacatatatgacaacaaaatttgttgtcaacccttcattcagttgtagtaatgtatattcatcgaatggaatcaaatgtctcatagtcacagtttaaaaaggatctacttagaaaacttcattcacatactgtacttacccatttaatgatgacgtacgaggtaagatgcaaattgttttctcaacacaaaaacactaaagcaaagttgaggaataagttggtgtatagagtgaggaatcagatttggtaggaagacagaattattaggttgtattacatctgtataattaaagagaaagagagagaacatattcttcaaagtgcaacgcgtaattttcaatccatttgtttttgtgaaagtgggacgtctcttacctctcaaaggtcgtaatcagctttttgtacatatgacgcagaaaccgcaatcttttgttttaaaaacaaacgatagataatgaaagaaatttaaaataaatgaggtcaacgtaagtggaatactcatgataacaatggacgtggaaaaatatcaatagtaaaataatttcagaacttttaattgtataaaatttagtggaattttgttgggatggttttatttttcttcccaccgctaattgcttctccgccacacacctccttatgtttaatcatttataatcatgaatcatgatatagtggtcctccttcttcttcacaaattaccaaccacacattggttcaaaactcaattt

SEQ ID NO: 28425 - DNA, 1927 bp, Arabidopsis thaliana landsberg
  unsure (1)..(1927): unsure at all n locations
gctgcaaaatgtatcgagaaatcgcaatctcaaactgaacctgaaatcaaaagtacacagtgaaggcaagaaatgagattcagtatgattaaagaacgaaattttccttatttctcaactgtaatgaaaattatttccaagtaaaacgttggcaaaatagcatcaaattgttaccggttggctatttacctgatcgattttgtggccagaaccatgcaatactttcagaacatcattcactaaattaatattacccgagatcataaaagctctgccaaatttctttaaagtaggctgtgagatcatcttcgcattgtcctgaaacagaatgatgaccaaattagaccattaacgcaatggacggaatattaaaatttgcctgagagnnnnnnnnnnnnnnnnnnctacaatgtatgcatcttttaggagattcccttggattagaatgtgaagaattttctcatgcagctctttgcagatagttcttttgctgtatcgcaacatattgtagactgagaatgcttccgcttgagctctaatcttgccgagatgatatatcaaggacgagcaaagttcctgcaagtttttcataaatcgggtctggttaatgcaaatttttcattatctcgcattacttaacgagcaatgcctcgatgctgcttgttacctcctcaagcctgtggcctttgctgtgcatgtccagtgtggtttggtacgcaagcaggtgcaatttctccttgatgaagtatttgatcaagatatggaaagtattatagtcgggactaacggcttgctcatccattttcttcatcattcgcataacactttccatctctcctgctctgcaataggcacagagcattgtgtttaacattaccaagtcgcatttttcataagtggtttcagagtcccttgacagttcttttgcctccttaaaacgcttacttcgacataaagcagatatcatgatgctgttggcatagccatctgaaacaagaaaactgacatcattgttctgaaaaatctgagaaaatatctaaccataaagacacccctagttgtagcaaattgctgactcataagagataggtcttcaaggacagaatgaatttttcaatccaagttattgacaaatcttgaattaaatcaatgaatagtgtttatctcaagatatcattgcaatatattccgatcctatactgaacagcagtgaaagcagcaatcattaaagaggcaagaatgaaatatgaaagctaacttgctaacaaatcatcagcttaataaacacataccagatctaacacctttccctttcatatcatcaaagattgacctcgcttcttctaactttcccgcctttgaaagaccatccatcaacatacaatacggcatctagagaagaaaacaaatttttgactataagataattgccaaataaataggaacagtatatgagctctacttataaaagtaaatgtttagtaaattcaacattttgcacaaatttatatttccagccaggtttatattgctcttttctagaatatatacagccagatctactgaaaaaataatatagcctaattacctcgttctcggcgtacccagcagattcaagttcagaaagtaattctcttgatctatcaaacaaccctcctttgatataaaccttaagtaaagttgtcatcatcacctgcaaatatttgcagctagagttaatcaagcgagaaggaatctaaattactgagggaaccaatctctaatataataacaaagtataatgaatcatgttaaaaaaaaccttcaattaaacaagaatatccaaaaagaagaactacgaaaaagcaataagaggaagcctgaaagaatatggaggaatgcattcagagaaggtgataggatctggtaatatgtgttcagccattcc

SEQ ID NO: 28426 - DNA, 548 bp, Arabidopsis thaliana landsberg
tgggacaggctcaaagctagaggtctccatactcaacaggagttgaatgatcaccggtcacacacaagaaatactggtaatgtgtagaagactcagcttgccataaaagcttagcaagctgacgtatcgccttatcaacagcttctaaacctcgaactttgaacattgtcgccttatcatgacctgcatcatctatagcctgcaacaatatagaaatatgatcgaaaatcagagtggaaatttttaaattttgtgttaaaagactgaaaaaagttttcacctttatgtgaaggaacccgaaatcataaccatctgaccttcctggtttatgcccgtcctctcccggtacaaagacattagggcagggattcaaaggagctgagagagcattagctatagcagttgctttcgatgtcagaagcgtccggtaatctccagtagctcccggagcttctaaaatgtcaataccgagcgacataccaagtccagctataatctgtgttggtgctaccatacatggccacaagccatgcttctcatgataagga

SEQ ID NO: 28427 - DNA, 1598 bp, Arabidopsis thaliana landsberg
tttttgagtctctgaattaataacttaagctttaggattggtgttgtttataggaggagcagaaggaaacatttgtaccgattgagttggggataccgagtaagcaacctagtaattatttttgtaagactctcacagctagtgataccagtacacatggagggttttctgttcctagacgtgctgctgagaaagtgtttcctccattggtattatactttttcttttacttactttgctataaattgttgttgagaaaatatatgtattccttttaatatcttgtgtcttccctgttgcaggattacacactgcagccaccagctcaagaactgattgcaagggatctccatgatgttgaatggaagtttaggcatatctttcggggtaggtttcacctttcctcggtgtgcgttgatgatccctttttaactgtagtcgccagtgtaaaaatttcaattggctgttaagtatgtctgaagcagcatctgctgttattttcactactcatgtgtggtttagttgaagaaactacggaggctctgtgttcttgtcgttgtctattataacgtggaattatttacttgttcatatgaagttaagttgatttgaatccttcttcttggtttgttaggaataacttacatggttttggtgtgattatgcaggacagcccaaacggcatctcctaactactggatggagtgtctttgtcagtgccaagcgactagtagctggagattctgtcattttcatcaggtttagttcttttgttgtacgttcagtttgtggattgtgattatatttgtaacactattacttgtttccaggaatgaaaagaatcaactctttttgggaattcgtcatgccactcggccgcagactattgtaccatcatctgttttatctagtgatagcatgcatattggactccttgctgctgctgcacatgcttctgcaactaatagctgtttcactgttttctttcatttaaggtttaaaaatctctcccacctgcatctttttcatctctcggtatatccgataatatatcctactaatattctcttcatgttcagggctagccaatctgagtttgtgatacaactttccaagtacattaaagccgtttttcacacgcgtatttcagttgggatgcgctttcgcatgctcttcgagacagaagagtcgagtgtccgcaggtgatgatgccacatatctggaaatgcaatcttgaaactgcgaaaactatatcattatgttacacatattactttaacatgttttctgacagtggcatggggaactttccaggtacatgggtactataactggtattagtgatctagattctgttcgttggccaaactctcattggcgatctgtgaaggtaacaacactattaagcctgttaccttatttaaattccatggaacgtcacacagctttctgatgatttagtccaatattactctgaaattccatcaacattgatgaactgtggcattattggtgtaggttggttgggatgaatcgactgcaggggagagacagccaatggtttctttatgggagattgagcctctgactaccttttc

SEQ ID NO: 28428 - DNA, 2068 bp, Arabidopsis thaliana landsberg
  unsure (1)..(2068): unsure at all n locations
atgagagacgtattcgaaggtaaaacaaaaggaacccagaaaaggagagacctgaagaagaccatagatgactagnnnnnnnnnnnnnnnnnnnnttgcgaaaacagctttccatagcttcttcttcttctccttggcttcgtttacagaatctggctcagccatttttctccattaacgatccgcttctctctctccatcgccgagacaagaaacgaaacaactaaccaaaacattcaaccagtcccacccgaaccgaaccgaaccggaattaaaaccactggttatcaaattttgtttataccgtaggcctttcggcccaatatgtatatttagaacttaacgacgtcgtataacttcttctttcatccaaaactcgccagtcgtcaatggctcctcggtttactacattaaagcatttacaatctaattttcggtttacactttaaccggaatttcagtaaaagaatgtttttggattaacgatactctatgtgagtccaatattatagacaggttattttcttaaaactctttacccattttatttcattatcctttagttactgtaattgcttactagttactatgtataagtattgagtttgagtataacagatacatgaataaagatcaaaacaagctaggtctaccgaaagatttaaaaaagaacaaaaccatagctagtttgacatttgtttggttaccaaatccgtgtgttgacgactacaaatagtttatgttgccatttaaccaagattttttgtatggctatgtggtggcgaattcatgtctaagaccatctccattccacattttataagaagggtgaaagtaagagcaagacggctactttaggtaatgttttgagtgaactttgctttgtattatttcacttggtctttaagttacaatattagttcccttttatagctagacaatactaggatttcaatgattgtaaactgacagctgactctgtcttatcaagcttcgcaggtcaccaaacaaccaaatctgttctttgtgttgattggctccatacagacgctcctcttctctgtcttcactctggttttgttttcttgcacaggtggtggtcttgtctgttgagaagaggaagaagacttgttgggcttcgctgttgtgttggttgtgttgtcattgggcctgtttggtgagtggcccaataacccttttcctttgttaagctgagcaacgtcgttctctttctttgactcttcagctgaacttgagctctgattcgatctcatttcagatattggagctgttgatggcggagcagtgaaactcttgctaataaagggtctttccaccattacaatatattatgtaaaaataaaaatagtattttattatttgtgtgtctttaaatttgagacacaaggtcttcaatgtcttagtaaaaacatttttaagaataatatctttaatttaatgagcatttacatttatttaacaatattttgtaactttagttatttaaagatactctccaaaaacatgcaatggagatgctctaactatcttggccataaccgtagctaaatcatagatttttgtaagttatgtagcatgctatggtttgcaaatatatttttataagctttcatagaattagacattacatttggtcaagtacaagaaagctgaaagcctacgcaactaactaacaaaataagaccagcttatatatttttaagttaaattttggattcaaattcgatattgttgcaagaatttatatttgttcagcctcttttgtgtctagatatacatattttaaaagacacttcaaataggatgttatatataatatacatgatatatggtgcccgctagggaagctagtggatctagtgggttcacgtggaattattgatatgggaatatcaacacatgcttctgttgctgaagcgttggccttgcattgaagacaaaatcatcgagtcgatactcttacccaaatagagaatcagcttgagttagttcgaaggaatcaaattggggaggaagaccgctccctttggagagctaaggatgatag

SEQ ID NO: 28429 - DNA, 1582 bp, Arabidopsis thaliana landsberg
gctttaccgaatgatctattgtccaaatagtctctttggcaattcaatacaatcaaccttttacgatatatatatttgttatttcttgtacaaataggatcaaaattgttatttctgaagcaaattttctttagtttggatgtcaattatatcctcgattaatatgtaatcacggaacggattcacgatgcgttattttagaagcaaatttatacttgatagtacgttcagaggcatcgcttttgtacaaattgaagcgggtttgttcaatatttaaaataacacaggaaacattcaaatgtattattgatgttgcttaggtttgtgaaatgatatgaaccatatcgtatatgttactagatttttcttatatgttttaatggtagtggggctgacctatcattctgtttggcattaccaatcagactatcagagtattcaccattcaggattccataactagaaaaagaaggggtttacattttctcatactgtataattttctactatcagagattttatcgattacattaatctcatagtgattattctgatttataaaaaagttgacaaaataattaaaaccagtattttataacaagattgtctctctcccatggccattattttgacctctgacttatttaaatcttaattaacagcataatactgtattaagcgtatttaaatgaaacaaaataaaagaaaaaaagaacaaaacgaaagagtggaccacatgcgtgtcaagaaaggccggtcgttaccgttaaggtgtgtcgaactgtgattgggccacgttaacggcgtatccaaaagaaagaaagggcacgtgtatagatctaggaaaaaagaaagaatggacggtttagattgtatctaggtaccaggaaatggaacgtcacaccaaacggtacgtgtcggatcctgcccgttgatgctgacggtcagcaacttccccttattcatgcccccctgcccgttaattacgtgtaacccttccatgcgaaaatcaaacccttttttttttttgcgttcttcttcaacttttctttttaaatcaaaccttttctttttaaaatcacattgcatttcctaacgctcaacaaaatctctctctactaatatctctctctctctctctattgttgaagaagactcataatcggagattgtttgtttttggtttgctctgtaaattggagaagttttgttagagatcaaatggctgggatttgttgcggtgttgttggagagactgaaccggcggcaccggttgattcaacttctcgagcttctcttagacggaggttagatctacttccgtcgatcaaaattgttgctgactccgccgttgctcctccgcttgaaaactgccgtaaacggcagaagcgtgagacagtagtgctctcgacgttaccgggaaatctagatctggattcgaatgtgaggagtgataataagaaggctagatcagcggttacgaattcaaattctgttacggaagcagagagtttcttttccgatgtacctaagatcggtacgacgtcggtttgtggtagaagacgagacatggaagacgctg

SEQ ID NO: 28430 - DNA, 2776 bp, Arabidopsis thaliana landsberg
taagagtgaaaggaacgaacttgcagattgaggctttaacccagaataaagctttatgctacagtttcaaaaaggacataacaaagcaatcagatgcaagtgaatatgcgtgaacagagacaaaagtatgtaaatttagataaatttgaagattacctgggactcagagaaggctggtgaagcgttgtattaaacgagaccgccatggtcgtcgagcgtgttagagccgaacactgatttttttgtttgttttattttaagactagaagaagtggaaaagcttacatacagattgggtaatttgttgaagaagattggtttattggtttgctaaaccgaattggtttaacatgtgcaaattgtatgtggttaactttgtttctgattttacttggttcatgactaaaatgaaatttggaacttccgaatccttttaactgaacaatgaccaaacaaaccgtgtttattcaacaaaagagtgacaaagtaatcaacacaagcagagaaaaccgactgatactaaaccggtacagagagattatttgtcaacaaagttcactataaccaatcaaactctcgatctcaatgtaagtttttattcatttgaatcaaatggaagaagaaaaaagaagcaagtgtgatgtgatgatctaagaagtgggcttctcataagagttttgatctctaaaatcagaaatggcgctgcgaatcatctgctcaacatgtggttgcacaaacaagtgagtactatcaagtacatgaattatgaatttctgagacggaggcatcgaattgttcatgttcactatgaactgtgtcatcggtatatcgctgcaaacaaacaaaagacagaaagaaacattgaatgattcaattgtgttcctcaaaagatttgcttaggaatcgtaagaacggtaagaagtaccaagatacgaacactcctttgattgcattaaccataagtaaaacctgtaaaaaaatacgaatagcctgagctcaaattccacgacaagatgactcgagaacatcctcgataactcagaacaaagatgaatgaaagattaatcctgtgtgtcaaccaaaggaccccaaattactagatgcaacgatttaataactggggcttcgctgcctaaacaccacaacatagactccattcccaaatcttaaagactttacgattacagaccaaataaaaataggatggaaccacatcaattgggtctagagatcaaccacacacctgtgtaaccacacgaagaagatcggaggaacaatccagagggtcagcgatgtttgacgcagagaaagaaatcaccttgataacgacgattgtcagtgtgagagaaggattagctttataagataacctaattaccaaactgaaacagaaggttcgaatcatcttttaagttctcgtttattacatcactctaaagggtttcccacttttaaaagtcaaagttcacatgaattaactttttttcttcttatatttgaaaatattcagtttcattgttactgtaaccagtagtttacgagcttgattgcttgtacaaataatgatcaagacataagataaaaaaaaaaacagttaatctgaacatgtttctaagaaataaataaatacacaaatcttcctgccactaatcttacaaacatcacaaagcaaacacttttccttgctttttttcatgtccacgagcatgtcgctgtatctttaagcgtagtgtcaataaaccgaagaagatggaccatgtcttcttcattagtcagtcctcgtaatcatccagcgccgaataaatcatcctacgaaaaaaagttgcagacagaaagtgttttagctctcttgatctacttatggttaagcaataatgggattcgaaatatcttttctcgttaccagaagatagtgagaaagaggttaaggacaatgtaagcaagcttgaacagccgtttcttcttctcccagtttagcaaattgaagatctcggtgacatctactaagtgttgtcgcttcgagtaactgaacaacggagaaaccgaaaggatatcaataccacaacatttgattggagcaaaagattgagattagttggacttacagatggaaattgtagtagagataggggagacataagagtgtcatgaaccagtgtcctgttaggaggtagaatacgcatagaactccttgaacaatgaactccggtaaaaccactgagtttattctcgacgcagagtcgtaagggttgatataatcaaactcgagatcacgctaagcaaacaagctgcaacaaaatatcatatcaataagcaccgtcagtttcggtacaaggacacaagcaaagcaaaatagcagagacatatgatcaagactctcctataaaatatctggttattatgaatctcattactcaaaacattatagatcaactctacagataccaaatcagagcttactaatccagaaacattaagaagtaaactctaatacccgtgagcacacacacttgtacacactcacagatacttgctggattgatataaactgagaagataacatctagagattcaatacacatatatcaagaagcaattgaagaatttaagaaacaaaattgtttctagttgacagattaactagttattatataaagaaaccctaaagttactaactttatcacattcccaaaacttagaaactattctaaaaaacgatttatgattgaaagaacacaaaacactaaatttagttcaatacagtgatcgaataagc

SEQ ID NO: 28431 - DNA, 1178 bp, Arabidopsis thaliana landsberg
  unsure (1)..(1178): unsure at all n locations
ctcattgaaatagaagcagatggattttagtatggggcgctacagacttcatgttctctctagcgagtgggagcgagtcgagtaacaaccaattatgaggaatctcataagaacaacggttaaactcgttgatcaaaaactggaagtcaaatgatttgccgttgtgtgcaactaacatcacataacctccaggcttctgtcgactctcaacataccgnnnnnnnnnnnnnnnnnnnnnnnnnnncctaccaccaacacaaaaccatcattagtttgatccaatggaagccacacaatcataaacaaccatcatttgttacaaactaatcacagaaattcaaaagaactctacatgatacaattttatctaaagactatgtataccttggaacctcgggtcgacagaccatatcattcctgattccatggatatgtgcgttagttataggaacaacacccgggttgacaagagtctgaaatgtgctgtacccaccaccagctatatcctgagctgcaatttcaattatccgctcatttttccgatgcaaaccagttgtctcaagatcagagactataaccgtgaggagcttagacagatctttatcttgcgcaagccgttgctgaagattaccaaaaggctgtaccttggttctactcttttcatctataatcctggttacaggaactgttcctcccaacacactgctctttgtgttgcttctactaccttgtgtagttgtactcacgttacgtctgatccatcttgctttaccatcaacagaagaagctctaacatcaagcagcttcaagctagagctgttcttgatccatccatgaacacgttcacagcaagaacttccaaatgaatggattctcaatctagagacttgcgagattgagacacacatcagatcctctcgctctctctttctctcccccaaataagctcaagaatcaaagagacaatgtctcctctcttccaatctgtagatccagagaatgaaaattagaactaggcacatataaacacacattggatacaacttttaacagtttcattcccttctgatcctaaagacgagcagtttcacaacatcattacaaaatttcttaaaaaattataataactttgacacaaattttgagtttttttctatagagatatagaaaggaccaag

SEQ ID NO: 28432 - DNA, 1132 bp, Arabidopsis thaliana landsberg
gataacaaaagagacgttaaagcaatgtttctctgttacgcgctgacgcatctctaacctttttaggttctgtactatctttatcttttagtcaagtgttagaaaagtatcttaatcagacggttagggttctttattaattactagccgcaatttttttattgaaacaaataaataaaaaaataacccaagaacaacaacaatctggtctgctgatgtattaattaaagaaaaaaataaaacagagcaagaaacaaaaaaaaaaatgtaaagaaagagaaaaaaaagctttcgtagtgtctattgaaaccagagaaaagccaaaggggatgcaaccaacatccgtcggtagtagcggcggtggtgacgaccgaggaggcagaggaggaggaggagggctaagtagaagtggactatctcggatccgttcagctccagcgacttggcttgaagctttacttgaggaagatgaagaagagtctttgaaacctaatcttggtctcaccgatttgcttaccgggaactcgaacgatttaccgacaagtcgcggctcgttcgagttcccgattcctgttgagcaagggttgtatcaacaaggtgggtttcaccgacagaatagtactccggcggattttcttagtggttctgatggatttatccaaagctttgggattcaggcgaattacgattacttatcggggaatatcgatgtttctccgggaagtaagcggtctagagaaatggaagcactcttctcttctcctgagtttacttctcaaatggtaaaccaaaattagttcttaaattagggttttcttatacttgccaaaaataggatgaacttaactgacttattacttgttttagttaatttgctgaccaagttctcgagattgaaaagaccagtcttgtcttaaaattgacaacttgtgtttttctgaaccaaactaagcaagttgcagtttctattttaactcaaaaaaaaaaaaattgcagtttttgttgttggctctgtggctttaatgtgtcaatgtgaacattaaagaatgctcctatgggtaaagtgtttagaagaccataagtccacatgatggtatacttagtattaagtaactacacttgatcaaaattt

SEQ ID NO: 28433 - DNA, 1774 bp, Arabidopsis thaliana landsberg
tatttttatttcatagttacaatttgttatgaagtaacgtcttgctaaacccgtcccgtaaaacaactcattgattttataaatgttgatctcatttatgatatgttagtgaatcattatctaaatattttgtaactttgtagtaataaaatggggtaaacgacttgtgtccccctcggaagtttcatataccattagaactacacagaattccaacctcgatcttggtctacacaaatagaaagttctagtcctatttctccctaatttaaaagttcaaaacctcaaaacacataaacgtttgattaattggtttataacataaaccgatattaaaccacttaaaccaatcctaaaccaaattaaaaacctggcccatctccttctaccccatttgacccgtctccttctccgccatcacctcccgatcacaaaaccaacatatacatctccattcctggagtttcgaagcttaaaggaagagaagcgagggaaggcgatgtatttgcggcggctcgacaatagaatctaaggacgagaagtatcgataatggaattgaaattctccgtatcgttgtccatagaagaaactgaagaattttcctccattgtttttggaaaaacatcatttgtgaacacattatttgaaagagcattgcggatatatgaatttggaattaagtcaatctcaaattttagtctttgactgaaactctattttgcttttctttttaaataaatttttctggaaataaagcaagtcctgaggggaaaccatgacatcgttcgtagaggagacaaacccaacgatttggaatctcattgttgtctcattttggtgaatcgttatcattttgtagcttatgacacggtttttgtgccattaacatttcaatagttggagagatcaaaaagcaatgtaaaacagagacaaaaatcgcagagcttgagtaaatcgagttatacaacaaaacaacaaagccgacttaatcataatcttaaaaagcaaaaccaaaaataaatccattgtatcttctaatcttatttatccttgactgaaagtgtcttgagaaagtttgtttggagaaataatgcattgagaaggctctaataactatctgatttatcgtgtggttgtggctgaaatgatttgcaatgtggctgatatgatccgtcttcatcatcatgaatttctccctcaacaatcaattgattaaatttctgggttctctcaaattctagtgttcattgattctgagatttggggattttcgatcttaaatcgggtctactcaggttaaatccggttcagtttagtcctaatgtggttaacgatgtctgggtaacaaaaaaccgattataaactatgtttatgtgtgttttaggtttgaattttgattttatgtgttttgaggtttcgaactttcaaattagggagaaataggactaaaactttttatttgtgtggaccaagatcgaggttggaattcggtgtagttctagtgctatatgaaacttccaagggacacacaggtcgttcaccccttttattatgatactattaaacaaccttcagcaatcagcatatgcgattatgatgaacaaatttcacaaacaatgatatctcatcgtagttttctctacaacactcggatccataacgaacgttcttcatgtacgacatctccttggtggatatgctctattgcaacatgcctaagggacccagtccttcatgataaatccatcattaatctgccaaaaatgccttttt

SEQ ID NO: 28434 - DNA, 4072 bp, Arabidopsis thaliana landsberg
agtccccgcaaatatgttgtctagagttaagaactcaggagctggagataagaacaagaaccaaggaggcaatgattctaactctacaagcaaattgcatcaactgctcgatacgaagcctcgagctaaagcagtagctgcaggctgatcgatggtaattcatgtcgatttctacttaatttgtcgacataaacaaagaaaataagtgctactaatttcagaaaaacttgatagatagtatagtagagagagagagagagagaggtgtgatgattattgatctataaattttcggagagagagagggagaaagagaagcttttccttcagatgaaaatttggtgttatggtttgttactgttaatatagagaggcttttctttttttataaaatggcttcctttgttgcatttccttgttttagacctgatgtaattttatgaaatcggtgttattgctttgcgtaagcttttgtttcttttgtcaaggtttcatgcataaaggatctttcttttcaggtttcatacatctctctccgaaaatttatagatccaataatcatcacgaataacacaaacattatgagtctgtctttgggtgattttcttcgctactcttgaggactgtcaatcacacaaggcattcttttctacaaccgagtttattttataaaagctgaatattaatgctcgctcacacatagagcaggttaattaacttgtactgagaactctggaaatgaaaactaaagattctgtcaaatttcaaaagctttatcatcaaggtatttgtattggtagtaaataaaaacatgaaaatgttaaaagagagagaaaacaaaatccggaatgggagactttttcaaagattctaaaaggttgatgttcaagtagtcggaatctaaatcttgatgttgaagtagtcggagtcaaaatgatgcagcctcacgtaaccgtcttcacctccactagagaaactgaaatatacattccacaaactcagtgagagagccaaaacacacactcaaaacctcatcatgtgaggattgtgtcaatcaatcaaaatccaaatgttgttaatttacctcttcccatcaggattgaatgccaaagcatttataggtccaaaatgacctttcacaccaccaatttcctcttgcagaatctatatattataccaaacacaatgatacacggttatttaaatatgtgtattttccaggttacatgtttccaagtaaaacactcttattataaacactaaccttgtcgtaaaacttagcttcaaactttccagcacgatgatcagtggtagtcacagctgatgcatcttgaccacctccaagtacaacctaaaagagagagcagaaacattcacaaagataacatcatgccttgctgattctgggattcgaaattgaatttcatgaagcattagtgcatacatggttgagaagtggagacagggagacagcatttacgggcaccacagtggtgtaagtcttaagaagagtcagcgttctcatgtcccaaagctgaaacaatcaacaaaagagaacactctattagatgatttatatctatatgtatagtgcaaaaatttgaaacaagatatactgtacaagtaaaagaaagaagcacatgcctttgcagttttgtcaagtgaacctgtaaggaagtgagagtcatcagctgctttgcagagcgatgtaatgtccttcttgtgacccacttcctcatctgattgcttgagcaattttcccgtctagtaacaatggcagtagcaccacataaggtttagttcataaccttaaaagagagaaattaatacacaagtaaggccttaagaaaaattgaaatacctcggcatcccagattctgataactttatcttcaccaccactaacaatagtttggttcaggggaccccaaacagctctattgatcctcttctttccatcaggacaatgaaggacaagcacagactcagcatcctctacacaattgcatcaaacaaacaatttccttttaacacatacaagaagttggctaaaacgtaagtagtaattcagctaggaatgtacaacttacgttcctcaggatcttccgcaatacgcttcacatgaatagcagcggtacggtccacgaagtgatcagtggtaatcactgcaagacgatctccaacagcgaaatccacagacctcgtaggggcattaaacttgaaagtgaacaattcttttccagattttacatcccacagctttgcagtctgatcagcactaccagtgatcaatcttgacgagtctcctaagaaatcactaaacattcagctttgaaagactaagacgacagaattcactcgatactataaaccctaaacaagcttgtagctaaggggaaacaatgaatctaatcatcgactcgatactatttgaagagaaattgagaaacttacgggagacatcacagcaccaaacagcaccgttgtgaccacggtaagttccaaggcgctcgccgttatcggcaaaccagagggtgggtgtgtggtccttggcgcaggagaaaagcagatctccttctctgttgtacctcagaaacgtcaatggacgttcatgtcccttcatcaggatcggcctcatcttcagtttcttagggtttgatgcgaatctttgaaacagatacgaaatcgaatcaatcaaaagacaagaaaaataattgaagaaacgattacggaaaacggctttcttcttcacctgttcacttgaagacgagagagacgacgaggaagaagtgcaaaaaccctaggaaatcaactttgtcctctcttttgacacttttacccttttgtaatttttttaattactcgagatgccacagtttagcaaagctcagtggcttcagcgtttttagcttcttccctatttgatgagttcgaacctcgcccgttgcgcctattttgtttttttcctttctcaaaagcagtttcatacgttttttttttgtgggtgcatatgtctatttgaaaagacaaacaacaagctttatcatcaaagtagtatattggtaatttggtagtacatcaattctgaaaatgttaaaaagagagaaaatattatgtggaatgatgaaaaaatggaaagacatgttcaaagaatctaaatcttgatgttgaagtaattggagtcaaaatgatgcagtctcacgtagccgtcttcacctccactagagaaactgaaaatacattccaaaaaacactcagcaacaaagcctaaaaaacactctcatcaactgaggattgtatcaatcaatcaaaatcaaattttgttagtttacctcttcccatcaggactgaatgccaaagcattaataggtccaaaatgacctttcacgccaccaatttcctcttgcagaatctatatattataagaccaaatacacagttacatatctctttccaggttacaagtttttaaataaaactgttttactgcaacactaaccgtgtcgtaaaacttagcttcaaacttcccagcacgatgatcagtggtagtcacagctgatgcatcttgaccacctccaagcacaacctaaaagagcgagagcagaaacattcacaaagataacatcaagacttgttgcttttgggaaccgaatttgaatttcaagaagcattagtgcatacatggttgagaagtggagacatggcgacagcatttacaggcaccacagtggtgtaagtcttaataagagtcagcgttctcatgtcccaaagctgaaagaatcaacaaaaagaacactctattagatgatttatctctatatgtaatatgtatagagcatatttttgaaacaagtaaaagaaagaagcacatgcctttgcagttttgtcatgtgaacctgtaaggaagtgagagtcatcagctgctttgcagagggatgtaatggcctccttgtgacccacttcctcatctgattgcttaagcaattttccagtctagtaacaatggcagtagcaccacataaggtttaagctaataaaaaaaaaagagagatattgatagacaaaagaagag

SEQ ID NO: 28435 - DNA, 944 bp, Arabidopsis thaliana landsberg
  unsure (1)..(944): unsure at all n locations
gtgttctacatcagcaagtggccaaggtgagggtgtgatctgcagaaattcgattacaagtttctatgtttattcttcttgattcattgcataggaatatatctgtttgcttagtaataatgaattgttaattaggattggtgatatgatgattgttttggtaatataggatgattgaattattgtacttgtgataacaagttaattatacgagttatatgagaaagtggaatcacaacgaaaagtggaactgtggaaaaatagaacagtggaacagtggaaaatggtctacattgaattgacgggttttttnnnnnnnnnnnnnnnnnnnnnnngtccagtggaactagataaattcaaaggtcagggagatgatcgaacttggttatgatgtggagatcttgcttaagcaagaatgagttgtgtgttatagttttgcatagtgatgcagactatatgagtattgcgtctatttttctatgtgattgttgagtatggtttgaaagtacaatcgtgtatcgtatttcaagtggacggaaaagatcctctcactgagtaattcattactcacccatttttccccttttttctcatgtcacagtgagaatcgtgtgtagtcgctcaagtccgtctcgcttatggtgtattttaggaatctcggtttattttctttatttgttattttattttacgatttattacagagttttcaatgatttaagattctttttaagaaaagtttatatttgaattaagaaagtggaatagaggaaaatataagtaaggtaaaagcacgcagtctcaatgttgagggagannnnnnnnnnnnnnnnnnnnnnnnnnaggtaaagtcaagcccgtgcttgacccgaagcttagtcaagagtttcttaaaaatagattttacgagtgtttaaaataaaaggtttagtattgataacggg

SEQ ID NO: 28436 - DNA, 557 bp, Arabidopsis thaliana landsberg
ttatgaacatttttaaatttaaaaacgaagcaccctcagtataataaatctcattatgatttcaataacaattttcattaaaatatataaatgcatgccgtattttagaaacgaaaaaaaaaaaggcaggtcgtgatatttcatttcgtttttgggtcaaacatggcacaattggttagaatcctgtattttttgagtagcaacaacataaataaactggaccgaatctcacaacaaagagctacaaaatttcctgaacaaactcaacaactttgctcaccaaagatggctgcaaaaatgagctcttcttctgtataataaaccttacaaaaaactttttgtgtaaggtctcattccacaacggccgttcttttctccattagggactcaaagaactcagcacataatttctgaagtggcgggaaatttagtgtggagccgctgaatattgtttcccacggtctttctgatgatacaaacggtgttcccaacgactcaacatcctccattctcttcttgtcataatcaggtaactgcccgtataaggatgtgtaccc

SEQ ID NO: 28437 - DNA, 1919 bp, Arabidopsis thaliana landsberg
tatgtttttgggttaatcttacaaatggttgaccatttaaatttcaaatcttacaccttttttgactattttactagctccattaatttcaaggtcgataataaaatatagtattaatcacatttcattcaataaactctagattctgtaataacaaaaaataaaataataaaacactagattaataataggtatttaataccaaagcttttacttttgtttcccgagaagagagagagagagacctatcagtcccattttccgtgttcagagagcgaagtggaaggtggttcacgttttcgtctaatctccgactatcactgagattggaccatttggtttctgggtttcttttggtcagataaagttacaagcttgagaattctcgatctgtggtttttgtttctgtttcttatgaacttcgagttttgaagatggatctatcttctcaacgacaatccccaaatggttctaggggttttcgtcttcaagctccattggtaaagttcttacctttcttcgtttctcaattccattggtaggtttcgctacaaaaacccatcacgcgttttctgggaaatgtttagactttgacatgattctgcttttaatttcttcaatttgtttcctttttgagaaaccctagctaaattctccaaatttggtagtttttgactcttattccggaactgtttctgactatatatctgccctaaattgcaaaatgcatctttgttaaatcattatggaccttctctttttgatgttctgagattggaatcttgcaggtggattctgtatcttgttattgtagagtagattccggtcttaagactgttgtagaagcaaggaagtttgttcctggttcaaagctttgtattcaacctgatatcaatcccaatgctcatagacgtaagaattctaagagggagaggactagaattcaacctccgcttctccctggcctccctgacgatctagctgtcgcttgccttatccgtgttcctcgtgcagaacatagaaaactcaggctcgtgtgtaagagatggtataggcttgcttctgggaacttcttttactctcaaaggaagttacttgggatgtctgaagaatgggtttatgtttttaaaagagatcgtgatgggaagatctcgtggaatacgtttgatcctatctctcagctttggcagccgcttccacctgttccaagggaatattcagaggctgttgggtttggttgcgctgttttaagcggttgtcatctttatttgtttggaggtaaggatcctttaagagggtcaatgaggagggtcattttctataatgcaaggacgaataagtggcacagagcaccggatatgcttaggaagcggcatttttttggttgttgtgttataaacaattgtttatatgtagcgggtggggagtgtgaaggaattcaaaggacacttcgctcagctgaggtttatgatccaaacaagaacaggtggagttttattgctgatatgagtacagcaatggtgcctctgatcggtgtggtttatgacaaaaagtggtttctcaagggtcttgggtctcaccaactagtaatgagtgaagcttatgacccaaaagttaattcatggagcccggttagtgacgggatggttgctggttggcgtaatccgtgtacttctctaaacggtcgtctttacggattggattgtagggacggatgcaaactcaaggtatttgatgaatccacggattcatggaacaaattcatggacagtaaagctcatttgggaaactcgaagtcgcttgaagctgcagctcttgttcctctacacaataagctttgtataatccggaacaacatgagcatgagtctggttgatgtctcgaatcctgacaaaaacaaccctcgactgtgggaaaac

SEQ ID NO: 28438 - DNA, 1115 bp, Arabidopsis thaliana landsberg
acgccaccacagacactcttgttagtacgggaccgttctcgtctttttgttttgagctcgtgccgctgaacgctgatttcacggaagaaagctggaccgttgagggatttaatcggaatattctcacgcatcgtgaagggaaacgtccgttgctcactggagacctaacggtgatgcttaaaaacggtgttggagttataaccggacatatagctttctcggataattcaagctggactaggagtcggaagttccggttaggtgctaagttgaccggagatggagccgtggaggcgagaagtgaagcctttggatgtagagaccaacgaggagaatgtaagtagcggttactgcgtttggttagctgttgcaatcgcggttaaaacgtttagaatgaattatatattaatccgtttgtttatttccatttgcttatgcagcttataaaaaacatcatcctccgtgccccaacgatgaggtttggagactagagaaaatcgcgaaagatggagtttcggcgacgcgtttggctgaacgcgagattttaaccgtcaaggattttcgccgtttgtatactgtaaatcgaaatgagttacacaacgtaagattatcattgatagctaaaatagctaaaatgaatcttgatgtctataatcttcttaaccattgacaaaattgtttcgtttttcttttcacagataattggtgcaggggtctcaaagaaaacatggaacacaattgtatcacatgccatggattgcgttttggacgaaacagagtgttacatttataatgcaaacactcctggcgtaactcttctcttcaactctgtttatgagttgataaaagtgtcattcaatggcaacgatatccaaaaccttgatcagccaattctagaccaattaaaggccgaagcttatcaaaaccttgaccgcattacagcggttaatgataggacctttatgggtcatccacaaaggtccttacagtgcccgcaagatcctggatttgtcgtaacatgtacaggaccgcattttcattttctttcaaggaatacaatatataaaggtgacggtgtaaagaatttggatgaatccatattatactatagacaa

SEQ ID NO: 28439 - DNA, 1964 bp, Arabidopsis thaliana landsberg
tagctgaagctaattcaacaagttgttatttttgctttcaattttcttactttttgatctctcttttccacgaaacctcttataatagatttctcatttctgggtctaaaatctactttctatttttgggcattgatttttattcttagataaactagattgaaggcaaagaaaccattttttttttttttttttttctagattctctctaggtttccctaaatttctcaactactcctaaagagttttgttacgtttctgtgtgattctcctttttttcttgacgactccaaatttcgtttttgcgtaaatggtggtgaagatgatgaagtggcggccatggccgccgttagttacgaggaaatacgaggtgaagctttccgtgaagaagcttgagggttgggatctggtgagggaaggtgtaccggagaaagatagattaacggtggagattcgttggaaaggtcctaaggcgacattgggatctttgagaaggtcggtgaagaggaatttcaccaaggaagctgtgggagaaagcgatgtcgtttcatgggaagatgaagagtttcagagcttatgttcactcacttcttacaaggacagtttgttttatccttgggagataactttctctgtcttcaccaatgtaagttttaatcagtatccgaagatttaaaatttaagttttagattcaaatgttgaaactttggaaatggtgaattaggttgtagatgaaaccctagctggataatcatcaaatcatgagactctttgaatttattggttgtaagattttgataccaattaatgtctcaacctgtttgattcagctgattctaaagactttaaactagaccttgataagattccttctattgtagaggttgagagtataggtaattggttctgtttgttagtgtcatcctcaaagataaagaagattgatatttgattttgtttctagggaatgaagcaagggcagaagaataaagctcctgttgttggaacggcatttttgaatcttgctaagtacgcgtgtgtgaccgataaaaaagaattcgatataaacataccacttacgctctctgcttgtgtggcctctgagacacatcctttgctctttgtatggttacttctctctttagacacttctctactttgttggctggatattggttttttgacctttgagaatctcttgttcctttaggtatcattgagcctgcttgagcttagaactactccagaaacatcagactcggcagcacaaaccgcggttgtgcctttgcctctcccatctccatcgccacaacagcctactgaaactcactcagttgagaaggaggatgtctctgcaatcaaagctggtctcagaaaagtcaagattttcacagagtttgtttctacaaggaaagccaagaaggcttgcagggaagaagaaggcagattctcaagctttgaatcatcagaatcgcttgatgatttcgagacagattttgatgaaggcaaagaagaattgatgagtatgagaaaatctttctcttatggacctttgtcttatgcaaatggtgtgggaacttcattaaactgtggcgcgaaagttagcgatgaagacgaagattgggtttattatagccacaggaaatcagacgttggagcaagttgctctgatgctgaagattccgctgcgggtttggtgtatgaggcatcactgcttccacggcgtagcatattgccatggagaaagaggaagttgagctttaggtctccgaaattccaaaggagagcctttgttaaagaaggataatggagaagaaggtggagatgacattgattttgatcggaggcaacttagctcagatgaagctcatcctccatttggggtaaggtcttataagtagcatcattattcagtttagttagttacagtttttctcagtttttgaatgtgttttatatgcag

SEQ ID NO: 28440 - DNA, 1709 bp, Arabidopsis thaliana landsberg
gcgcgttaaaacctacctaaggatctccaagcctgtaacttactttatggagaaactaaatcatcaaaagctaggggggtcatgttcacttaaggtacgaatggtttgaagagtttcaggatttgtgatagacatcattggtctgatattactatgagtccatgattaatgtcatgtaaatctatagactattgcttattatataacaaagctgtgtttagtctagtccccaattgatctgaagtcatggatggctttttgatgagtgcgctaatcctaattttcatgtaaagtatttaggatggctttctcttctctcttgatccttattcgtctttgtatatttcaaccgtctttgacttttgaaccaatcaaaagagaagaaacaatattgggccaaaagaagataaaaatgggctatggagaatcacaagtccaatttctctgcttacaacttgaacaacaattcttttttttttcctaaaaaactggtacaacaagcttaaaaaccaataataagagaattggaacaaaatccttttaagtttgtaagtctaatttcaagagccaaaatacaaaagtaatatcaatttctcaatacagttataaaactacttgatttgtggattttatacgttttaaataataatggttggatattccttacgatttttttaattgattagttatgcgacgacccgtgccatgcaggttgaagtcactttcaatgatcgttgtctcataaattacaaagaacacagctattttgtttctatttcataatgaaaagcgaatatttgtctgttcagataccgatcaggtaagcgatgcttaaagccaccaaaagggattctaaagtaatcaatgatttgattaagaaaaaagtcaaaaaacaatatccatttgagtatttccatgtcaccaattggtttattacttccaatgatcacatgccgcttgtaatatacatcacctaaccaagcgatcgactccaaaaacgaaaccgtatttattattatcttaagactatagtctatacaatatacattacataatcaagatgcccaattagatgttttaaaacaacaaaaagatcaataggcccaattatatcttatcttaataaaatgaaaaagcaattgcatgaggaattatggatatatataaattacatgggctaggttttttttatatacatataaatagtttggagagataaatcaggtggaaccaagtttgttgtttgtgtttcgattgaacaacactttaattatttaatctttccattgtctttgcgtcttcttcgatcaatttatcaaattagggttccaaccttttttcttttttttccccgttgtgtgttaagtcggcggaaaaacttagaacagaacaaaccatcatttttccaggtaaattatattctaatctcatgttcttgttaatatctgatttttgatgatcttcctatgcatgtttgtcattgcgtctttctcttacgtgatagatgttcgttgacgcgatttgaggtttatttaggttccttaatagatttaacaaaaagaaattctcggtcaataatatttatttgagctgatcaatcatttgctggagttagtttgtgttgtcgtcttcatatgaatctaaagggtatatatatgttttgcattctttgttatagaaatttgaagaatagataaaaaagattaata

SEQ ID NO: 28441 - DNA, 764 bp, Arabidopsis thaliana landsberg
cggacttccagagaaacctccgagcgcacccaaacgccccttcagcaggccgagcgaaaccggcgctcaggaggtcatgcgacatggatgtcgcgagagccccgatgggctacagggacgtacgctcggggggggacgcctagttcgggcctccgtggcgggggaattcgtgagggtagcccgactgtgtcgggcccgtatggcggggcaagccttttggttcctttttgcgggggtggccttccaccgattgacaaaagggactcgcccgagggggcgaaacaaaaaatctccgcaaactcggagcggcgcagaaacacccaagccaaggcaactgggttatccccctatgaaattgccgttcccctcatgaagagaaacggcattctttgctcaagtgaccagccttacaccacgcaaacctcaggcaggctgcctggcgtaacgcgccagcgtcgcatcgcgctgcatcaccgccagggtgttggcatagacctgctcacccgtcgcatccttgctggcgaaaatctcgccaaagtgctgctgggtgacctgggcgaagtgggcacggtcctgtgcctggacacccagcagggtggcgtatgcatccagcgcctcgccatgtcccttggccatgtcctcggcgatgttgtcgagcatgccgttcatggcgaatatcgagcggccgccatagcccaggcgcgcatcggagttgcaaccgttggtgccggaggtcaggccgaaggtggcgttgccccaagtgc

SEQ ID NO: 28442 - DNA, 2754 bp, Arabidopsis thaliana landsberg
  unsure (1)..(2754): unsure at all n locations
tgtggtctctgtttgtatgaatgtcactttagcaacatcaacaaataattataggagaggatctgtgtttattttggtatttaagtttttttattaattaaaaataattatgagatcaagtgtcattagctcaattattaaagattgtagataaagtttagaatttgttggttcaagtgatgtttcttttttggtagggtggtttaagtgatgtttgaancgaaaataatattatatatattagtttgggcgaaaataatattacatacaatagtttggattggaaagattaccggagtttcagttactggagtcagagaagaaaccctttgataatatatttcatccttttgttttaagttttacttttgttaaagaggcaaactaaatatgtttttaactgaaattctacaataatatatttcaatttcaaataaatttattttttaaataatagaaatacgatttgcaggccataacaaaaagatgaaagtttttatggtttcgttcaaatgatgtttagatcatatttatagttgaaatattaaattaccctttaaaaaaaggtaattaagtgaccttgaactcttctcttcctcacgaaatcaaggcataaaaaaagttttggcattaaatcctcctgattttttttttattttttttgatgaaatgtgaaatttattaatggaagaataaagaaattatgtacatctgcacatgagcagtaaaactaatgaaaaaaaacagagtataagcttatgtactcctgattttttctttttgttattaagaagacatcgtttactgttaggtttttcttcaacaactaaccgtaccgaatcaaactaaactaagtcaaatgaatttaataaatttgatcaagtcaaaagtaatatgaaaaccaaaattaaatcgagactattattatatatatgtagccctactcattaacaaacaaacaaaagaagaagaagaatagactgaatagttgtccccaaaacaaaacaagaaaaagaagaagaataagctgttatacgctatcctcgagaggttcacatgttttacggacacggataattttgaaatcattttaaactcgttaatttgaaaacattcaggaataggtgttgtcagtataataattgtttaataaaggaaattaattcgacttttctacctaaaagaaattagattacaacaacgatttggatctctagagtataccatgatggtttcaaactttggaccctgaaatttaaatagcctatccaaatttcagtggtgtataacatataacaagacaacttaggataaaatggatcatacagtacacgataacattcttatatacatagtaattttgttttgctgcctaatcgacgtttcaatcatctaatgaagttgcttaataatcattcgttcccattaagtttactgcgacccggcttaagaacgggtcgggtaactgggtaacggagtgccacgtggcgatctcggcggcacttcgtttaatagccgtccgttagagtcgtaatatatcacacccgagaaatccaacggctcacatttgcctcccatcaatatctctctctgccaaaggccatgctcctcctccatggcggttgctttttcctccggcgggtttttccggcggaccatggtcatcgccttgttgcttaaagccgtgaacaactcttttggccgaggagaactcatcgacgagcttatcatattccatcggaatctttctcctccatcctctccgccgctgcaagttcgcttctttgacttcagctttagtttcttcgagagccgattcgcatgcctggcgcagagaaccatcattgagacgagaaagctcacgcttagacgcttgtgtgagggagatgagttatgttccggcgttgatcggtccataacttcgccggaaatgaagaatgagaagttgaaaaagaagcctcttataggtactatttttaggggtttaacaagtcaaactcaagaactagaattataaccgatgtaatctctagtgtccgaaatgtgtgtgttaatgttatatataagtatagacatattgatgacatttaagaaaagggtgttaggttaccggtggaatcggtcgtctttgcgttgatttcatatacttgttatatcgtcatatgtgtacaatgagtttttgaatattgttaataaatttgaaagtttcgttttcattagatttatgttgaatatttgaaacttcaaagagcatgcgtgggttatgcttaaacgatcttggcataaatattaaagtataaattacagatcctttaaaatctcattacagaaaaagggagtgggtcttgatgctaggaattaaaaaaatgattggataaatggtaagttaatttcttaccatttttctttagatcagtagcatattatatatgtaaatttgtatgcgttgaatatcaatgaacaaactaagaaatactaaaaggtttttggtattttgagcaattgatctctttgtttcttttggtgattggattaacgtacataaccagacaaaaagaatcaatgatatacatgctgattggtaagaggaacgtaaacggcacctgatggccatgcatgatttatattgacaaaacgatatatagttttccatttctcatcgatcgtgaaacaaatttcagattatttatcaagatttattgtctcgtgatttatataataatagtgttgaggtttcgctaattgctgtttgaa

SEQ ID NO: 28443 - DNA, 2266 bp, Arabidopsis thaliana landsberg
tctaggacataattgggatagaaatgtaaattcccaaactttggtgttttgaaatttaattggttagtatactgtatacgtagtgattttgtctgtcatgagatctccttgaccctattgtctgatatacttgttgtaaatcactagttgatgttgaatatgtggatgcaaaatcactagttaatataatattttgataccgtatcaaactaagcgacaagagtatcatcaattcgtcaaatgcacactaacctatacatataatatccaaacctactcccacaacataattggtttttaaacaatccccattaactacttcaagacgtcttaactaacccgaaagctttgtaaccaatgatcaatccccattggttataaatttgtaaccaatgatctattttggcattacaaagcttttcagtattcttgtgatcttgtcttgacgaaaaaatggacgatgtgaccgtgatttcttcgagcattgttcaacccggaaacgccaggcattcgggtcgggaaaagatccatctcactccatccgatcttagccttctctatcttaattaccctcaaagaagtctcctcttccccaaaccctacccggaaacccggttcatctctcggttaaagtcctctctctctacgtctctagagatctacttccccttagctggtcgtcttgtcaaagtcaacaaccatgaagacaatacggtgtcgttttacatcgactgtgacgacggccgtggtgtcaaatttgtccatgctatagccgaatctgtctcggtaagcgatatccttcaacctcatggctctgttcctgactttttcaggcttttctttcccatgaacggtgttagaagcatcgacgggctctcagagcccttacttgctttacaagtcaccgagataaaagatggaatcgtcattagtttcggttacaaccacttggtggctgatggttcttctatgtggaactttatccacgtttggtcaaagctttgcttgaatggtcagtgggagattcatcagcctctagtcctcagaggatggttcctcgacaacattgatttccctattcatattccggcttcagagatagagacagagagggcaagaaatcgtgaagtttcaactaaggagagagtttttcacttcacaaaagagaaactttcagatctcaaagctaaagctaacgacgaaataggctcaagcgacataaaaatatcatctcttcaagcagttttggctcatctatggcgatcaatagttagacacagtggtctaaaccaagaagaagagagtcgctgcggagtagcagcagattttaggcagaggctaaaccctccgcttgataaagactgttttggtaatgtagccaatcttgggttaactacagccacagtgggggatttgctcgatcgtggactgggatgggctgctttgcaaataaataaaactgtgaggttgcacacgaatgaaaactttagaactttttctgagaattgggttagaaatggtaagatcccaagaattgatgttagaagtagaatgggtgatcatggttttatggtcagtaactctccttggttccaagtgtacgataatgatttcggtttaggtaaaccgatggctgttcgagctggaccgagtaacagtattagtggcgaactcgtgttttttcgtgggattgaagaaggctgtattgatgttcatgcgtttctattgcccgacgtacttgtgaaactactggctgacgtggaatttctggagaagtgtggctagtgtatgatttgattggttgagttattaaattagtgtttttgttgagttattgaattagtgcttttgttattgtctgctaggttatgatatccttcaattattgaatttattaatgttgctaacagttctgtgtttacaaacgacggaccatacacatgcttgtttagtggaaaaaagaagacaaagacaattattgaattttatgtttgttatttactttgttgtcacttgtcagctagtagtttttttacgtaaactagtgcttaattttaaagtttgttatggggcggtgcgtaagattatctttgtcttaatttacctaattttaaattacgtaagattggtttatccacatttatgtagatacaatttataaatgtaacacgcacatgttaaaagagaaaaagaaaaggaaaatcatcactcattggtgagtatacaaaggccaaagcacattagaatatgtgagtaaggtgcctcg

SEQ ID NO: 28444 - DNA, 2151 bp, Arabidopsis thaliana landsberg
ttatttctcaatataccttcatctttttaaacgtcttattcatggacctaaatttattaacgtagacttttatccaatccctttagctggtcgtccgtgccgtgtaaatcactttgcaacatcgaattccgttgattataaaatttctgattagattattgtttcgaatttggtctcagttcctttgacttgctatttcgataaatggggtttgtacgaaaatgttgattctatgatgttgtatcagcagctccatcaaatgctggactaaaagtctaaattttcaaaaagatccaactttttaaggtaaatgatccttgtccattttgatgcttgtcttgcaagtctttatgtgatgtttgaattccaattcatgtgtctctttgtttattagagtgctacaatttcaaatagtctcaagaatttttcagctactgctattgttccacctgattcatgttgccatgtttgggagattgatttttgtactttgtttattgtcacttgaagtttctttatgttatccacaaactcaagtttgaaactttcattgtcagctaatcatgagaactagttctttggctttaaacaattagcccacttgaagatttgtcaactaacaaaagaccacccgaagtcgtccttgtgtacgaacacaaggacactcttagcatatatcaacttgcccttttgacttgagatttgttttttaagtatttgattacaagagatagtgcttcaccatcagccaacatggctatattatataatctttagagtcaaaagtattggagaaagaaataagttttgcttaaacattgtagaagaggctggtattgaaatttttatgagatcaagagcttttttttcagtaatggtgcattacaactttctctcgctgattatatttgcatgcttcttcgctgtttttgttcttcttgttcgtgctcaagaccaatcaggtaaacacaaagtcttgcaaattttcataatatggctgtgttttttaagctttaatctctcggtatgtgtgtgtgtgtgtttttatttgcaggttttgtcagtatagattgtggtatacctgaggattcaagctataatgatgaaacaacagacataaagtatgtttcagatgctgcgtttgttgagtctgggacaattcatagcatagatcctgagtttcaaacaagttctcttgagaagcagtttcaaaacgttaggagcttccctgaaggcaacagaaactgttacgatgtgaagcctccgcagggaaaaggcttcaagtatttgataagaacccgtttcatgtatggtaactacgataatctagggaaagcaccggacttcgatctttatcttgggttcaatatttgggattctgttacaatagataacgcaactacgatagttaccaaagagatcatccacactcttcgctcagaccatgttcatgtgtgtcttgttgataaaaacagaggaactccgttcctgtctgcgttagaaatcaagctcctgaagagtaatacatacgagactccttatgattcacttattctgtttaaaagatgggatcttgggggactcggtgctcttcccgtcaggtgaaagtgaaaactactttttatttgatgatgagttcttttttggtatttcttcttataaagttggtaataatgtaggtacaaagatgatgtttttgaccggatatggatacctctaaggtttccaaagtataccatcttcaatgcatcgctcacaatagattcgaataacaacgagggattccaacccgctcgctttgttatgaacactgcaacttcacctgaggatttaagccaagacataatctttttttgggaaccaaaggatcctacttggaagtattttgtgtatatgcactttgcagaagttgtggagctgccaagtaatgagacaagagaatttaaggtgttattaaacgaaaaggaaatcaacatgagctcctttatcccgcgatacttgtatacagacacgctttttgttcagaaccccgtgagcggaccaaaactcgagtttcgtcttcaacaaactcctagatctacccttccacccatcattaacgccattgaaacatatcgtgtcaacgagtttctacagtcacctactgatcac

SEQ ID NO: 28445 - DNA, 2116 bp, Arabidopsis thaliana landsberg
  unsure (1)..(2116): unsure at all n locations
tgcgtacagccaccgagtttcgatctggctacaaacttggtgttttgctttcgaaaccctttgtcttcagttattttggaatctctgcttcactttgtatttggaggtcagattctgtgaggccataggaaaagtattgtggtttctttttcacttattatggctgcattatacattcaggaaaacggaaacatgagagctgcacttagtacctcagatgttatcgaggtgagctatacttaactattttgagatccagctataccaaaagagtgctgatattgatgttttctctgaaacgtttgtgttttttcctgaacaatcacagctcccaacccaggaccagcttaaaacagtgttcgacaaagttaaagactattttggggatgcaaaagagtcattcggaaagctatcagcgctgaatcccgggactgacgaaaaaactgaagaaacctcggatgagaaagccaagtaagtataaacaggtaccgaatgtgtcttcttttcattttcactagaatttttgtgtttttccccaaaatgatatacaaccgttttacagggcctgaggctgaacaattgacacttggttggttgattttgatgtctcaaccgtctcggtatgggnnnnnnnnnnnnnnnnnnnnnnnnnnnnnnnnnnnnnnnnnnnnntgcacattttctctatacatctctcacagaaacagcttctgttaaatctcttgtaacatataacttattgtgtattgtagatttgttgaaagaaagagtcgttggttacaacttgcaagttcaaattttcttagacaaacaatagtagtcgaaaaatggaaacatcccaatttatatttcgaagaagaccttaactaaaactgtggtcaagatattcaaaagcttataggaccatttgcagagattaagtagagcctccctaattgctccagtaggtaaaagctctagttctgcacagtattggcgacatctgactgcctgaacattgcaatatggtgtgtgtaacttcatatttgtttgttatgaatgaattagaggtcagtcaggtaactaatcgattgcctgcattagatgttagatagttcaagtttcttatcttggatctggtggcaacggttagatattttcgctatgaaacgtttctcttaacagtcattgaaatatctgctctaaaattgtgaattctcacattttggatgattaagattatgtgacagattctcaacagctagaagaacatcacatgtgtaggagtgaggaggaaaatttgctaagttttgcaattagatacaatgtgacagtgaagatcttaagcgacggtatgaaacaagtagtcttatcattgtcaccaacctgtttggtgtaattagcctatgacactcgtggattattgtacaatgcatccgatcatggaaggttcttgggaaagcaagattattttcaggtatacccacaaaatctttctgcattacaccaaccaatatacgaaaagaagttattggaacaaggttaagatatgaataaaccttggtctaccatgaaggaatactcgtcagggtcaggcagccgctcatttccataccaattaaggtgggctgggagctcagataggagtgatgggctactactgtaatcttgaaactggagtccggtgtttgcaagaaaacgctcgccttgaagccaagtcaagtctaagtcagtgtctaaagaaacagaatgatgtgattctggaagttcccagttcaagcttctcagaatcgcctctgtgttgaactcctgcagcttcatggcagagggatccaaatcttgaagggttacagtagggatcttgtcttgtggcatgagaaactcatctgcattcacactactgcctcctgctggtgtctcataaggaggcttcatttcctcctccatgagagatggtgcagaatttgcaacataggaactttgacttggcaatggttgttgctggagaaagctattctcatacagaaccggcttcgattcaaggacctctggaacatcattccaaggaagcagagagtcaaacgcagaggaggaaatgggaggatcaaatcctatacgcgtcttttttgttttcgga

SEQ ID NO: 28446 - DNA, 1338 bp, Arabidopsis thaliana landsberg
gttgtaaatctcctccgtttacttctcctatgcgatctccatctttccttaatgtcatcagctttgctcttctcggttacgacgttgttttctccttgatcatccatatagcctcctccttttcctccccgaagtctagtagcttcagcgaaaagatcttcgatcatactctctgttgttttaatggtgatcccacgtatgtaccaagaaagtggcggaggagtgagaagagctgaaggctgaaacatttgatccattgtcacctttgatccgatccttcctcgtccgttgctacagctatggtaatctttttgagattttggctttgagcggtcacacaaatgctcgtctataaataatggttccactttccaacaaccctcaaacactttcatgaacattgttgtctcttgcttatattttgactggcctcaagataaaaaaacaatttgagtttgtgaagatagagtaaaaggattgattcttgcggtagaaaatatatcttacagtgagatttttccggttttcttcgacaatgagatgtataggacaagttccatcccaccaaaggaacttccaggccgcggcttgcttcacttccacggtctgctttggcccttcgtcgatcaaaacttttcttgatatgttttcctatttaggattaagacctatatctcaaatatttgctgtaatactcaattcaaatcaaacaaaacaagaccatgcacaagcaccttgatgtttttgaagtatcttttgttgtctggatgagtgaaaatgttgtatactaattcaggaggcaatcctacgtctgcttcaatgtttaaatggcaaaacaaaccattttgtgatttcacctgcaaacaagaaaatttgaagaatcatattttttttctaaattctaccaaatctaagtttaaatttatttttggttctaatcttaccaccactttaggaggctgatctatccatgagggattatctctccaagcttgtaattgcttctctaacttctcttcatctctatgctcctcataagcagtctctatctttgacactgacttcaaacttagctctttcacattccttaatcttttgaactcagcctacaacaacaacaagaatcataatctaactaaatttctatattttaaataagcttcttgaggggttcttgagatggaaatgaaagtttgaccttaagaggctcttgaattgtttgattcatccataccaaaaatccaggaaacacaacgttattttcaaacaatttaacgaaacctataccgctcttctcctctgatcttgaaatttcagatacaccctattttgtttctg

SEQ ID NO: 28447 - DNA, 3850 bp, Arabidopsis thaliana landsberg
caaaagcactcgacaaaagcagttcagtttaaaggtaagaagacctttccacaaaaaagtttaccaaactctgttggatctaatggttttataggcgtgtcagccgtggaaataaaaggcgatcacaggaaccagatagaggtaaccggcgttgaagttgatatgatccctcttatccaaatactcagaaagaaggtagcgttcgcagagcttgtgagcgtgaccaaagttgaaccaccaaagaaagaagacgagaagaaaggaggggacggaaagggtgcagagggaaaaggcggtgaccaaaaaggtggcgataagaaagggccagatgacaaggaacctccggagccaaaacctgtgccgtgttatccatggcctctgcagggatacggtgtaccttcctcctttcctcatcaaggatacggtgtgccttccacctttccccagggagacggtgtaccttcctcgtttccatacccgtgccatccggcacatccctacaatgatataggggaacccgtttacaatcacgaacccaattgcaaaatcatgtgaaatgagttttacagaggaagattgatagagagagcatgatgaccaatgtttttttttttattgtaaagaactaaagaagcactatgtttactatttagtcatatgaataaagctctgaggccaccaaatcaatttactgctatctcaacatgctctgggaagggttatgcatttcctagtaaatatttgtatgagcacagcaaaatcactcactattcgaaagattttgcacactgttcaaatgacccgacccaagcttggcccagaatcttctcactcactattcggattttagtttaggtataatcgtaatctttggaattttgaatatgatatcttgacttgtcattgtgcaataatgttctgactcctccagaataatcagcattttgaatactgtgaaatattactaatttaatattaaaatattaccacttggatttccgaaaacaaccccattactcttgctccgcaacggaaaacgtaacgtactcaaaggggtgttaacgtaatttcagctgaaaaaactaacggttcccgagaacccatcacatattaagaaagacaataaaaaaaaagattttcttcgcttttccacaatcacaagacaaccacaaaactctcactccaaaactctcaattttgccttcctttgatcgaatactacaatggcgtctgtatctgcaattggagttctcaaggtacctcctgcttcgacttccaattccaccggaaaagccacggaggcggttcccacgaggactctttctttctcctcctctgttacttcatccgacgacaagatttcactcaaatccaccgtctcccgtctttgtaaatctgttgttcgcaggaatccgatcatcgtctctcccaaagccgtctcagattctcaaaactctcaaacttgtctcgatcctgatgctagcagcgtaagcatcatctatcttcttcttcttatctttgttgtttaagctttgaggaatgtagttgagatcaaattggaactgtgaattgttgtcaatttgcagagtgttttgggaataatcttaggaggtggagctggaactcgtctttatccacttacgaagaagagagcgaaaccagctgtgcctcttggtgctaactataggcttattgatattcctgtgagcaactgtttgaatagcaacatatccaagatctatgttcttactcagttcaattccgcgtctttgaatcgtcatctttcacgagcttatgctagtaacatgggaggttataagaatgaaggattcgttgaagttctcgctgctcaacagagtcctgaaaaccccaactggttccaggggacagctgatgccgtgaggcaatacttgtggttgttcgaggagcataatgtcttggagtatctcattcttgctggggatcatttgtatagaatggactatgagaagtttattcaagcacatagggagactgatgctgatatcacagtagctgcattaccaatggacgagcaacgagccactgcttttgggctgatgaagattgatgaggaaggacgtattattgaatttgctgaaaaaccaaaaggggagcacctaaaggccatgaaggtactataaactttacgctacttctctgcttcatcatgcggccttgtaaattaaaaaatctcgatttctttgctcctaggttgacacaacaattctaggtcttgatgatcagagagccaaggagatgcctttcattgctagtatgggtatttatgttgtaagcagagatgtaatgctagacttactacggaatcagtttcctggagctaatgactttggaagtgaagtcattcccggtgccacttcccttggactgagggtgagtgtttatattcatgtttacaacatctagtttgtattctgatgctcaagcaagtctctgttactctatgggttgctttcggattcaacagcttcttgtagctgattatgctatgcagaaggcaaaacctgctaactttgatcatgggcactgcaggtgcaagcttacctatatgatggttactgggaagacattggtactatagaggcattttataacgctaatcttggaatcaccaagaaaccagttcctgattttaggtacagtaatcgcattactacactctctattgtatctgaatgattacttaacttatctgaattcttgatgcagtttctatgaccgttctgctccgatctacacacagccgcgttatttaccaccgtctaagatgcttgatgctgatgttactgacagtgtcatcggagagggctgtgttatcaaggtacaatcaaatcggttctgttcgatatgctttacggacatacgaattcaccaatgtcttatgaattttgggcacagaactgcaaaattcatcactctgtggttggactccgttcctgcatatcagaaggtgctattattgaagattcgttattaatgggagctgactattacgaggtaaaaatctgtcttgcaatcaatcttcttgctaagtaatgtcaaccttttgatgatggtggtcttctttgatgattgtttgcctagactgctacggaaaagagcctcttaagcgcgaaaggaagtgtacccataggtattgggaaaaactcgcacatcaaaagggccatcatcgacaaaaacgcacgtatcggtgacaatgtcaaggttagtgtttatatttggaacacacaggatgtttagctttgttcatacttgctctgctcttaaaatgtgtttgttgtggaccttggcacagatcataaacagcgacaacgtgcaagaggcagcgagagagactgatggatatttcataaagagcggaattgtaacggttataaaagacgccttaatcccaccggcactgtcatctgaagtacacatattgctcctttgtttatttctttatctttctaatgccctatcaataagttttcttcattcctttttatccccaataaatctactactagttgtaatgctgcttacgaaagagattacgaaatcatgttttcacaatacaattgtttcttttgagaaaaaaagaccctatgaatttcactaaatttatcttttgtagcttattatcaataaaattaagtttcttcaagtttattataataataagtagttcaacattattcgtttattattataataaagttaatttataaacctacaaagtattataattaaatgtgatattacaaaagaatacatgttaaaaataatattaatatacatgaatatcacacattagagaaatgtctgcatc

SEQ ID NO: 28448 - DNA, 661 bp, Arabidopsis thaliana landsberg
ttcattcttttaaaagtaatatattataaaaaaaaaaatttaaataagtttaattactatcacacccgctggtttaccagtcataaaactcccgcaagcgcacccattatcaaacgttcaaccagtcgttcagaacgcttgatatcgtttaaaaccgcaaccgcccatttccgcaaactcccgcaaccgcaactgcacccgctgcgtttaaaccagtcagggccctaaaaccctactttatacttttatatttgtcatcaactaccctactttaaacgtaaaataaatctttagatcataaataattactgtggaaaatatattttgatatatgtgtacttaatctgtgttaatggcaacaaattaactacaattcttgggtgtccaagaaggctccttgcatgagttgcatactagcatcgataaaatatggcatcaatgctttggtcaggacgatttgttggatcagaccatcagagactgttttgagggttttggtcttcatgtgccggtatgactttttgtttatttgatctccccttattgattcttgaactgtgtatataaaaaacgtatatgtgattctttttacagggtgaattttcggatcaactgcagtggatagatgatgatgatgatgaggattaaactaaatagaagt

SEQ ID NO: 28449 - DNA, 1246 bp, Arabidopsis thaliana landsberg
agtccttggaaccaaatatgtatggagatgacgcttctaaaattgaggctgcggcagaaaatcactgcatactcagtgttgcccttgatgtgatgcatgaacttttcgagcctgtaaaagacctcatggtggaagagatcttgctgaagatgttatttttagcagatggtaagagacaaacaattactaccataaagtatttcatgtaaaagccttctgttagattctttcgcatcaggcttcctaactctaaaactgcaggtcaaaattcaaacgtttgaacttcagtggattttacacggtacttctagaaaggaacaacgaactggtttctgtggctactgttaggtaaacttcataaagcttaaattacagaaactccagaatttcgtggcctgtataaaacctctattgaattgttagcctgacttgctctgttcgttctcttttcagaattttggggaaaaaggttgcagaaatgccctttattggtactagatcccatcatcttcatgcgcgggacgcgccgggtttggattaatgaactcgaaaaggcgtttagtttactattgaaaacttaactttcccctttggctcaagaagctttgtttgcttatcatgaagacctcttaactgttctcttgaaaatgttgtgttctccaggtgctcattgacttgggagtagagaggttggtcctgcctgcagttccatgcgtgctgaacacatggatcaactcatttggatttacaaagatgacaatctccgaaagaaaaaactttctgaaatttaccttgttggagttcggacgaacaatattgtgcgagaagatcttgatcaagagcggcgtagcagatccaattccaagtataggttagtgcccatgttttgctttgtttttttttccaatgaggttagtctccatgtttgttatgttttcattacagactgtaagctttcaaactcaaacatcttgtaataacgttttaaacttatcatgcagcatctctaggtgaacaacagtgtgacatcctcaggattgaagacaattctgcttctgatgatggatcagaagtacatcaggcagaacagcacctcgaggagtctaggtccactaaaaatccaccagagtatgttgttcaaactctcactcctctccatcataatccaaaaacaccaacaacgagcaaaaaaaaacatgatacaaatgccttgcatgggtcctgggaaagaaccaatacttaacct

SEQ ID NO: 28450 - DNA, 1607 bp, Arabidopsis thaliana landsberg
ggttttactttaggacctcaaacggaaagaagatgctgctgcacgaggtactacaatatactcttttcatgcacttgtttccaagttgtctcctagatgattttgaacttgttattaactgttttaacttagatgtgtctcaaatgactggttcatttttttcctctgttaatatctttcattttgcggtttactctatgcagccggaattgttatcgaagtgaaaaactggccgcctttcttcccccttatccaccatgatattgcaaatgaaattccggttcatctccaaagactacagtatgttacctttgcaacgtatttgggtacgtattgtgttatcctaagttaacaatttccatatgattcaaatacttgctctttcctgcatttgttaaaggatcaaatttttcaagcatgagatttatatttgttgcttctttcatttggtttacacatttatatttaattcttgtttggcagggttggttctttgtcttttctggaatatcatcgccgttactacagcttggatcaaaggagaaggtttgtttcataagtctatttcaaaggttgggagaccttaaatgcatgtttaacaggcttacgagtttggttttatcttgttcaggagtgacgatatggcttcttgccttaatttacttcatagcgggtgttccaggaggctatgtgttatggtatcgaccactctaccgtgccttcaggttcttacatgattttagagttttctacttaaaattctggatttatttttcataatgttattatgttactgattctatcacatttttgttgaatgtttgcagaactgatagtgcattgagctttggatggtttttcttgttctatatggtgagctataattagtttctatggatatttttacatttatgctcagtataaaaaaatcagttctgaaatcttgttcttgctgcagctccacattgcttttctgtgtctttgctgcagttgctccacctgtcgtcttcaaaggaaaatctcttgcgtaagtttctttgtcatcgaacttctaaacaattgaagttgattttctcacagtgtttggtaatttgagtgtggagaaaatccatttgaattgatcaaagcaaactaccacaagtttttttgctccaattctttatcgcatacttcagaaaacaatagttggcatactgttacctgtcattggcatactccactaaacaatagttgcataagtagttgctatccattgtttgtaaaattctgtaaccttccttttgtaatttatttttctttctgtaacagtgggatcttacctgcaatagatgtcttaagcggtcaagcaattgttggggtaagctctctcaccctttgatgatcttaaaaacaactctaagataaaagcctgatctgattatatgtttcaaggatctgatatttgttctgtttacagatattctacttcattgggtttgcacttttctgcctcgaatcagtggttagcatctgggttatacaggtctctctcttcaactcccatcactacattatcagtctttgaacatagtgttataatctgtactcatttcttttggtatgggttc

SEQ ID NO: 28451 - DNA, 1742 bp, Arabidopsis thaliana landsberg
gcgaatggaatctgcaaaacctttatatgcagccctgaatttctcaaattatgagaagaatataaagacgaaattagaactgtcttctgaaaagatactgtaaaaataggataaaatcaaaaggtcaacataagaaagctaaaaatcatgcagtagaataatccatgtaacggtaacgaagtctcagtaagaaaaacgggagagaaaataacctatgtaaccttagtctctagatggaaaacagtaatacgtattcacaaatcttcataacaaaaactcgagaactatcataggcaaatagttgacaaaaattaattctaatccacccagtatacttggcaactagaacaaaattgaacgaagagatattaaatctataggaataataagaaaagggaacaaataaaaccaattatccagtctccaaataagcgtgcaaggctaaacaattgtaagaaaaaataaaaagaagccaaaaaccaattactaagtaacaatttcacgaaggcaagctttgcagcaagcataccaatgcaaggggcttcttccatcattatcaggcacgtcaggatcagcattccactttgagacaacgtgacaaagaaaagcagtctggccatactgtgcggcaacatgtgttgcctacaagcagttcaaaattaagtattaacatacacccattgagaactaaacaagaaaagaagggaaatttgatagaagtcagcagagaacatggacgcgtagttaaagaagagatatgaacctgatagccatacatatccgttgcatctactcttgcaccctcttgtaataacagttctgcaacttgtatcgcaccacgaacagcactccaatgcaatgcagtctgtccagtatgatccgtcgcgtttacatctccaccatgctggaaaaaccagaaatcgaaaaggatcagttttagaaacttgaaaaccactagttcaaatctaatttagcaatcaacaaacaattcgtaaaatgacacaaaacctcgataaggtactgggcaacggcgacgcggttgttcaaggcagaccactgaagagcatagtagccaagagcatcaggctcggaaacagaggaaccctcacactcaaccaatctatgaagcttctccaaatcaccataagcggcagcagtatagacatcgttcttcaagctctcttcttcaatccctttagaactcgattccccattctccttgggattcgattggatttcttccaccacctcaatgtccgatgacatttttttcttttctcagaagaaattgagatcgatcgagattcgattccctccctaatggattttgacctttgattagtctcccccaagcataaattaagtcgtgagatttgggggaaaatgagggagaaagctagggtttttctgggggattcaaaggaacaagtagaagaagaatatgatttccgaattcgaataattgattaagaatcggattaagacgggtcagagacagacttgctctcaattcttatcgttcattcatttcattaacttttttttgtcaaacaaaacccaacattattttattttatttttagtgttaacaaaaaaaaaaaaaacaacatttataaattgattaatttcatgatcatttttttttgtatgtaatgggaaatattatacctggctagttgagtgatatatatatagttcaatggaatatgaacgaatcaaaacatctgtcttaatcataagag

SEQ ID NO: 28452 - DNA, 2231 bp, Arabidopsis thaliana landsberg
attgtttaaaggcattcagcagtttaaaaataaagactgaaaatggcgtcataataaacgtaaatgcagtaaatattatttcctctatttctgaatatttgtagtttaagatttttgtacacaaattaaaaaaacatacaaatctcatttaatttatctctttcttataagaacattattaattacaattaatccaaccaataaaaaaatataatataaaatataattggttaaaaactattaaacacatttaattttgtatagaaaagtgaaaacaacacttataatgaaaaaataaaaaatctttaaactacacttaattagaaatagaaggaatacgaaacgtacggatgttgttaacctaaacacgattactaccgagactaaagatgtctaagtttaatgctaagaaaagtaaaacaatttttcgagcagatatatgaatagtgattttttgggtcaacacataatccacccaacgttgatttttgtttgtcgtttacaatctctaaaacgtttattttctaagaaatatacgtgtgggctcattttaatgcccttcgtgcgtctacccgacgactttgtttactcgaaactatatcacacactacaccacatatttcaacatcacactgtatacacacatttatatatacatgcagaccgattattataataatattttctccggtccctaaaacatatatatcattcattcccacatgagatataatattatgtaaaacatacttttgactatgttgccaataatcaaaaagacatctctctctctctctgtcacatcctattttccaagaagcttaccaatgcttttgaattctcccacatgtcttttgacaattttagtataaatactcaaaccccttagtcagtcattctcaagttcatcaacagcatttgatctcaagctcataggaatttgatctccacattatatcttgatcatcaccacaagaaaaacatttcaacttcttttatcagcaatcacaaatcaaagagatgggaagagctccatgctgtgagaagatggggttgaagagaggaccatggacacctgaagaagatcaaatcttggtctcttttatcctcaaccatggacatagtaactggcgagccctccctaagcaagctggtatgtaaaaattataatatcaaatttcttaattttgatcaaatttcttacattaattattggtaattattatttacaggtcttttgagatgtggaaaaagctgtagacttaggtggatgaactatttaaagcctgatattaaacgtggcaatttcaccaaagaagaggaagatgctatcatcagcttacaccaaatacttggcaataggtattttacttcacatataagtatataaccgacacacaagttttattttgttttcttactatatataaatcaccaaaagaaagtaactttatacacacgtctaggtcgcactactattcttttaactacacaatgatcggctctttaattacttttgtattgatgttcttcgttttccttttggtatcatctttagatggtcagcgattgcagcaaaactgcctggaagaaccgataacgagatcaagaacttatggaacactcatttgaagaaacgtcttttatctatgggtcttgatcccagaactcatgagccattaccttcatatgggttagctaaacaagctccatcttcaccaacaactcgccacatggctcaatgggaaagtgctagggttgaagctgaggcaaggctttctagagaatcaatgctctttagcccttctttttactctggtgtagtaaaaactgaatgtgatcacttcttacgcatttggaattccgagattggtgaagctttcaggaatctcgctccattagatgaatcaactattactagtcaaagcccttgctcgagggcaacatcgacctcatctgcacttctgaagagctcaacaaattcttggggagggaaagaggttactgtggcgattcatggctcagattattctccatattcaaatgatcttgaagatgattcaacagactctgctcttcaacttctgcttgatttccctataagcgatgatgatatgagcttcttggaagagaacattgacagctactcacaggctcctattggtcttgtttccatggtttccaaattctagtcttatgagagcctaatatctaagaaaaagattcaaact

SEQ ID NO: 28453 - DNA, 918 bp, Arabidopsis thaliana landsberg
  unsure (1)..(918): unsure at all n locations
ggttaatgataaatatggtatctttcgaatacaggttctggttgcaaagaacggagagggaaaaagataagaaattggtatcagctcttcaacagatgaactcggttatattcgacggtcattctacaatgcaaactacactagcatgtgttgtcatcaggagaaaaacattataaatcacctgctcaaaagtttccatagaaccatggcaggcaagcaacataaccaaatctgggttgccaaagatcggatgaatctgcagtttttctttcagagagctgatatcatcccacccagtcaaaaaaattaaaataccaccaggaccctcattctcacatatattgcaaaggagaaattctatgaggttaaaaccaatgcaatcaggataccaacaagataaagactctcgagtctcagggctaaactccttgaagtcagctgctctcagtgcgtcctgtttgcataagggaaaaagaaatgaggacctaacatgtagagttaagctgctgatattctttttctagatacctcaacgacaaaggtaatttggctcttccgtttttttgggatctgtttgttcatcttccacgttctttcttgaccataatcatcaatttgattgtatggannnnnnnnnnnnnnnnnnnnnnnnnnaatatcctctaggaaatgactacgaactggatatgtaaatccctatagtgaagaagacaatattagtagtttcactggggttaatcagagcatatagatccaaggaatattgaactcagcaaaagattaaatatcttgaaatgttctaaagaggataaacaaatatgtttcttacttactggaatataaatgacacctgccccaccaaagtatgacgagaaaagctcagcatctaaagttgcactcatcaaaatcagcttacag

SEQ ID NO: 28454 - DNA, 2890 bp, Arabidopsis thaliana landsberg
aaagtttggcaacttttccaaatcagagttacaaaagaccgcatataattggatcatgttaggaaactgaggcagtggttcgtgtctcatgtagcgagagaggacctgcaaacacaaagaaaatacaactttaaagagactttaaaatactcagttactcccattgacatatatatatatataccttcaaagttgttccactcatagtcatgtcccttacgctcgagagcctggtgaagaagtttctcactacacttctcgttaacaggaaatttttcaatacacttctcaccacatcgaaagttacatcaatatctaccttggcaggtgaagtcacactacttaatacgaaacttttagactggtcatctctaagactcaaatagctgagtctaggagcatcaatcacaacctgccaactatcatcttcaatatccccataccgatcaccatcgagagcaagtatgagactctttaacgacagagaacgcactcgtaaaaccttaacaatgttctctacatctctagagacatttaaatcttcaagaactgggcaagatgagattagattctccagaagagcatcattagggtaaatgttgtctattaaatgcattgttttgagacgaggtagagaaacatgatcaaaatcaggcaatgacacattatggagtcgcaaggataccagagtctcacaggtgtaaaggctatggggtatcagctcctgacctaaataactccaacgacctatatccaaatgttgtactttacgcttaaccgcattgtggatccactgcgtcaagtaagacctatcatgctgttttttttcaaaagcaagtttgagtttgtgtatgcatgtctctctagaggtatctagaaaaccatggacaacacgcgcaaattcatagtaaccatggaactctgaaacgttaaattccaacagaggaaccgaaagactgaatcttttccatctcttggacaaaacactagtcctaacagcaacctttgtaggaagattagagagtatccgacacagcaaatcatccggtaacaaacttatactatcttgacttgttactcctctcttcgtgctcattgtttgcttaactcttgagacatacacaagatctgcatcaatagaggaaggttagaacaaataagaactcaccgttcattaaattagcaccggagatctctctgcctctcagactcaccagaggcttcaggagatttcgtcttctagggtttaagatttcggaaaactatctggttcttaagaaactaacatcctttgatttatctgttattttcccgcgagattttagttaaagataatatcaagcaaatatacctaactaaatccgttaaataaataaaaagaaatctcaaatgttgtacttgaatttgatctacacaaggacaaataagacaatcactatgtccgactgtatgataatagtaagaaccacctgcaagtcattttgaaggtcagcaacatagacaatttgacatgtgctagttagccacgggcaatgcgagtaaatcttcttctcgagtgtaaccgcggagaacgaatttcttgaggattgcagagttttttgcaaagtacaatgcaagtttcaattcatacgatggtgtatgctttttatctctacaaactcgagcaatgacagcaaacactgaggtgcgaacgagaggaatccattcagcctcatactgctaccaagtacagtctgtaaaatacacaacacaaagatgattgaagttcagataccgttaaacacatttcacaagttttctaactaaaactgaagagtttgtgcaagtttccgactttcgcaaactggaaaatgtcgttttcattctcaggttcgttctcaggagagctactagctgaaatttttttccggaagacacaatgtctctccacccattgaagtcgagacaccagctctgttcttccaatctaggcactttgctcttaagaacaagcactccttccttttgaccagaaggagacctgaatgacacgaaattatcgagttctgtctgagttgtagctgttcctccaggttttactgctgatgcagagatggcatccatgacgcaatgcgtcctctaaggccccgttattctggtttgacacaacaatgatcacaattagcaaaagccacaaaaagcaaaccatcttttactctctgtaactgtaaggaacgagataaatatcacctaaaaaccgaagaccaagattttgactttaagaatctcacgtgagatatgggctacaggatagtttccagattgacttattaggctcacttggttcagactgacaaaatatttttgcttcacctccaaggtatagatagaaagtttgattgctacggtttctcttaacatagcattgaacaagtgatcctcctggaccaggctataagaaatatcagagcaaagattattagtctgaagaagcacacaagtcagttataaagtaaaacatagaatgtgacctgtttcaaggagattggaaaagtgaatttgctagaaacctgaggaacgttaacgatctctttgaatatttgttgacagttcttacacacacctgcacaagaaacaacattgttgctagaaggccaagtgtcttcggatcgctctatcctcatcagaacatctctcagaagctcaggatgcgtattagcccaacagatcagttcttaaaccattcgttgagacttccctcatttttcccacagtacccaaatctcacattgaatctctttcgagacgacatagctgtaccacacttgaagcaatgctgtcttttctagaaccctaacacggaaacgatagtaactatgagatctgaactgatccctacaacttatgaata

SEQ ID NO: 28455 - DNA, 1336 bp, Arabidopsis thaliana landsberg
aacatcttacaggtgtcaggtgtgccgcgtcgtcccactctttgcctatatcatcaattttctggctgttgtgggctactcaatatatttggggattggtaattcactgaagatcggcgatgggagagagagactacgaagcagaaggtattttagagaaggcgaagattcctttgttaaaggatcaaaatgtggcagaggaggaaaacggagaaataaagaaagagatatggctagagacgaagaagctgtggcgtattgtcggaccagctatattcactagagtcacgaccaacttgatctttgtcatcactcaggctttcgctggccacctcggcgagctagaactcgctgccatatccatcgtcaacaacgtcatcatcggcttcaactatagcctcttcgtatatatacgcaaacaatactttttatgtagcttatattataatgttgggtttaatttgttaagaaactatatatgtttatatgcagattggaatggcgactgcgttggaaacgttgtgcggtcaagcgtttggagcaaagaagtatgacatgtttggagtgtatttgcagcgatcttggattgttcttttcttattctccatcttgctcctcccaatgtacatctttgcgactccgattcttaagttcatgggccagcctgacgacatcgcagagctctccggtatcatctctgtttgggccattcctacacatttctcatttgccttctttttccctatcaaccggttcctccaatgccagcttaaaaattcggtatgtaacttatgatttgaaaggtcagtaggtcacaacggtgggggttagtccacatatcttgtgaactagacagctctatttttggggtagacagtgtttgcaaaaatattgaagagtttccgtgtgaaattgatgagtaaaactaccattttttcattgatgttagattaacttattatagaaagttaattgattttttgtagatgctagttatttttggcaatattcctttgttttatttatttgtgtgtgtgtgtttgtgaacgatttcttgcatttagaaatcctaaaatgtctttgtatagtatgtttgtttttctcgttcatttttaaatcttggaaacttgaatgggtcagcgagcttggtggaccaataattgatgaataaataacatttacccaaatggtcaaccacgtgttcctcgttgaacaacaagctgtctcatttgatcgtactagtgaattaaccactattaaatacataattagtggactaattgggattatttgttaatctttcttgagtttctagtttgttaattgaagtttaaca

SEQ ID NO: 28456 - DNA, 801 bp, Arabidopsis thaliana landsberg
gaaaccatgtgtgacccaaacaaaatctacccattttgccagaaataaaccatataaggctaaaaagttggatttcatatcctaaccaagtcaaaacacctacctaccggtttcaatgaacgcaggagctaatacaaattcatatacaatggactgacattcaaaacaatgaatctttaagatagagcaacaagaatcttacagaaggagagtgtgggtgatggtgagagaactcattgcggttgttgttgtcactgtgaaccgtagttagcttcttaggcttggcagtatcaacaggaggctgatcatgaaaagggttaatgagttcttcctcgttgccaagactggctcgagaagcatctctcttgttgagtttcctcatctctctgatctttgagaaatccattgagtaatcaattgatcctcctttttgatcccaatctccaaactgtggtactgatagccatggcgagttcttgttctgccaaataaatctccatttcaattacttttattttcaagaaccattagaaagaaaaaaacacaatcctaaaaatcaatcacacaaaaaaagactttttcaccaagattcagagactaatttctcacatcaaaatcgaatattaatgcaagaagttgacatgaacatcccattttatttaatgtatcactttaactttaatattatgtaaggagaaaacacagaagacgaagggattagaccagaaaataaaaaataaaaacctcttttcgatcttccatgtgatcaaagcttctgtagctagcagtgaaatctgtttt

SEQ ID NO: 28457 - DNA, 1925 bp, Arabidopsis thaliana landsberg
ctacttctgatcttccaaaaggctgctcagcaatatgttgagaggattgaagaactcgtgggtgtgcccattcattacattggtattgggcccggtcgtgatgcccttatatataaatgatttttagtgttaggcttttttggttcctccacaaactcaaaaattgatcaagtgtcaagttactgagaattattactctctttggaatgactagtgtatctgttgcattgtttctaatattggaatgaagaggaattctgtgcttaagcagtgaggttgctatattcataatgtttaagctttcgtgtttgatcttactctattcgttccattgataagagacccttttatgtcttaaacctgagaaagtcgtgaaggttcattgtagctgctgtttatgcttgttgaatatctgtggatgttatctatactttgcaaatttcttcagattttgatcagtgctggcaggtgaaactttctggtgggagtttatgcatcgtgtgatatgtctctaggttattcaaatttgttgttttcttttctcgacagaaagtttgcgttggtcagttcgaaggcgaatcttaaaaatttgttcataccatcatgatctttatttattgatcatgagtttctagtattattgagatattagatgtgatctccatgaaaggggatatgataggtaagctttttgcattgttacttgcacaaaacatatcattctattagggccgtgactttcacttactatttaaactatcgagctaaaggatagcgaaaaaatgaacatgcttcattaatataccaaaaaaagcgaacaactcggttgtacactgactcactttattgctgcataataaaagactgcactctcactacctatgtctcttttccaaaacgctacactaaatccaaaaccatttgtgtacttctgaatcttgatctaccttaaattgcttttactcaatctaagcttccgtagtagtcccagatggaagggaaggatacatcatcctcaaaatcatagcttccgaagttgctggagtcaaattgcatagttgtggtttcacttcttggcatctcgatcagggtatcccagctgaaattctcagttctgaaaggacttccagtttcttcttgctcgttccatggtggaggggaatgacactctgctacctcacttggttctgcttcattttcatccttcaagattcctagttgctgaagaaactcggtcaggtcgatctctggtttcttctgatcaccaccttcgaacatattgtctgtttctcccttgctggtcttctcatcaagaaagctagtattagtttttgattcggtggaggaagaactagaagaataggattgagataaaagtccagttttaatgagttcttctagtctatgctggattatgtgaacactaggctgagcattcacgtttagcataccacatgaaggaaacatagatataaacttccttgaaggtacccatttgaacctctgagagttactcagagaaggtcttgtattccgctgaagatgaggtaagttgaggtatgcgtcgtgcccatagagtttcaaggcagcctcatcataagccatagctgcttcttcagctgtagcgaaagagccaagccaaagtcttgccctcttcttgggctctctgatctcagccacccatttgccccaagtcctttgcctgactccacggtactgacaaagagcgttttgtggaccgcctttaccccgagcaggacccttcttccattgtttcattgaggatgatttctccatttgtgttgtagtggagaagaagattgatagcaaagaaagaagaagaggatatgataatggagcttagaaagagtatgtgagtgcttaaataatgtcacggttcgcttcaattcctagagaattgcttt

SEQ ID NO: 28458 - DNA, 1710 bp, Arabidopsis thaliana landsberg
agtctactctgtccctgcacttaactgccgaattgtttgtaagtgaaaagacgagttcagcgggaggattatacgttgctatgaaaagcatatcacacatcctgctgtttctacgcttctcttcatcctgtagattgaataaagaacgcttaaaaatccatctttttggaagcacacatcttgatgtgaaggaaatcataatagatgaaggaatgacgtatagggtagcataccgtcaatgtaaattccacttcagaaacagcttctagtaggcgcctttcatcaatgaaaggcagcttagcaataccctttgatgtaaaaagtaaaatgtgttcaaaatatagtgattgtgtttttaatacataaggaagcgatcaagaaagacagagaggctacctgccaggaaaaacgcttcccattcatgtcgacttcgaaatctagaaaaaccacaatcgaaagcaatgtagatataatttgttacaacaataacactcagaaaaagatggaatctttactaggaaaggaaacactaccagttgggtaaaaatcaatgataggagagttgggatctgtcatcaaggtcctgtagcgctctggaagtgcatgcgaactgaccaaatgcagtaaagatcagagatataccatagagcgtaaacaaaaatgtcgagaaaataatgaaaaatcatagatgtaactaccttgcagctgggaacaccccaagaagttgattgaaaggcttaaaaggagttcctaattcgaacttaatatccatctcacccaaatccttcagatcagaagcgaatggtgcatagtggtaaggatagaacctgtaacataagagtacaattatatcaggagagacagctaaaacctctcacagtcaatgaatacctacgaattctaaaaagcaaatatagtgtctaatacaaaggtatatatataacagagcaaaccctatcagaccaagaataaatataaaaatttagatggaaaataactatcaaggcaaaaaaattctaatcttaaattactcctgcgttttgtttaaaaggaaagcagatagaaaacaaaagacaactcaacaagaaattttctatggcacttcaaatgaaaagcttaaacttaaaataatagaccacactaaagaaaataatccaaacggaacagtaagtgaagttgttctggacataagaaatattaagtgaaggaactcaccactgccaggagcaaacaccttccatgtagtaatgcatgacccaacaaaggccttctgtgtacttcaaaacctgtacaaagaatatttcacaaattagaaagaaccctccaagagttgtaccaaaaattgaattaaatatcattctcaaacttacaacatccttccggactctttccatttcttcaggggttactactgagaacttctcttcataataacgttctctccatccaggttgccctagcttcacctatgcaaatggaaaccactttcagaaatgaagggaggcccaaagattgaccataactgaaaaccaaagatattcccaataacgtaaattcactaaaaagaaccttatcctcttcagtagtatctgagttgaacgcatctgatttctcacggattaactccttgagctttgtctttagctcttctttgttctcgcgttcctgaaataagtaaattaattaaaatgactgtttgtttctgtaggt

SEQ ID NO: 28459 - DNA, 7448 bp, Arabidopsis thaliana landsberg
tggttgtgaatttgtgatcatcttctaacatgttgcggtcctaccaactttctacccacccttttttcccttttttaattctatattaaaattatcggcaacctcattctatttatgccccataacttaattctctatgttccttaataatccattttctagagaccaaatggttaagaaaatgttatttttttaatgttgtgtatgcatttttatcaggtactgatgatgcatcgtgaatttccaaatgaaataaaataaatactatcggtttagaattatagaaaattgtaatttcccaaaaacctatttataatcaatttttaatatgttttttcttatgtgtcaagaatctaaaaaaatagattaattaggcacatataactagggttctcaattatctaggagtctttatgctaattacagaatttagattaatattagtctgttattttgctactaaaaactgatattttaattccatttactgacagtaaaaaaatcagaacagaaaaaaatcaatgaaagatggaaaaaaggagaagaagaggattaggctgttgactgctttcactccttttacagctctcttcttctctctttaataataaagttttcatttttatacctttctctctctctctctctcttcttcttcttcttcttcttcgtcttcttctctgaatagtcacaatgcgagtcttcttcttccccaactcgtccatggcgattctctctgttttcctctccctccttctcctctctctccctcttccatcaactcaagatctcaacgccgacagaaccgctcttctctctctccgctccgccgtcggaggccgtacatttcgctggaacatcaaacaaacctcgccgtgtaactgggccggtgtcaaatgcgagagtaacagagtcaccgctctccgcttacccggcgttgctctctccggtcatataccggagggtatttttggtaatttaactcagctccggacgcttagtctccgtctcaatggtcttactggttctcttcctttggatctcggaagctgctccgatcttcggcgtttgtacctgcagggtaacagattctccggtgagattccggaggttttgtttagtcttagtaaccttgttaggttgaatctagctgagaatgaatttagtggagagatctcgtcagggtttaaaaaccttactaggcttaagactctgtacctggagaataacaagctctctggctctcttttagacttggatttgtctttggatcagttcaacgtttctaataacttgttgaacggatctatacctaagagtttgcagaagtttgattctgattcgtttgtgggaacttctctctgcggcaaaccgcttgttgtctgctctaatgagggaactgtgccaagccagccaatttctgttggcaatattcccggaactgttgaaggaagtgaggagaagaagaaaaggaagaagctttctggtggagctatagctggaatagtgattggatgtgtggttggtttgtccctgattgttatgattttgatggttctctttaggaaaaaggggaacgagagaacaagggccattgaccttgcaaccatcaagcaccatgaagttgaaattcctggcgagaaagcggccgtggaagcaccggagaataggagctatgtaaatgagtactctccgtctgcagtgaaagctgtggaagtgaacagttcagggatgaagaagttagtgttttttgggaatgcgacaaaggtcttcgatcttgaggatctgttgagagcttcagcggaggttctggggaaaggaacgttcgggacagcttataaagcggtgcttgacgcggtgacattggtggctgtgaagagactgaaggatgtaacgatggcggacagagagtttaaggagaagattgaggttgttggggcgatggatcatgagaacttggtgcccttgagagcgtactattacagtggagacgagaagctgcttgtctatgacttcatgcctatgggaagcttatcagctctcttacacggtgagaactacccctctctttctttctcagcgaaaaatttgatttttattgttaatagttctctgctgaatcttaagtttggcataattagtaatggattcgttaatatacattactgttaagaaagaaatgacaaagattctatcatgaaatgattagtttggtactgcatcacattgacaaggatcagtgaagagtttttatcattcacatggcttacacaggacgtctatgaattagtggggacagtagataaccttggattccttgactagctgtgataattgatcttttagaattgtattttgaacaaagaaaaatccagacctcctgtgttctactttcagacagtagttttttttgtgtcttgagcttaatgtcatgctatgttacaggaaacaaaggtgcaggccggcctccattgaactgggaagtcagatcaggcatcgcccttggagctgctcgtggcttagactatcttcactcacaagacccactgagctctcacggaaacgtcaagtcctccaatatcctcttaacaaactcccatgacgcacgagtgtctgatttcggcctggctcagcttgtaagcgcctcatccacaaccccaaaccgggccactgggtaccgtgcgccagaagtaactgacccgaggcgtgtctcacagaaagcggacgtgtacagctttggtgtggtgttgctagagttgctcaccggaaaagctccgtctaactcggtgatgaacgaggaaggaatggatttggcgaggtgggtgcattcagtggcgagagaggagtggaggaatgaggtttttgactcggagctgatgagtatcgagacagttgtctcggtggaagaagagatggcggaaatgctgcagctgggcattgactgtacagagcagcacccagacaagcggccagttatggtggaggtggtgagaaggatccaggagttgcgccaatcgggtgcagatcgggtggggtaagaccatcagatgaaaggagacttgagacatgagtctgttcgatgatctgaagcggcgacgttttcagtgtttagttttaagaatatggcgggaattagagttggggtcgttaattagatgtttttaattttggttttttttttttggtttctttcatgtgtgggcactgatgatgaggagtttcgtggtggttgtaattattagtgcttttaactttaactttattttcaatattgtttttcagctttttgtctctatgatatgatagtaagcaatgcagacaaaaaaagaagatagtatagtttaaattcatattaatacatagactaacggacctgaaacttgcagtaagacgacaggtgataatgtaatgtctttatgatcatacattcacatttacgcctgcttatggcaatccaatggcatgacagctttttgtataagtggatatatcaagtcacatgttacacgattacatggctggatccaaatgtagacatgggaagaccctcatacgacgtcatgttggtatgttttggattatttcttgtttgaacttgttcgccaaaagtccaagataaagttgtgggcaaatttgttgatgacaactaaataaatctaaaattgttgagaggttatgtcttaaatggtatttgaaattattaaagattaagtaggttgcgagctctcttatctttactgaggtagaccgattgctgccgctgctaactcaaaacgcaaaacgctacctcaccactctcatgtccttgtgattatagaaatatgggaaaagtaccaataccgcgctggtggctgcgtttgcgtccccatgatgtttcaatatccgttgtcacctcttgtttcttttccctaccttgccttgtcgccgaaggcatgcttttaaccgccttcgtgatctaagattaattttatgtgtttttctcaaattttagggttttaaaacttagttacacgcttaacctagtcatctgtgccgtctagacttaattatacgctcttagtgcctactctttcgtcatcatgtatgaaactaccaaggagatagatccacagtgaaacaacaaaaccaattttaagtcttttagaaatgttctacactggatcctcacaacaaaacctattttaagtcttctaagttagtgttgccttgcatccgaaaggcgaccgaggcgtgcgccttaggcacaaggcgagatcaggcactctttgtgcctagggtcgcctttcgccttttaaaacacaggttgtcactgtagatggagcttactaaattgattttgtgattaacagaaacgaacgacttacatttacagagtatacaaacaaacgccggtaatggcagagtactcattacactgactgaacaccaaaagaatcgagaaaaaacatccaggaaatggatgttacttgtgatgcggaatttgttgtggctcatctttccagcctttggatagaagatcatagttgatagacgccaactgagagaggttctgcaaaaccaaaaaggatagaaactcagaatgctaagcattgtgctcttaatactcaaccactcacaatgatacaagctcacttaaaatcagttggcacaacaaaaacaggcaagttttcgagttgtctggaggcagagcccacaagttcaaaacattatcaatcagtccctacagttcctacatgtgaatctgacatctacctacagcctaatacacctctacatgcttccaactcttccaagctaacataacttatgctaaattatatctgttgccacagaactttagatagatttcaatccaaaatgaaatgttatttatcggaatatcaacaactatataaactaccaaccaattgcattacttggacaacatttgatcttaacagatcagtcatgagttattaccttaaacgagaaattactgaaagagtaatctacaggtatgccagactcaaactctgcatgaccttcgcattcttcagcctgtgtagcaacattgatccagttcaaggaaattgcatatccaacgaacactaatgataagagttttccgactaattctaaaggaggtgaaatccaaagagtggattaatagatgttacctccccttcttcatgatgattgctcgagcaaccactgctgttagtcatgctatcagcatcactataatctggaacctcaccgcttgggaaaaattgctcatctgatgtgttccacgagtagcgacttctgaagtaacttgtgtcaattgcactctctgaagccggaacaaatgcagcctaaagaaaactagtgttaagctttaagaaggcacaagtagcaaagcttacgtttttaaaagaataagctaaataaatgcaccttttgccttgctagtgtgtcccagttgatgtctttaaagaagatgtgctgcttgacctgagtcatgaaactagtgtcattaacagtttacaactcgttggaactattaatcacataaaatgtttagacacatatgtgctgacttcaaatgaatgaatgtttaaatgagttgagaagtcaaataaataaaaacatggcatttgaagaccagcccaagtatgaattttcgtatctaagattttgagaaaacatatgtttctttgtcaaagcattaataagaaacaaagtagtgattagtctatgacctgaggatgttttgctttgaagggtagaatttttacaatgagttcaaagaggatgatgccaaccgagcaccaattagtagttgcacctgaatgacaatgccaagtataaattatattttaaacaatttatttaaatcatattaatttatgattatgccaagtataaattatattctatctaatatgaggtcgcatcaactatataattaatttatgattatgccaagtataaattatagtttaacattaaatcagctaaggttgcatattcggtctccgattttgtatttttaaaaaacatttgaatccaaattgcaaaattaacacctttttgtttaaacaacatgccatttcgacccacacgtatcattggattccaaaaccgttgtgttgactaatttatattaatgttgactcgtaattatacactaaaatacgagtttcggtatgtaaactgaatttttcaagagttaggatataaattagcactgatcgtttgttcggattggaaaacacacttttgaaaattgttcgggttgaaaatgaccatttttcctgaattattatatgcttaacttcttttttctaaagatatattattgtttgtttatctagtaattttctatctgcaaaatattgtttatcaaattattttgtctcaatttatataactaaggagagtcaaattccgactctttaagtgcaaatcataagtatgtctttttctgattgtgatgattcgattttaaaaggaagtagatcaaaagataattcaggttacaccattttgatctgtgaaagagcaaagctttcagatcaaccttgtaagaagatagtccttgagatccattgattcacatggatgctatgttacaaacctgaagaccaaaggacctgcatgaccctcgtgctctctacaattgcagtcaaacatgtaatctgatcttgccgggtcgtggttggaccggcctgtccggatattttagttcaagaacattaaatgtaaaaccattcccttaatcaagctgctctgttttgaaaacaagaatgaagaaacataggaaggagatgagagaataaattgtaaagtccaattatcaaagatataaatggtaaagaagagaaggtgtctataatagaatcagaaccagatagtgttttccactcttaaagattaggcattggatgtgacaaaaacatgatccaaatcatatttctcagacgagtatccgagctacaatgaaaaaagactagcaataattcaaactgaaactttaaatagaattagaaaaataatacaaaatcagataatttgactccaccaactctcatgccaacgaaatgcaaaatgcaaagatccacaaactaaaaacgattagagtgttaaaccaaaaaaaagaaagaacgactagagttccataatcatctagctgaaaattgcatatgaaccttaacatgcatgctttctgattgtcagactcaagttctctaaggacagttgagtactatccagcccatctctgttgaaacctcataaacgtccgtattatttggtacacaaccttgaataaaaatcttttctgatctggataacaagtagtctccaatgtgccaacgagaaaactccttgaccaataggtcgacaatagcattcttggtgcattgcctatcacgtcaagaaccggtgtgcagtcgcagattatagatagttgatgaagtgcacaccat

SEQ ID NO: 28460 - DNA, 1302 bp, Arabidopsis thaliana landsberg
  unsure (1)..(1302): unsure at all n locations
tcaatgggcagaccacatctctaaaaatggtaaaaccttgatgcctcaataattcaaatgattctctcagaaaacctacatcagtgaacaacaaccatgggcagaccaaagatttcaaaaagctaatacctttgtgcctcaaataatcggaagacgaacagctataagttcacagaagagctcaaggatctcttgagcagccatcatcttctcttcccttataatatgctcaacctagtaaagataaccaaagagtcaaacaatgttccaattaaactaataagaccatggatagaaacaaaccctaattcgagcagtagcttcttgaccagtctcgagaagcttcgcaatttcacgacgcatttgtttaatctgtgcttctcttctattcctgattagcttaatcctagggatcgttaacttgagcaaggttttgctgtgtataaaaaccacacaacacatgattgataatcagaatcttcttcaaagtttctagattgataatttaggcaaaatcataagagatgaaaatcagagaggataataccattttgcagctttgaaacccttattgaagaaggaatcgagcatcgacatgatcgattttttactggttacgatttgatgatcactgaagatcgatcgcgaagctttggaacagagaagattacaaagatctttattgcttctcaacgaaggattttttctctggttaatatgtttcgttagaaagaaaaaaagtcggaagagaaacgatgcgttttgattggtttaccaataagtcaaatccaaatctcaagtgaagttagttannnnnnnnnnnnnnnnnnnnnnnggctcagatatgggcctacactattggactctacatctgctaaagtcacaaaacaatttgctataaaaaccaatacattagtaggtagactggataagcttttctgaatgtgctctggagtctttatatctagccttagactatggttttcatcgttttcttgtcgctggtgacagaaaccagcgacatcaatcaaaaattgtttgtttggttatcgctggtttaacgaccaatcgcaagatcaacgatcataaaatttattttctatatccgctaaatagaaaatattatttagttaattttggatatccctaaaatcacaatctcgattacgagatagacataacctttatcacaatagaatgtacaatacagaaaaaagttattttatagcatttggtttgaataattgtattacttataattaatattaaaatcttttatatcacttaagtaaatgatatgat

SEQ ID NO: 28461 - DNA, 1994 bp, Arabidopsis thaliana landsberg
agaataactcatctgttgaaaaaatcctggcttcccgttcaaaaccgtctgtgaatcctgtgtaatagttgttccacggacctcattgtatgtagattcaggcactgtctgtatatctttttcaataaaacccccattcatgttaacatttgccacattttcctgctcacttgggaatgaaacctctgctctgcttcctccatgagacttatccatagcacccaccatactgatttcaggtatatcggttactacatctctagcactatccatattccatgtcaacaatccggggttttgggtaattatttcataacttatcttactatctacacgtgtctgcacaaatttctccatgtagctttcccctgattttgaaataagggaacacccatctagctttctggttttcaacttcacaacgcgcgctggatctgaatgatgagcctctaaatgctcctccaaaaacaattcatgcaatctgtgccagttgaataattgaaaccagccatttttagtcacagtcagataccaatataggaactacatatatatcataacagaaatgacaaacacacaagacataaaatagataatactcacttggcatgtgatgataatgcattttcaggtgtccctccattcctccactgagatgctctcctctacaagagaatagaaggaaaactatgagaatcacaaaatggaaggtaagattacacattcaaaacaccatgagcataagaaaatctactattcagaaaatctaccatgtaatggaaaccaaaatataaccaagaaggatcacactgcaacccataagctacaacctgaactaagaagctagtacctttgctttctgtgattttttctctctctgaatatcatcccatgattcttcatatgaagacgtttcaagcctaacaaacgatggatcggtgtagcgtttcaaacaagccccagctccggaaatatcaaacctaatcaaaaccatcagaagatgttacatatatccttctctaacaaacgactaaagaagaagtcctatcaaacaaggctaaatcatacttgtccagaagaaatagccttggaggacctcgacatttctcataatttatccatcacacaacgaggtaagtcaccacttgtaaccacactctgttccaattgtagattcggatgccattccacacctgaaatagagtcacagaatcatgttgaaataatccaacatcatagtagctgaccagatcatgaatgttcatagcaatctaacctttgttagagaaaaacggcgaatgatcggtttgacacagtaatgccttctctatagaaggaaactctgcttccaactgttgcacacgagccattaaaccatggcttctagaagcagtagccattacttcttcgtgcaagtcatgaaacatctcagcagcaaaccttcatcacaaattacatgaatttaaagtcaattccatcaaaaaatcaaaactttttccacttccacaaccaaatccagattcatcaaaattgtcgctttacaacaacggattccaaaacttcgaattcgatgcgcttagagatcaattagagaaatttcgattggagagaaacttactcagcgagatcaccgagttgacgcaaaatgccaacgagaccagccatagcgactccttcaagcagagcttcagggtcatctttatcagcagcttgatacagatccggatctgctaatccatactcgttacgagattggtacctcgtcaacggcattgtttgagcttctctgtctgatcagctcgctgatacttttgttcaaattctaaaggtaagaactttagaaagaagaaagactagaaaagcttctctgtcttcatttaagtagtgaccgaccaccattagatatgtgacgacatcactttagtggaaacttatacggctttcttgggattcaagacggcggatttaggttggggcaaagagagagagagaga

SEQ ID NO: 28462 - DNA, 936 bp, Arabidopsis thaliana landsberg
gatggcttgttgacgacagcgtttggagcttatattgaagtcagatcatatagtaaattggtggagttattcatgatactatcggctacataatcaacggtcggatcacgtttctaacggttagttcctgacttataagtatgttactgtgacggttttgtatggagtaaccatgacgggttttattgtttggttgggcaaacaagataggtttgagcctaagctttgcaggagtcttcaagactcagtgttttagttcttggttgatggagagccaagatggtgttcaatagtatgagcttggaagcaagctagtaacttgtctaaaggagaaaggagaagagagttgttcttcatcttcaactaggctaaggtgagggtggtatttgcggatatgcagtgaattatttccttatatactctttgatagttgctgagtataggctcgagaattttccttgttaatttatttcaatttgtgtgaagataggttgttagtgacatgatatttgaaatgcattggtgacatgatttgatatatttattatatattaaattacagaaattattatgtatatgagattataaaactaaaaagaatggaaaagatatttaaggatgttggactgtaattgggccgacggatccattacaggtcattaaccgctaacgagcaatgagaggaaggatcgagttacgggccgttgtcttccagaaaataggcttgagtagccaagattaataagcttgagtagccaaagttaatataggcttgtgaagccataaagtaaaatactaaaactaaaaatgaaagtaaaatatattgttgtgagcaagagcgcatgtttgtttgtttgattgttagacatactgaatctatgctaagtaatggtcgttaagtatatttggaacatttttactgtatgtccaatgggc

SEQ ID NO: 28463 - DNA, 1755 bp, Arabidopsis thaliana landsberg
ccatgactcgtattgtttccatattagttaatttcgtgaaagaattatattcgaatttgttttggagggggataaacatagctcgaatattttaggtttcttaaagttagttggatcgactgttctgtttaaatataattcgtaggaataatctaaattgtttttaaattcctaactcttaaattgattcggccactttgttcttttcaaattagaaatgcatacttttactggtcgtgcataagcattcgatgtatcaataacataaagttattttctactcttaaaatacgtgaactttaataaagagattatatggaagaaaaagaagggcgcatagagaataatttgtctgttcaatcatactctttttcttttctcgtttacacgaaaaacaaaacccattttttcttgcattgaattagttcattctataagtcgttttgttcaactcatgttatgtgttttattaaaactgcgtttctatgaacttacgtataaagtatcagcaagtttgattattaacgcttgaaagctagtcgaatgtaataataaatcgacattttgatatcttacgaatattaatgcctcaggtgacgtatctccgttgtgggggtatgatcctctgcaccgcgatcaatcattgcctctgcgacggcattggcacatcgcagttcctacatgcatgggcccatgcgaccactagccaagctcatcttccgacccgaccattccactcccgtcacgtattagatccgcgaaaccctccacgtgtcacacactcacatcccggtttcacccgaaccaccaccgtagacaaaagctccaccttcgacatttccaagtatttacagtcccaaccattggctcctggcaccttaaccttcaaccaatctcatctcctacgcttaaagaaaacctgcgctccttcgctaaaatgcaccacgttcgaggcactagcggctaacacttggcgctcgtgggctcaatctctagatttaccaatgaccatgctggtcaaactcttattctcagtcaatatgagaaaacgactaactccagaacttccccaagggtattacggtaatggattcgtactagcttgcgccgagagcaaggtacaagacctagtcaatggtaatatttaccacgctgtaaaatcgatacaagaggcaaaatcaagaattaccgacgaatatgtaagatcagcgatagatttactggaggataaaacggtgaaaacggacgtctcgtgcagtttggtcatttcacaatgggcgaaattgggattagaggagttggacttgggaggaggaaagccaatgtatatgggtcctttgacgagtgatatctactgtttatttttacccgtggcgagcgataatgatgccatcagagttcaaatgtccctgccggaggaagttgtgaagagactagagtattgcatggttaagtttttagacggaaaagataacgaagatgagaattctcgtgcatgctaaagtttttatgtacatttcagtggtctataataaaagagtacttcacttgtcgatttttgattggttttaatatgttttatgtacgaaatattttcttatatataagtttgaaaacagaaaatagacatatgaaccccaataaagactaattaaagagagtactagagtagctcacttgtcgatttttgattggtttttattaaacacaaaatggataatatgatgagtttaaaaacagtctttctccatgcta

SEQ ID NO: 28464 - DNA, 2337 bp, Arabidopsis thaliana landsberg
ctaatctatcgaagaaggagcgtcgtgtacaggctaaggtaaaacatttttggattttgaatctatatgtctgatgaattatactttagtttctgattcttcatgtgctttgatttgggtttgcaggagctaacagaagctaggaagaagaagagaaagcctcattacaatcttgagcaagtatgctgctttgtgaattgaaattttctggctttagtttttttcgtcttctagttattgtaacatagggataactcttatcaggagcttgtatctctatgggagaagatgagacgccgtaatatcggcaaggaggatcgatcaaagttagtttatacaataaattgtcaatctttgatttaaaaaggttatatattgtatttgtttgattaaacttggttttgaaactatttgttaggctgatttctgaagctataaggaagatgaaggggaaggttccagagattgcagtctcacatgtttcatctcgtgtacttcaggtatgtttttgcatctttgagttttgttaataaggctgtcaaatttctaacaagatatgtaattgggttgttattttcttcttgttacgtagacttgtgtgaagttttgctcacaagctgagaaagatgttctcttcacggaactccagccacagattcttaaccttgcttctaacaaatatgctgttcactttatacagaagatgttggatggaggtatgctctaacttcaacttgtatatacagttagctttatacaaactgctaatttgagtttatatttgtgtagcatctaagcagcagctggcagcttgtatatccagcctcaggggacatgttgctcctcttctccgtcatgtgttcggatctcttggtatgtggactactgatgtaacatagtgatgtttcaacatatatagcattttttgtttcttttgaagctcactttctctttgttttttttataatcttcctcaagttgtggagcatgcataccatctgggaagtgcagcacaaaaacaagaactccttgcagaattgtattctactgagcttcagttattcaagggcttgaccacatctaacgaaaaaacgtaaaccttcatttatcttcctgtcttactcttaaagtataggaaatagagcagccaggtctcttgtatctttttttttttgatacttgagaactaggaatcccttatcttagctttcattgttgttatttgcgatggtgattacaaactcgatatcactcttcactgtcatgagttgaacatatattaagagttacagaatgtgattcagggtggtggacatcattgctaagctgggactgcaaaaaggcgctgttaaccgacacatgactgccattatccaaccgatacttgagaagggaattgtcgaccacactatcacacacaaattgctgattgaatacctgacaatagctgataaggtatatatatgtataatttatgtgagggtttgggattacaaatttgttttgcattacattcttcttgttttatgctaaatggattttttttttttttttttttgtagacttctgctgcagatgtgcttcagctactgacaggctcccttcttttgcgtatggttcatacccgtgatggttctaggcttgccatgctttctatcaaacatggaagcgctaaggtccacattcttgaactttttaagtaggtatcctttttcttttactcgttaactgataatacaagggattacccctcagaattatggtgggtttcatttgtatatctcataagctttcatttgctaagtttttctttcctttctaatggttgtatatgtaaatcgtgatttgaatgtaaatagcaaaacattcttgtaagacctttagagcaaaggactgattgtagagatttcaatagaaaacttataagttgaacttctgctctttctaaatcgtattcttttgcaggagagaaagaagattatcaaagcaatgaaagagcatgttaaaaagatggcttttgatcagtttggaagtatggtaaggaggcatttaattatttccttttgaatttacaacttatagtacttcactaccggtttgtatccgtctttcagatgttaacccttgtctaccatgtgttctcaggtgcttgcatgtattttttcaatagttgatgacacaaagctcgtgaccaaggtagtttcactgagccaaataaaaaattgtttgaatttatatgcttatgttctgattcttctgaatcttgttcaaccataaacagataattgttcgtgagcttgaggccaccctaaaggatcttgttatggacaaggtgtg

SEQ ID NO: 28465 - DNA, 1898 bp, Arabidopsis thaliana landsberg
  unsure (1)..(1898): unsure at all n locations
ccaaaaatacagggctatgaagtgttctacattggtgatataacgggctctgagaggacttcaccgaagaaaaccaataggaagccgaagaacataagtataggagcataagttagaagtgaaaacgttgtaacgacgagtctagtgtaacgcatttaccatggcggccaatgagaagaacagaggacggagaggatagagatctcagtagttggagacacttaatatatagtgaaacagaagaaaccctaatcggcgaatacattagttgaactagtgtattaaagtactatttgttcatatgggccttctgggccacttatcttgataagtaggcttaaaaagcccaattatgtgctggtaacacccgacttgtaggctaaaaccctcggaacttgtttcacatcgagacaactctttagacttttctcagtaacaaaaacaccgaaccctagattttctttcacctgaatctgaagatggagttctctaccgccgactttgaaaggcttatcatgttcgaacatgctcgcaaaaattctgaggctcagtacaagaacgatcctcttgattccgaggtttctttcttctacttgtcctcccctctcctcagaatttgtgaaattgcttcatttcgattaatatgatcggacctgatatgtaacgaatattaaggatgttttgtggagatggatttcgtgaatgtattgtcactatgtgtagtttaggtcttgaattcgatggaaatattataatttatgttatgagattgattatatgtttctctgaaattacattttttcctgagtttcttttgatatgtggtcatattaagaatacctttgcgaacatttttattttctgtagaatctgctgaaatggggtggagctttacttgaactttcacagttccagcctattcctgaagctaagctcatgttaaatggtatgatctcttctttaatgtcttaaaataagcgcctcaaattcatctttgctctgaaatgtaacgaaatattattgatcatgtagatgctatttccaagttggaagaggccttgacaataaatccagggaagcatcaggctctttggtgtattgccaacgcgtacaccgcccacgcgttttatgttcacgatcctgaagaagcaaaagagcactttgataaagccactgaatatttccagagagcagaaaatgaggtgcattttcagattttatgcttttgaatttgaaacttttatgttgttgtgagtgctgtgagaccaacttcttactattatattatttcaggatccaggtaatgacacatatcgcaagtccttggattcctcactaaaggtattatttcaacattccattttcagagtcaatctttgtgtacgcaaattataacattaatcatggagacaattgctgctgttataataacaaggagagaacattttattccatcttcttcttctgtatttcttttacatttgagctcatgtttttgtctgtctatgtgaataggccnnnnnnnnnnnnnnnnnnnnnnnnnnnnnnggaatgggacagcaaatactaggtggaggaggaggaggaggtggaggaggaatggcttcatctaatgttagcgtaagttatcatgtgtttaagtatgctgtccaatgttttgaaaagtgtcatcttcttattatctagtagcagcatgttcagaagaacataagcagagagtgaaagaatctcatatcatatgtgggttataagttttcgtggttgctctgagaaattgccttgcttttgcagcagagtagtaagaagaagaagaggaacactgcattcacttatgatgtatgcggttggatcattctcgcttgtgggattgttgcttgggttggcatggcaaaatccct

SEQ ID NO: 28466 - DNA, 1879 bp, Arabidopsis thaliana landsberg
ctgcctgtttaacatatacccaaaggaaataagaaaagacaccaacggtgaagaatttagaagtagggccaataataatcctgaaagatagaaagttaacctgccaaaatgtgtagcaaccatcgaccaatttgttcgtcctaccttgaaatcccatttctactccttgtcgatgtacagcccaattctagaatcataaggaaattatttggtaaggaaaatatctctcagggaaaattattaatcatctccaaacagcattgtatgttaccattaatgaatccaaattcaaacggtcgacctcattgattaaaatcatagcagccaaaccacagtaggtatacctaaacaaaaaacaacttggtaataagcaaagctgcaggtgacaaatcctatttcagaaaattaattatacttaaccatcaataaccatgtcatcaaggaagagggaagcaaagcacaatttttatctaagcctcaacataatggaagtaagtaggagaccatacccaccgtgagcttcggagccaggttcccctccaatgccaccttcataagtttggcaactgctcaatataaatcgagttaaaagagctttcccagggaaattaatgaattcctgaatttacaactgtataacagtagttcagctatatatatataatgcgagataaaagtaataagaaaagctacctcaagatgtaatctcctaggccctgggtgagttcatcatccataatatttaggatgcttgcaacctgtgtcacaagagagaagtcaaacatatcagggagaaaaccagccataggatgcatttgcaagacgtgtaagtctcaaaacgagtaatctctattcaaagtatctggtgggcgcaagtgtgcaaataataagatcatatcgtaatctgaatgtgatgtttaagccatgaaaacggaagaaacatagcataatgggtccagactttgttgatctcattaatcctaaaaagttttggtgtccacaaaaacagagaaaaggaaaatagaagttggtaaaactcaccgaaattgcagtgtagcatgcacgaacatccatttctcccatatcatgcatcctaacgatcagtgagtaagtagaattaagcaagaattaaaaaaacaacatgactgaaggtatggcattaacagcgatacgaatgcataaagagtgcgctgtcagtaaaaatgatgcctttaagaagttcaagcagaaagagaatcaaacctgaaacctccacttgtatccttcatccgtcttaaaaaacaagacattttttctctgaaagaagaatgagtcacatgtaagtattctagaggaaacatcactagactcttaataaaagaaactgaccacaaagaaaaaagaatgcaccacctattaattgaagaaagggctttgtcacctcctaaagtaacaagtgcattcactgcagcataagtagttgcaagatgtggaagctgggaaaaaatatctccattactagtagaaaaaaaaaggaaactgaaaaaggcagaccaaaagttatatatcctaactttctctgccatgtttggaaaatttacaaccacaaacttaaacaactaaatgctgcttgaactaaagacaccattttacgtcttcacagaaaaaaacttaaacttaaactacgtgtgctgcttgaattaaaggcatcacaaccaaacaatgagatgatgcataaaaaaaacacctaaaagagatctggcagaataaaataatctggtctcaatgtttatccccaattgcatgaaatgaaagtgatcacacactttaaagaacagacatatcttacttggccaggaccacaccgtatcaccttcagagcgtgacaagcgacatgaga

SEQ ID NO: 28467 - DNA, 5507 bp, Arabidopsis thaliana landsberg
gactcgctatttgaatcgaaattttacccaaataatactatagttatattatttggtcagttctctatatagactagagtttgttgtaattcttgacccccaaaaaaagtattaattcaaaatattaaaatcttaacttttgacccccaaaaaaacacatcttattttagttaattacttaatttaattctgttttgcttttgcacttcttaatttgtacttaaattattttacaacaaattaattttttttgttgatacctaaagtgataaaaattcgatatcataaatgcaattctttttgagaaacttactagattttaggttatatatatttttcactaaacattatttcttgattagaactatagaagtctattacaatttggcaacaaaaaaatatatattagtgtatttagttatatatgttatatatgtatatatattcttttaattttttaaatgtctaattcataaattaactcatgttcattaaaactcgttcatataatttgtactctaaattatacttgattatataactcatatattaaatgaatttcattcatactgataaaaaaccaagctgagttgactcatctcatgagctaacatatcatttcgacacctctaattaggactatagaagtattttactatttggcacacaaaaaaaagtatattatcattacgaagaaaaaaaagtggtggcctggcctccataggatgctcatgctgtctttgaaggcccataagtaaggccatgcctatttgacggtcaaagacaaaaatggttccatttgaccaagaagatcatcatatagtattatgacagttattgtactccccaatccaacacagcaacacacgaatgcctagtcggtgattcatcatgaagattaattcctacataattagtattatcttctaacaattctcatttttcaaagattcaagcctgcagctccaaagtgagaatcacggattgtacttaaatcgagtgcgaatatagctgatgtttagaatttttggtaaatttctacgtttcgtagatataattttttggggttactagtaaaacccaaatctccaaaaattcctaatctcgaattaattatgttttttttatcgtcgatttattatttattacaaattataaaaactgttatatagtcgattatactacgaacaattccttccaaccgttattagatctacgacagccgccaccaccttctctttcttcatgcttttgatgaacattttttcaacaattttttttgcgtagaatcctaacaagcagttatagttgtacatcgttggagatctcttacatacttattccattaatctgcaaatctgctaataaatttctatcgtcgaagcttttgtaggtatacgtttttttatttctctcactttaaaaataaaaactaaaaaaaattttatgcaaaaacaaaatgatctcatatgaggactcttgtatgttgggcctggccctgaagatatctattgtaagaaagatcaattaaaaaagtaaaaattaccataactgtcattctctaatcataatagcttactttgcttcacttgattaggcataatatttgaattctatttgtgtggatcaagccagctttggtttgctctttatccacatgtgccacgtggagcagcgtgtcagtcaactttcaacaactacttgactctcccgacgataattaccggctatctccggttctcgtttccgacgtcggccgtttctttttcatttttgtcgtttttttttccaaatttttttatttcgggaaaataacaaaaaaaagaaataaataaaaagaggtgattcaaatccagagagttctcattatgtatattcaaaatctgaatcgagaaggaatctgactcgtgtagatgagaatcggcggcgtcgaggttacgaaatttgcgtcggagatgatgtcgtcgtcgtcttcgtcggcggtggagatgttgaatctcaaagaagcttcgaattggtggtcagacgtaaacgaatctccgatttggcaggatcgtatcttccatgttctcgctgttctctacggaatcgtttccgtcgttgctgtggtacgtttcgtttctggatttgattgatgattcttcgatgaaattggtgtaacatcttatgtttgattttggtttagattcaacttgtgagaatacaattgagagttcctgaatatggttggacgacgcaaaaggtctttcactttctcaatttcgttgttaatggaggttagtgttgctgcggattttgatttcgtgtgttcatgttgattgattgattgatttggctcatcttgtatctggtagttcgtgctgtggtgtttgtcttcaggcgaaatgttcagtttatgcaaccagaggtttaggatcattcaccatcattgtaattttaatcttattgacttgtttattgtgtcaaccttctaaatttgcagtgttatctttgtagattctgcaacatatcttgcttgatattccaagtcttgctttcttcaccacctatgctcttctggttcttttctgggctgaaatttattatcaggtagtttctaatgagtatctatgggtttcttcttttgtcaatgcttctttggttttgatattttacttaacactcttttgattggacaggcgcgtgcagtatcgactgatggactcaggccaagcttcttcacaattaatgcagttgtatatgtagttcaggtattcttgcaatctttaagaaatttaagtttggtttttgtggggtcatggcatatcttattggatgtattacttccagattgctctatggttggttttgtggtggaagcctgttcgagttatggtaatcctatctaagatgttctttgcaggtaattagcttcgatcctatcgagacactctttctatataatccatagtgcctgtctcacctctcttgcgaattttatatttgcaggtgtttcattgttcgctgcccttggatttttactttatggtggaaggtaaatctgttgccactctaatatgttgacatttgacattaccatagtttctatcactaccactaaaactgtgttgtcatttttgaggaattagatacacaaaattgtgctcatatttcttgcagtcacagtcacttgcattttttcctgctttgattcctagctagactagattctcttggtgctaaagctgagtaccattaaaaatgattatattcttgcatttgtgcttaattatgtctccttttatattgatcttatggcaggcttttcctaatgttgcaacggtttccagtagaatctaaagggcggcgcaaaaagctgcaagaggtaaaccatcgattgtacaaatcataagtatagtcaactatttattgcttctcgattgtttactttcactcttatgtatggtaggttggttacgtgacaaccatatgctttacgtgtttcctcatcagatgtatcatggtaaagacacacatgaacaaatctttatgttgatatctatcaatccttaccttcttggttggattatcttctctacaacaggctatagtcagttttggaattaaatctaaccaaagcttttgtcatttaatatttgtttagatgtgctttgctgctttcgatgagggggcaaaccttgatgtgttagatcaccccatccttaacttcatatattacctggtaacctctctcttagcttaatcatagaatctgatcatgaacattagcttaatatatgtaacctgatttcgttacttgattacagttggtagagatattaccctcctctctggtcctcttcatcttgagaatcctcccaccaaaacgaggcattagaccagaaggttgtacacatagattaatgatcagaccatttttaatcccaaaactctctgcagaatctcaagctttctatttcatttctatgtttgcttcaataatagaagcttgatggcccttctccatttacgtgcttttgaataataaatctgtatgacacaatatcttcaagtgagtaatgtgcgtttaatggggatggaattcagattaaagttttaaaattatgttttcttggttctgaaaccagatatgatactaattaactgctggagtagtaacatgatacaattaatcgtaagacaataaatatgcggtcgattcataagaaccacgtctgatgctctaaagatttgtgagactcgtttttatgtaaagcataaatgatatttgttttgttttcataattgtatataaaaatgcaaagaaataaacgatttaaactacgaattaaaaacactgggtcatacagtaattcagagatcaataaagaatgaaacaacaaaacagaaattcaacaattaaacaccatgactggataggggcatgcacactgatggactaaagccaatcttcttcacaattaatgcaattgtctatgtagttcaggtatattgttatatcgtataattttgtttgtaaaatctttaagaagtttgtgaaaattcaaaatgtaattttgtatgtataactgaactttcagatatctctttggttgcttcggatgtggaaacctgttcgatcgagttatgctaatcctatctaggatgttcttagcatgtaatttggttccatcgaatttcaccaaaagtatatatttgtcttggtatatcatatatggtactttagttgtctcaagtctcttgtgaatataacataattctaggtgtttcattgtttgtcgtccttggatttttacgttatggtagaaggtaatatgtcactacttgaatatgtactacatttgatattagaatgtaaatatgctcatcttgcttgcattcttgttcaccccgctaatgcatggctagactagattctctcttggtgctaaagccgagtacatctacgtaccatttaaaatgatcatggcatgcattggtttatcaaaaaagagcttgatttcttatccttgtattatgtctatcttttggcagcctaatgttggatcggtttctagtagaatttaaagggcatagcaaaaaagatgaaagaggtgaaacatcaaattgtacaaaatcataaccaatcaatatttacaatatgacgcttcttgactcttcacactctttctctcttatgtatggttggttatgtgacaacaatttgctttacatgtttcctcatccgttgtatcttggtagagacacacacacatacacatgtttatcttgatatctattaatccttaccttcttggtttaaattttagactggacaactaaccaaaggtttattcatttaatatggtttagatatgcttcgctgctttctacgaggaagaaacccatgatatgatggatcatccaatccttaatctcatatattacctggtaagctctctcttaaactaatcataaaaattgatcatgaacatctgtgtcatacataatcaaaccatttgttctgc

SEQ ID NO: 28468 - DNA, 2381 bp, Arabidopsis thaliana landsberg
aaaaaaatatgaccggcgcctggaatcacatgatacttgatccaagttagtttctgagcaatgatcctttgtagttgtatcgggacgagccgatcatcatccccttgccacatatgtaccgaaaccttcacccttagggaacggattctcgatcttcatagggtcaaaactccatttcccaaatccaacaatcaggtctcggtcaagtgattcgtgtgtcccttgttgtgttgtttggttcttgtaagacacccttgcggcgagtttgggtagtagtgcaagatcttgaggagagaacatattggggcttgattgcatcacagctgttgttgaaaatagcttttgattgttccaccagtagagtagccatggagtgtgataagtaatgagcatcgaaaacctttcggattttgattgtttgttccatagctcccatgtcaaactatctgggaaactcggccaccatgagttggtcacaggacaaatcagtgtcgctcctgcgagcctgtgatgaatgtatttgagaacaccccaaacggcttgacctcccattgagtatccaaccacgtaaaatttggaaccaagttgtagttggtcagcaagttgttcaacgtcatgagctaaagtcttttcattgcgactcgagtgaggatcgctctctccataaccaggtcgatcatatgaaaccacgtagatgccatttttctcgagaaagccctgagagacaaacaatgcaattacagaaatactctataagagaaatagtaagagagaaagatatcaaatcattacagggcgaacacggttggcgataacagcgtcacgcctaaatgtcgagaatgcatggataaagacgatcttgaaagtggcattttgtctactaactccatgttcttcataggctaaataacggccatcgctgagacgtatcctaggggcggtaataggcggtccacctggggttccgcatctcttaggaggtggaggtgtaatggaaacaatagcccatgcccctaatccaatcaacactattaccactgctcctgttattaaccctatcaaaattttcaaatcaatatatcagagttcacatttccttcatcccttttgcaaaacttacgtttacttgaatcaatcaaaaactcacatttcttcatgttgaaaaatccttgataaaaagttgggcaataccaacttatttcaaaaataaattggtatgggtttaaagtgtaaaactatatttatagggttgtgtaaaaacaaaattaacagaggaaagctcttcatttgcatctcacgttatgacaacgcaaatcacggtggattcactgaaagatcttttgaggcatttatccggaaatagccggcagcaactaaacccagccattataacaatggttccaactaacgtattaacccatctgtttttgggaaaagccaatgacagacacgagattaactagttttacatgtcacctttactaacaattatgatgaaaaaaaagtaatgcctagaaattgatatacatcaatgcatatattcttttggaacaatacttaggtttttaatgtgcatgaaataacaatttattattattcattaacaaaatagtattcaatcattgatttatagatttataaattttcaaaaaaagttgaattaatctgattttttttgtgagctaactttcgtaattaaaagctttgaaagcatatattattttggtaagtgttttaaatactgttgttgtcttcgggtcattgttgcctccagatacattaataatacaaaggttttaaggtccatataaactcaagtagtactaatctgtctcttttcattaataataatttaacaaaaagaacaaaatcaaaatcactttcacagtttaagcacaacggaatttagaagtttccaactgactttacacacagagagaatcaattattgtcagacatgtcacgaaatctcgcaagtgctttcttatggagaagagttctgtaagtgtcaccaggctgaacctcaaactcagcatcaactttcttctgctgactcccaagtcctgctctcctatcaacgccttgcgcttgcaccggttctttcattccgctcccgtctttccccaaaccctgaccacatatccaacaatcaccattaacatataaacgttacccatcaatcaaatctctggtttttaaagttaccgatccttcgtgccaacccatgttcctcagcattcatgtttccacgttactctcatctattgctctctcttctgtaaacacatcgaaactactgacttcggtgcttgttgtaatccacgtccaccacaccaggaggaaatggtgttggatcagatgaactttcctgaacccattaa

SEQ ID NO: 28469 - DNA, 1700 bp, Arabidopsis thaliana landsberg
aatccattctcgtaatttcatcagaattgggacaaattctcaggttttgagttttttcttctctctgtttcaatctctctagcatcaacaagtataaagttcctaactttaacactttacgctacttgaagagtgacagattctgtaatcatcgtttggaattggtacatggaactcgtaaagtgaaaggagcatctgtacgtatggcattagttgatgagagacaatcaacgagcaaagatgttgctgagcctcctcggatcctggtacataaagtttgagacttgaacacattttgatgtgaattcatggactttgatgattgattatatcttgtaccattgttttcaggcgtatgatcttgtccaaggagcacttgtaagttatttgagagctagtctgttttatatatcttcactggagtgtttaatctttgtgtgtaaaagaaaaagtattgaacttgataacataagtttgagagattatctgtgtttcagattggttgtggacttaaatgattatacatacgcaggtgaaatggagatggaaggatgacaaatctgttccagatacacctactgctgttctcctacatggaattctagggagcgggaaaaactggggtcagtgttatgtggttccttgtgaatttgtttcaaatttggctggagttaatttcttcaatattataaaaggaactatgaaaccagtgaagtcattcctgaatctcttcatgtgcctgttagtggcaagcaaaaagatcatcgatctttttgaatcgctgaattgttcgaaagggattgttaatgccttctcagcgtttttagttttgtttctcttttgttcaaactttacggtttagctgtatagtgtggaaagatttctagctaatcataataccctttttttcttgcttgggtcttgctactctaggcacttttgctcgtagattggctcatgaattcccaacgtggcaggtatttgtttatccagatgcacacttattgcgttgcaaataactaatcttctcctcttaattcaatcttcatagtttctattggtagacctgcgttgccatggggattcaacatctctcaagaagagaggtccacactcggttgctactactgcttctgatgttctaaaacttgtaagtttctttctcaagcaacacagtactggattattcatggtaggtgacttttctgataccatttttctctattctgccattcttaggttggtcagttgaggttaacacctcgggtccttgttggtcatagctttggggggaaaggtgacttgacgtctatatgaaattgcttcatcgagattatttgctcagacgtgataacattcctgatgagtcttttctatgatctttgtagttgtattaagcatggtagagcaagcagctaagcctcttccacgaccagtccgagtaagtgtttatccgatgtctatatcgcaatgttggtagggtttatgttaaggcccctaaattatacccaatttaggcttgggtattggatgctactcctggtaaagttcgtgcaggaggagatggagaagatcatccacgagagcttatatcatttctacgtaaaattgcccaaaagtgggtaagctaattgaacatgcatgtacaaatattacaagaatgaattttgctggacattacaagaagagtgttattgatt

SEQ ID NO: 28470 - DNA, 1326 bp, Arabidopsis thaliana landsberg
ccgagaatatgtaactctacaacccctaacagagtattcttaacacaatccaagttccagaacagttgaacaacatctttcatttcatagtcctctccaagataaacaacatcttgtatagacatacaatagtagtaggctcaaacaactaaccactgagatgctatggtctaaacattgaggaatgatgaagagaagagagatgaaggagtaaaacctcagcagtagatccgcgaggctcagtcaaaataatccgggaagacccatcgccatcgttgcctaagttcaaaggcatcccttttttggccacaagctcactcttattctcttcctttttctacaaatctatctccttcactcttaactacagcaacaaccaaaacccagatggaaatctatcaagcattttataagaacaccaaccgtttaccaaactagaatcatgattctcatttcatgttaataaaaaaataatatgggaatataaaaaccggaatcaattccgcaaaaaggggaaatcaagaaatattaacagaaatcaaacacgcttgcgaacaaaacaaaagggaaagagattcaagcttacgtttgatcggaaaatcgtacggattgcgacgtaatcaagagcaaacgagtccgcgatcggcttcgaatttcaacaacttccaccaaactctacgcgtttcttgaaaaaaaccatcaatcaatcaaccaatcactcaaatccactacgcgacacacaacgtgacgataataacaagaaaagtagctcaaattgtagacgagagagaaatagatcacaaggataaagagagaaattgagatcgagagagtagaagaaaatgctgaccttggtgttctcttgaataaggctctgattctcagaaatttgggttatgagtcagaaagaagagcttgttgaggacgacgacgaagaagaagaagaagaagaagaagggcttgtgcgtactatttgtagctgtttccaattctcaataacaggcactagctccgatactgccacgtccttcttttcttttatttccttaatcaatctttatttattgttctctaatttgttatgtttatcctggagagatgctactatttaaataacattaaatacactacagcacataataaagaaaatgttgaccaatagaaaagctacaagtaagtaagcaagagtagtggaccattattagcccaactcatacagcccaggcccaaaagtttttactaaacgtattcgcgcttcatgtttttgctttgaagttgaatccatccttctcttctcttctctccctcgcaaagtttactgcaaga

SEQ ID NO: 28471 - DNA, 1066 bp, Arabidopsis thaliana landsberg
  unsure (1)..(1066): unsure at all n locations
atacatactgagcaggagccggagcaggaggacgaggatcgaaaacttgttgtggaagcaaaaccttttctacctgataaacagcgagttgtccatcgctgtagacattgccggagacggtggtgttggttacgccggacgtgatatttacggtattgccactggtggtaacgttgagaggaaaatgtccatcggcggagtcaccggcctgagtccggagagggttacttattgtttggaagtttgaggaagagacgtaacttggtatgacatgaaactgaataagctctacttgttgctcatcggttaacgaatttagggtcccggctttgagaccggtgaacgaggaatcactcggtgcgaatatagtgattccattgtcggagttgtttagttggccgtagagttggttagcgactccagtggatttgaggagtcggatgannnnnnnnnnnnnnnnnnnnnnntctagattttggtaacgtttgtgggtcctggtggggccggagcgacggctgaagagggctgagatagggttccgggagtggtggtgagaagaaggacggtgaagaggaggatgatgagagaatgttccatggctctgttttcaagagtgttgatattttgtttgtgtgagtttatatgaagagtaaggggttatattgaactgggggaaattgattggttaagaggtcaacatattttaacaactaagttgattgttaataaccaatgatgattttatcacatgaattgctttacctacaggcaaaattattggatatatagaagcctttatgccattgataagcaaaggggtaactgtttacttttttcttttttggttttattgttggttggatagttgtattttgtggtttaatgtaatggttttagatttaccagttatatatgtaaatgtaagaatgatatcttctcttaaaaaaagggaaactaataaagtaattaatcaggttctagttggtaacatttgaaatagagctaataatgaaaatgtataaaaaattatcagtagttggtatgactgcgataaagtatattaaca

SEQ ID NO: 28472 - DNA, 1082 bp, Arabidopsis thaliana landsberg
  unsure (1)..(1082): unsure at all n locations
tcccggcttagcaaccttcctataataatcttttcctttagtaaacttaatcaaatcctttttaatctcttcttttttatcaagatccatgcccaaagtctggaacgacgcatggtgattaaaaggaacgttgctccatagtccttcccaccaagacgaataactactactgtcattgttagtgtagagcttcctctctctgttctttaacgcaatctcttttccttctctcaaaacatgatcaatataagtgtttgtgattatatctctatgatgattttcgaaagtcagagtcaagtaccttccctccttcgaattatgtctatcctctttatctaccacggtggaagaccataccacgtttacaccttggaatacaactacaactgcctcgttgtcgtccaaacaaagaaccaacgatttgctgttttccgattctttggcctttaatctcttggctctagcaggtgatatcgaggataaatagatgcgtatctcatcgtaggctcggcttttacttagaccttctcctgtgtattcagggaatctgatgtaaacaaaatttgagtccctgcggaacaactttgccaaatacttctgaatggtgttttccaagtattctcgtagttggtatggcacaaactgtttatacattggccataggaacataagactcgccatagtcgtactggtgaaaccccatattgctccgccctcaagcatctgtgtgtttctttaaattctctttgagactttgaggatgtgctatcactacttatgtatatatagcatgatcttttttgtcgttagtttttttttacgtctgttacggtagaaaaaaaaaagttaaaaacgacaatatcgattcaatataagaaagccaatatcaattcaatatataagcgacaatgtctattcaatataacaaagacaatagtagttacaattagattcaatgagctagtaaatggaaattgagtatatttttttagccctganggattggtctgttgaaataaaacaaaaagngaagtccaatatatggatttaatcagtaagagtgtaatcagataaaagaatca

SEQ ID NO: 28473 - DNA, 502 bp, Arabidopsis thaliana landsberg
taatcactcaaccggttagccagataatcagataaccggttcagtaaggtattgacaggaattgtaaaacgctttttggaggagccgtcaaattgatttcgccgatttgctcatctctgactctcagttgctttgctccttctcatggagaatccggcggagaaacccgacccgaatccatcaacacccaaaatcgaatctgaagatgaaagagaagaactaggagatattaacggcgacgaagaagaagaggaagagtatgaggaagaagatgatgggaaacctcgaacgcgagaggatgcaatcgcagataggatcaaagctgagtctctgttccgtcgtatgcgagcaactccggtcgctgtgcgtgttcacgacgtgatcgtcaagggaaacgagaagactaaggatcatgtcatcgaggctgagggggatgttgtgaggcaagccactacgttgcaggagcttctcaaagcctctaaggttgccaatatcaatctac

SEQ ID NO: 28474 - DNA, 2012 bp, Arabidopsis thaliana landsberg
  unsure (1)..(2012): unsure at all n locations
aatccggaatgtatatgcttgaaaaccatgaatattactatagttactcaacctgatatattcagaatgctgtgttgattcttcagtggaatttgatttacttaggtttaatataagatagagggttattcctaatgttctaatacgttacatagttgttggatatannnnnnnnnnnnnnnnnnnnnnnnnnnnnnagagattacctaccttgttgtttcttaggtagaaggacgggaatgggatgacaaaaaacggaccagcattttgaatgtacggttgtatcttcagaatgcatcttcacggctgaatcaagctagaaggaatctcttggaacgtagccagtggcatgcaagtcgcattctcaacattacatcccaaattcgcgagtttcaagctttgtcgtgcataaaggatattcccgtacttcctctgatcttaagtcctatgaatgattctaattatgattccgaagttaaaagatcagatctgcgttcactaccacattctctacagcaaatacttaaatcatctttcaatgagagtcaacttcaggctattagtgttgctattggctcatccaatttgatgaaagcttttgacatttcacttatccagggtcctccaggttagtcattttatctctttgtcaataaagctaataatatctataatttgctctgggagaaagattagcattttacagtaattgattgttgatgtcggacatcaatgaatgtaaagaaaatttgtttgctctacagggactggcaagacgcgcactattgttgccattattagtggcttgcttgcatccgcctcacataaagctagtgacaggggaaattctgaaccaggtcatagttcttcaacctctaggcagggaatgaatccgagtgtcgctgttgcaagggcatggcaagatgcagctctggctaaacagctaaatgataacagcgaaacgaatagaaagatagcagaaaagaatggtagaggaagggttctgatctgtgctcaatcaaatgctgcagttgatgaattagtttcaagaatatccagtttaggtatatatggcagggatgggaagatgttcaaaccttatcttgtgagggttggaaatgcaaaaactgttcattcaaattcaatgcccttctttcttgatacccttgttgatcagcgattggcagaggagagaatgcggataaacgaatctaggagtaataagggtgcagattcttctgcattactgcgctctaatctagaaaaagtcgttgatcagatcacgcattttgaagctaagcgtgcaaacataaaccaggaaagtttagacgccaaagataagccggagaatgaacaccacaacaaagatgatgatggcaagctaatgtccgatgcggagctaggaataagattgcgaaggttatatgagcaaaagagaaaaatttacaaagatcttagtgctgttcaggctcaagagagaaaagcgaactatgaaatgagaacattgaaacaaaagttgcggaagtccattcttaaagaagctcaaatagttgttacaactttaagtggttgtggaggagacctgtacagtgtgtgtgctgaatctttagcagcccataaatttggtagtccatctgaagataatttatttgatgcggtggtgattcacgaagcagctcaggtaaatatttgacatgcttgatgtttggcataggtgttcttgtcaaaagtcataacttttttgcttttgtggcttgacaggccctgaagcgtggtaggttaattcctctacaactgttaaagtccaaaggagcaaaatgtataatggtaatcattgttcacttgcgtctcagaatgttctatcaaatccgcagttttatttaataacattgcttattataacaggttggagacccaaagcagcttccagcaactgagctctcaaccgttgcaagtaaatttttgtacgaatgaagcatgtttgaacgtctaccaaggactgggaacccttt

SEQ ID NO: 28475 - DNA, 842 bp, Arabidopsis thaliana landsberg
gacattgtatctccaggtgtgaggtgaagtcgtgaagaagacattgtatccaggatcagatagacgttgttggataaagccttttatggagaaggaaatgagaaaagtaaacttattactacaaacaaacaagtgggctccggtgcaaagaccttttggcattgactacaaacaaccgtggacaaggaagtcggcagctgaggatattgacttctctgtagctaactgggttacttggttaggtccggttaactggattcaagaaacgaaagttagaaataaaactgttacagtatgatatattcatatatgtttataaacattcaaatcttgcttaacaacaaacagtatgatatagtgctttattattagtatttacatgaacgctaaaatattatattatacaaatagtatgatcacaatatatccatcacttagcctttgattgccttgtagcatcggaggctgcacaatggaagatttgactctgaatctctatatttgtatgggtttgtacattctggacccgcacatctttcccgcggtggaggataactacttcgttagcaaggtgaaccatgtcaatttcggttaaattcactttaacagcattgcttgatccaaatgaggtaatgagtctttgcatcgaatcatacctgtgtggtgtagagttgaatatacttggcaatccaagttcttctgggaaggttactatggttcctgaaggacccatcacccacttcactgtgtctgatctacgggcaatcgagtctgcagccttctcctgcataaaacagattgcaaacaatcgtaagattgatagaaatgatcacacataagat

SEQ ID NO: 28476 - DNA, 530 bp, Arabidopsis thaliana landsberg
aaactcggaaaagtacacttgggcttataaatcgctcatttaccttgtatcaatctccattaccgtggtgactacttctacggctgctatgttgtggaacaaaaaaaagtactatgcgaaaaatgaccaatatgtcgacaacttatctccggtgattatcgagagctcgccgcagcaattgatatcgcaatctaccgacattcattacggagagaggcctaaccttaacagtaagtctatttataacattttcatagagtaaaatgctgagttctaactctgtttattctattgtgtgaaagcagagctcctagttggtttaaagggttcgagcgttggagttcttgtgtgtggtccaaggaagatgagagaagaggttgcaaagatttgttcctttggttcggctgcgaatcttcaatttgaatctattagtttcaactggtgagtttttttgattggtgtaaaagaaaatttcaataaacaaaatagtatctaccacaattttctcaccaaaagaagtaaagagagaa

SEQ ID NO: 28477 - DNA, 423 bp, Arabidopsis thaliana landsberg
ttttgcagaaatgtgcagagtcatttgaatctgataagagatataagaacgattcgcggtatattcgtgtttggttgcagctggtaatgtacattcaccccttgattttgcacttgattttgatagcagatgttgattcgttagcatgtgggtcttaatgggtgatgatgaattgtttgggtagatggactttgtagacgatccaagagctcttttaagaaccatggaagcaaaaagtatagggaccaagaggtcactcttctaccaggcatatgctctccattatgagaagatgaagagatttgaggatgctgagaaaatgtcccgccttggggttcaaaagtaagtaaccctggccactctagaaaaatgtattcgagtgaataagaatatgcaacatatatcaccaaatctattccggct

SEQ ID NO: 28478 - DNA, 1473 bp, Arabidopsis thaliana landsberg
  unsure (1)..(1473): unsure at all n locations
ctataccatcttaagatttatcagcataagatagataaataaataatttattatttttttcaggagtgaacagaacatcactgcaaggaggaagcttggcttcttttcatgtggaaatggcaatctaatagatgattgttggcgttgcgaccgcaactggaacaagaaccgtaaacacctagcggattgtgggatgggttttggaagtaaagcgtttggtggtcgtaatnnnnnnnnnnnnnnnnnnnntgaccatagtgatgatgacgttgtgaatccaaagccaggaactttacgtcatgccgcgatccaggctgaaccattatggatcatctttaaaagagacatggtgataaagttgaaacaagaactgatcatgaacagtttcaaaaccattgatgctcgtggtgccaatgtccacattgccaatggtgcttgcataacaatccaaaatataaccaatgttatcgttcatggcttgcacattcacgattgcaagagaaccgggaatgtaactgtcagaagctcgccaagtcaggccgggtttaggggaacggctgatggtgatgctattaatatatttgggtcaagtcatatttggatcgaccacaactcgctctctaactgtactgatggtcttgttgatgttgtaaacggttccactgccattaccatttccaataaccatttcactcaccacgatgaggtcaatcaaacacctaaaactttctcctttattttttttttgtaaaactctgttttttcttgatcataatgatattgtggagcaggtgatgttgctagggcacaatgattcgtacacacgagacaagatgatgcaagtgacagttgcgtataaccattttggagaagggctcatacagagaatgccaaggtaaatctacaatgtaacattgtgtttaactagacttatattacttgcaatacaagttaagaaatacattttgagtatttatatgcaggtgcaggcatggttatttccatgtggttaacaacgattacacacattggaaaatgtatgctattggaggaagtgcaaacccaacgataaacagtcaaggcaatagatttgctgctcccaaaaaccactccgccaaggaggttcgattcttccgtgtttttgcgtgcttataaacagagaaaatggatctttaattccaaaatatgacactgtacaggtggctaaaagattagacacaaaaggtaatgagtggatggagtggaattggagatcagaaaaagaccttctagtgaatggagcgttttttacaccatcaggtgaaggagcatcaggagactcacaaactttaagcttaccggctaaaccagcttcaatggtagacgcaatcactgctagtgcaggtgcacttagttgcagtaaaggcaaaaacatgctactagtaaaacattactctctcaacccattagtagtttcagtatacaaaaacacca

SEQ ID NO: 28479 - DNA, 1983 bp, Arabidopsis thaliana landsberg
gacaatgcgatttggtttttggcatttaaaatctgacctaccactcaacaatgttacgtttacaaccaaattttgcttgaagcgacgcctccataaatgataatctcgtgtttctttttatattttgtttgggaaatatggttccaaaaccgattatgatttaacatgtagaaaaatatttcaaatttaccatgtcgaatcgtgtattctcctcataattagatagtcgaattttgaccttaaaactgtaatctaattagctccctatcaaacattcactgtattttgtgtgaatattacacgttcttaaaaaaacaaactgcaaactaagtattttggtgcttagattgtggaatcgatttgataactataactatggagaaactagaatttggaatactgttttacgttaaatttgcagaatttgcgttttccaatcatgaaattatgttttgacaataaaattgcataacctcgtattaatgggccaaaaaatacatgtcagcccagtccaacaatgagcgagtcgctccacaatgtttttctttacatattacaagtgaaccacggactggcctgcggatccataggccaaatcaaagaccggatcaatatcttaaagtcaaattcaaatcaaaacataacatacaggactgaacctgtctgactcatcacaacaacctcaatgtaagaccaaattttcattgaaaattctcgttgcttctttgttttgagctcgaaacgttgttgtttatgatctgtttcactcttctctattctctcttcttcaacagaattagactccccaaaaatgtaaccgaaaagtccaaaaccaatgctaaacgcaacccacaaaaaagcgttagattctctgctttaatacaaccgagtattccaatttattggaccataatttccttatggcaagcaccatcctttaataacgtttttggcgaataaggtttatcagatgtttttggaatctgattccgagtaactcccatctaaacctcaacggttgaatcatctttgacatatttatcatcaaatcaagttagaatagcatttcaaagaaaaacaccgaaattcctaaactttattataatgtaaatgcatgttctttattctccacttgagtaccgcataagaacttagatatagaaaacataagaaatagaaaatgacaaaaacacaagaaaaatctatcattctcagttctctttggctagtttttcctcaagagagtgatcactaacttccttttcgtccttgttcttcatcattagctgagataatctttctgcaacacttaacctagtgccaggtgacacaccgttcttcccgatgatggattccagaaccgcctccgccaacaatttgttctcgatcacagcgatcccggtttcagggatactatcatctttcgaaaacgcaacctacaaaacagtatagttcacaacaaacacatgtcaacaaagtattcaaacctacacgttacaactactatcgttccaaacttccaaacgccaacttttacaatagtacttacatttaaaaaacctaaaacagtaccttcgcaagtggtttaaatgcgaaaacatgtcaagtatctcattccaatttgatatttgcactaacgattaacaaaattcaagcaaagtataaatcaagcaaaaattaccgtaagagagccggtaggggagagagcgaagaggatcgatgaaccgggagggaatgtttcttccttgaagatctccaagaacttctccacagctttagcttcacagtccgtataaagccctaattgtttccatatagccacacaattctccgtcactttctccgaatattgttgtcccgttaacggcagtttcattgtcaccttgataaacttctcaaacgcacctaaaaaggaagcaaaaaaccaatcataagattgaaaacaagacgattaaacctagcttgacgtgtacgtttagtatt

SEQ ID NO: 28480 - DNA, 1592 bp, Arabidopsis thaliana landsberg
cagaaggtatgggaatactcttgttatatcattactaggccaggattgattgtatcagatttctattccctgtaatgatgatcagtgttttgtgttgttgcagattcgtaatgaaaaggcgaggagatatctcggcaatatgaggagaaaaccgccagttccattcactcacaaatttcctcatgtagacccattggcccttcgcttactgcaccgtcttcttgcatttgatcccaaagaccgtccctcagctgaagaggttagctcctctatacttgttttttctagcgtttccacttcaaaatttcagagcagtttcaatcgctctcagaaaaggaaacattatatatacatgtgtgtgtgtgtatatacaggcactggcagatccttacttctatggtctggcaaacgttgatcgggaaccatctactcaaccgattccgaaactcgagtttgagtttgaaagaaggaagataacaaaagaagatgtgagagaattgatctacagagaggtacactaatctcttactgtttttgcttcactaaacttgtttggattgattaagctctgaacaatggcaaaatgtatcttcttcctttttcgcacgtatccatcgggtaatcgtaatccttacaaaagttgaatgtgatgcagatattagagtatcatcctcagatgctgcaagaatatcttcgaggtggagaacagactagcttcatgtacccaaggtatataaaaacatttagaattcgtgttcaaaatttactacgaattatgagaagtgaagataaagattttgtaatctaaatgaaaatgcagtggtgttgatcgctttaagagacaatttgctcatcttgaggaaaattacggtaagggtgagaaaggctcacctcttcaacgccaacacgcttccttgcctaggtatacaatttcgtttgttggtttgtcagtaaaactgatttcccggattcttttaaagtttgcatcatctcattccattatgttgtgttggaacctcttctgtttcagagagcgagtccctgctcctaagaaagataatggatcacataatcacgatatcgagaacagatccatagcgtctttagtcacgaccctcgaaagccctccaacgtcacaacacgaggggtcagactacaggaatgggacgagccagacgggttacagcgctcgcagcttgctgaaaagtgccagcatcagtgcatctaaatgcattggcatgaaaccaagaaacaagtccgaggtaaaatatcaagaagcattagatgagatgtattatatagtacaagtttgtctacacttgttcttcagattcttgagttttttgcagtacggggaatcaaacaatgatacggttgatgctctgtctcaaaaggtcgcggctctccacacttgacttgtttcagagattgaggattgaaacttgttgctaacagtagacggctgattctacaagtcttgtacacatctctcagagaagacgaagaagaagtctgatcttgatagagatattgagagacatgactcatgagctatgaacaaaacaacttaacccgtcattggtcttcaattt

SEQ ID NO: 28481 - DNA, 931 bp, Arabidopsis thaliana landsberg
gccggtaagctcaagggagtcagcattatccgtatgtctccagactccttcggttttacgttcggaaggtgaaagagaagagtatcctcttcctgtgctacgaccttcagatgaatcactctctttgccttggtttgccacagagggaacccatattgctaaaccaactgctccctgttcatagatatcgacagagagataatatcaataacagcttaatcaaaatatgaaccagaatatagaatgttaaatggaaaaggaatgtttttatctacgtacaaactagccctggacctctggttataaacatagtattacaacgacatggtcagtggtacatttcatagtgtcaacaagggctttactgatcaattagttaaacaggcaaattcgggaatatgttatgaatccgcctctattaagtgagtttatacaataagcatcactgaaacagaacgggaaagagaatatttaccatgaggggaagcaaaattctataatctttcgttagctcgaacagcagtaatactgatgttaagggaacagagcacattgaagctagtgtcgctgccattccaacctgcatcacataaaacgatggcatcttaatgtgtcagatttcacaacaatcaaattggacagtactaaaatttaatttaagaaaactgcactgaagcaagggcctgcgtcaaagggaatacaataccagagcataagcttgtggttgagcaacagcagcattaccaggaatagctctgttaataatcttagcagccgaacccccaaatacagcaccaacagcagcaccaatcatcaaacttggtgcatatagaccacctacaagcccagaggcttttgcaagagctgtagccacaacttttgccagcgcttactgagctaataaccagattcaggagctgaagcacttttt

SEQ ID NO: 28482 - DNA, 1449 bp, Arabidopsis thaliana landsberg
  unsure (1)..(1449): unsure at all n locations
tcgcgggaaatacttcactggcaatacgaaaaggccattgagttactagaatctgatgtgtatggatttcgtttgtacaacgaagtcgccggagagtttcaacagtttcaggttttgcttcaaaggtttcttgaaaacgagccattcgaagagcctagagtacaacattacatcaagagacgttgtgttcttcgtaatctccttcagatcccggttattcgaggtaaaaaaccttaaaaccgaatcttaccaaatcatttgctaaccggttcttgaaacccgtctttgaaccggtttatagatgtttttttgttactgatgagaagaacatttgatggtgttaacagaagatggaaacaaggacaaaaagaatggcagaagaagagattacgaggaaaataatgacggtgtgattaaaagcgatcaactagtggaaataatggaggaaacaattcgattattttggcgatttgttcggtgtgataagcttactatctcgatacatgatcagaaatcgcgaaccaaatcacaaatagaaccggatcatgaagaagactcggaagacctagagatgttcgcagaggttaaatcacaacttcaaaatgtaagtgttttctttctcaagatacaaagtctaaaacattatggttgtgtgactgatgtgattggttggttgcagaaggagaaaaggttgagagatgtgttgaaaagtgagagatgtattataagaagattccaaaagcacaaggaagaagattcgacagaagatcaagtacttcacttcttctcacaagtagacatgaaacttgtgacaagggtcttgaatatgtctaaattgactagggaccatttggtttggtgtcacaataaattgaccaagattaactttgttaatagaaggttacatttagatccttccttctgtcttttcccttgttgagatttttgatattgacaaatttgtacattggagtaataatgaaaatacaaattttggcctcttgttattgtaagtaagactcataaaaagtccatcaatttttggctatcacacttgatgacttttattgattttcactagggttggatttggtccacaactgaaccaaattggttaattccaaaatgttaatcaaaacccggttatctccctagttcatttaaatgtctcttgaccagaatatactgaatggaccagagtctactgatagtaaaggctctagagattcaaacactcgttttccgggataacctgaaaccactagctctggtttagtacattatttctaaactcttcttccttcttctgtttccaatatctctttcttacaaaacaagaaatgtctgatgtacatggaacctacctatcttcntcctagggttcaaagctaatgccaaaacaacaaatgaacgaaatcannacccaagtactttgagagatgggaaaaa

SEQ ID NO: 28483 - DNA, 2477 bp, Arabidopsis thaliana landsberg
tgtgctgccttattggcttgcttgaacattttgctactcatttctatgcagtgtcttggttcacagtggaggagtgcatggagggcattattatgcttttattaggccaacactttcagatcagtggtatgtacccttcaactcttttatgctaaaatacgttttgtattttgtaatcttgacgtatttttttatattgcaaactagttttctcgtcatctaggctagcgaggcccaattcatgtcttctgatactggataatgttatcgaatttcttttggctcttctatccatgcacctctctaacgtgcatgtaccaatattagtttcacacttagattcaccgtataaatgatctttaagtttctttttgtttcccttttctcccaaaatatccactgaaataaataactattacgtccttttgtggttttagatggcactgttgaaaacattttgtcagtgccttacttttaaactatctaaacttctaattctttcaggtataaatttgacgatgaacgggtcacgaaagaagatgtcaaaagagcactggaagagcaatatggtggtgaagaagaggtagcactctctttcgaggttttctttattttctttgttatttttttttactgaatttactttcaaatttggtttctcttcagttaccgcagaataatcctggtttcaataatccacctttcaaattcacaaaatactcgaatgcatacatgcttgtttatatcggggaaagtgacaaggataagataatctgcaacgttgatgagaaagacattgcggaacatttgcgggtaagaaattcatatacacgggttttcctttttacctgtctggattttgcttgattcagctaattacttcctaccaggtgaggctgaaaaaagaacaagaagaaaaggaagataaaagaaaatacaaggctcaagctcaccttttcacgacaatcaaggttttctacttctgttaaatttgggtgtgaaattgtgttggtgtagacttgatactgatgttactaatgcaattcatactatttataaaggtcgcaagagatgatgacatcactgagcaaattggaaagaatatatattttgatcttgttgatcatgaaaaagtgaggagttttcgaatccagaaacagaccccctttcaacaatttaaggtacatgcttgtatcttcctatttattaccagaaattgcgctctatcacagcaagagatggaatttttgaagaaacttcatttttggtaaccttaatctatcttgaagcagatgaataagggtcaggattctaacgagaaaaatctctgctttcatttaggatctaatttgtttaagcttttttttacgatgctgtcctcgatggactcttacagttgttgcaaattacctagtgtcttgtgtacttattgctataacattgttataaatttatcctcatgtaggaagaggtagccaaagagtttggtgtcccggttcaactacagcggttctggatctgggcaaagcgtcaaaaccatacttaccgccccaatcgtcccctatcacctaatgaagaattacagacggtagctgttattattattattattttttcttttcatgcctatggtttgcgtctttcatttggtattatttctttgtggagattaaattattcaacacattagaaccatcgctgattttatttctgtgtttagttatctgctctaagacattactagttgggattattctcgtattaggtttggtgcctttttgggtctcgttattacacttcttgctcataactgccatgcctaggtatatttgcttctgacgaacttaagggttgtcttggtttccgtatatatattactactgatctcatactcattattagtttaccagctaccaaggactgtatttgcataagccaactatttattttataaataatgtttttattctggaacttttaatactgaagattttgttgtaggttggacaaatacgagaggcatctaacaaggcaaacaatgctgagctaaagctgtttttggaaatagagcgtggaggggtaatactaccttgctgtcaagtttaattgttgaggcttatttattgaatgaagggaagaaattaaatagtcttactaattcttgaattattcaggatgaccttcctattcctcccccagaaaaaacttctgaagatatccttcttttctttaaactctatgaccctgagaacgcagtactaaggtaattcttgtacccaccaatttcattttgacatctgttccaacaaaagcactatttctttcttccatttcttatttgccttttttcttattcactgggatttacatctttcatcattgttacactattttgtccatatgttgcagatatgttggcaggctaatggtgaaaagtttcagtaagcccatggatatagtaaggcaattgaataaat

SEQ ID NO: 28484 - DNA, 3472 bp, Arabidopsis thaliana landsberg
acacatacgattctatctgaaaaaggtacatatggcacgaatacatattaatgggcctgattaaatgggtactatatccaattaaactatgctaaacagatacgttatcttttcgaataacacacaaactcaacgttgccagtgaagttcgccgtcgccggagctcatggatcgaccaccgtcgtttacaccctatcaaaattctaatccgaaattcttcaaccacgcttctccttttcaaaatcctaacaattttactccatcgctccggcgccgattcacgagctctccggtatactctcttcttctgttgtcagaattttcttagattccctatcgaaaaatctagcttttagatcactcttctattctcaggacaagcggttagtcattggttttgaaattaaaattgatttttaggttcggtatacattggtattgaaattagaattgatttgcggtttggtttacactggtttagagaagaaaacaaacaaattttcacgcgatgggaatttttgagactagtgcgtcgattgaaaaaggcatgatttcgaaaggggtatacccacagaattgctctcacgcgctcaacgctcactttgtgcgagtgggtgtgaaatagagccttctgattggcttagaaactctaaaaaaagtgaaatagtatacatgttgctagctcatgttgttatttgataaagttttgtactgacatctttttttcagtcaccggaagttggaagttcgtttgtgataggatctaaacaagtatcaaagtctacaaattctggattaagcaagttaaagacttgtgattcccctgtatcttcaacaacctcgtcttccaaaactttatccaaagacatctctagatagccatagcaagccgcagttacattatacaggaaaggtaccacttaaggctttgcattccaaagaaaatgtcactgtcactttgtttgatatgtttgttctgtggattgttaacatttgtttatgcttgagtgaggtcccagacaggaaatcaaactcatactatgcatgtagctagtgttgttctgttgaccctataaagcctttacttttactctagtcagcttatagttgcattctttagcttagttctctgctttacacactttgcaacctagtagaacttttctcttatgacacccatgatcaatacattggttgacaataatgaaagtggagttgtacacctctcgcagctgctataacatcttttctttttatcaagtgatttttatgttcggtaatagcttactgtttcattaactctgacaaactgtttattattgcactgtctgaacacttaaagatgaacaactgaccataatttcgcatatatctgcagaacctcatttacctggcaggttctgagagctcaaatgctgaaaccagtggtttaaggcgcaaggaaaggtcttatataaataaagctttgctgactttagggactgtgagttcttggttatcattgttttcccccaagcgacaatagtttttcgaatttaagaaccttttttgcaagttggatcgttcttttgcaaatttgtaggtacttgttatagtatttgatactcttatttactttctgttggtgacatgcatagtgctgatttcactgtctcttatatttttatgatccaaacatgaaacacatacataatccatcctcaaccaatggaagagtctatcaatcaaaatcctgaagctatggaagcacttatctccaatctctttggaaacatctcgtctttgaaatctgcttatatcgagcttcaaagtgctcatactccttacgatcccgagaagattcaggcagcggacaaagttgtcatttctgaactcaagaatctttccgaaatgaagcatttttacagagagaataaccccaagcctgtatgtgtctctccacaagactctcgtttagctgcagagattcaagagcagcagagtttgttgaagacttatgaggtcatggtgaagaagtttcagtctgagattcagaacaaggattccgagatcacgcagatgctgcagaagattgaggaagcaaaccagaaacggcttaagcttgagaagaatcttaagttaagaggaatgtctacaaaccaaggttctggtggagatggaaatttacagtttcctgacttgactactgaactctttgtatctacttacgaagctgctgctaaagttgtgcatgatttctccaagccgctaatcaacatgatgaaagcaaaaagatgggatcttgatactgcagccaattctattgagcctgatgttgtttacgccaagaggcctcacaaggaatatgcatttgaatcatacatatgccaaaggatgttcagtgggtttcagcagaagaacttctcagtaaactcagagagtgctacggttatggccgatgatgacacagacgcctttttctgccagtttcttgctctcacggacatggatccactagatgctctaggtacaaaccctgattccaactttggtatattctgcaggagcaagtagctcctcttagtccacccaaagatggaagcttttttctttggaaatctagaccagcgtgactacgtgacaggaggtggccacccgaggactgcattttaccaggccttcttaaaacttgcaaagtcgatatggatcttgcacaagcttgcttactcttttgatccagctgcaaagatcttccaagtgaaaaagggtagtgagttctctgattcatacatggaaagtgttgtgaagaacatacattaatatggattcaatctgtgtacaaaacgaaattagagatatggtgtaatccagcttcctcataacatttagcaatatggtttaaagattcggaccaagttccttcgatagaagccaaatccaagagaaaagccgcaacatccaacgcaacttggattggagctttgcctttatgcaaatcttcaaaacgaccttcatcactcactttttcccttatgaattcgatctgctcgtcttcccattgtgctatactagcaacctcctgcatgttttcaagataccatgaccatgaatatgtctctatgctttaaaactcagtacaaccgaaaaagaagaacaaaaaaccttttgtcatacctcatacggacatcctaatgtccaccacggtgatctcaatgctaccctagccgcatcttttgcttctacattccgccctaccctgcgaataagaatctgaagataagtggctacatctttctctacgaaaataaaatggagatatgttttaggtatgtaaagtttacaaacttctgtagtatgtttgcataatatacaaaaggtcgtccaaatcctggaaagaggtctttctttgtgtaaaattctcctgtcaccatagctgaaaccttccatagacaaaaagaagaaaatgtcctaaaaagtgtacagaagagagctt

SEQ ID NO: 28485 - DNA, 1335 bp, Arabidopsis thaliana landsberg
acctggtttgtttgcaatgtttcgacggttttttccacgcttgcaattttttgcgtcatatcggtcatagcttgttgcatgggcttgagggtttcggctatctaaacgttggtagcatcctctctagacattgcggatcacttcgggtatataatgcacagaaagaatctgatgactcaagaatcctccatccccacagacggcgccaaaatgtggatgtcggattcacactcaagtatttatttgtttagtgagaaggattattcttgaggtcaaatatactaaaaaataagtagatgattatagagaaaattatgagtattgtaaaagaaaatgtatagctaatttgcaccaaaatatgcgtgtgtccttacatgacctttgactctcaatatatatccaaagaatacatttaattcttatttaatcacaatcattctatcttaaacgtattcgtttctagtcttcgaattaattattcgaacgttcgaatttgaaaccactccgggcctcctttacccttcggcccatttgtcttcttcaattcgagtagtcctaacttcgatgttgcacccacttcgccaatcgacatctcacccatactcttactttgaagaatcttacgggcttttcatcttatgggcctcccatacttgtgtagcaatctttggccggtcccgagcccatggtgcgggatccgacaccaacacttatagcaaaatattccgaaaccctaatacttaaatcgacgcagtattgggacggattaagaacggtactcgacccaggtggtcgagtgaatggtcgagtgataagctggagtcttcttctcttgcttgtgctcgagtgtctggttgagtgcggaatggagaagactctgaagctggcagtcgagtaaggacgtcgagtgaatgatgataagggactcgaccatgtggtagagtgattggtcgagtggatggtggttgtagtactcgacttggtggtagagtgattggtcgagtgaatgatgatggtgatactcggccatgttggtagagtgattgaagtgaatgatgatggtgatactcggccatgttggtagagtgattggtcgagtgaatgatgatggtgatactcgacctgttggtagagtgataggtcgagtgaatgatgatggtgaaggcagctactcgaccagggggtcgagtggtgttgtaaagtggggaagtcatctactcgaccttgtggtcgagtggtggatagaatgtcgcggtcgagtgatttaaagtagaagttgtggccgattactttcggaactttaggatgattgtactcgagctcgggtcgagtatg

SEQ ID NO: 28486 - DNA, 2220 bp, Arabidopsis thaliana landsberg
cttcatgtaatcattttttagcagggttaagatttaagacagctttagtttgagggcattgtctttctcttagcagggctcgtaaacggtgaacatgtcacacacagtaagttaccaaagtcaaaatctcggtttttcataacttccccaattctttttatttaacattatcatttagcaaccagatcaacactacactatcaatggaaagtgtttttttttcatctagattttgatttgagtttttcgtttttgaattattggtttttaaaaactagatcaaccagatttttagttctattgaagcgtctgtgttttttttcctgatgttgtgaagatagtagggacaatattcttcttcttcagcaataataggttatataaactgacaatttttctccaacaaaaagcagttgcattagacaagatcataacttttaaagtttttggcaaaagaactaaatctgaaattttcaaaattttcttttgaaataaggcatcaagtgtcagcatattaatattatgaatctccctcctctaccaccacaacgaccgcctcttcttccaccaccgccaccgcgacctccaccatgtccaatgccgttagcgccaggagtgttcatgttttcaggcaatgggaggatttgatcaacacacttcctgaagctaaaatcgtctacagtatcgtcttccctaaccagaaagaagcatctgcttttccacattgggtgggttcttacttggaaggttttgattcctcctccgatcttcttttcaggctcagaatggccctttttaatcagatttagcagcaccatgtgctcatactgaaatgtacaatccagaacaaagttcagtacaacgagttagttagttggaagctcaaaagaaaatgcaacaactgtaatatatgacatgactatgcaatgttttatcttttatttgtgccctcaaaatttgacattaacttcattcttctaaccattatatgacatcaagacccaaaaaaactttctaattcacacacaatccacaatcatataatcagtaagaacacgatacatttgaacttttcaactagtaaaaaagctgcaaaggagtccaatttacaagctatctccacttcactaatcctctccctaaacataatacaatatccacaatcattgtaaacaaccactaatttgagacaaaaacaaaattctaacaccaaacactgaatccaaaatcaaatcatatgaccaatacaaaggcgaacccaattctcaatttctttagtttaaatacaaagcacgatcatcatcggattcattaataaaacatcttcctaaacacatcacagaacttaataatcacaatcagagctcttagattaacctatataagtctcgagcaaaggaatgaatatttccaaaaaatttgaaactttacaataaacaaagccaaaagacaaagacgaagagtaaacccaaatatgtattaccttattaacatcgagatcagttggccaaaagtgtaaaaacttgacaaagtaatcgaacatcgccacagaggtaacaaactccttgggaccaagtttaaccggacctgacttctcttcctctccaaccttctgcttcttcgattcacctccgttctcttcttcctctgtctcctctctctcacgtttctcatcgccggtctcggctttcggggtcgcggtttcgacttccatgtccactttctggtctgggttcacttccgctgacagggaatcgacgatctcttgttcttcagccattgttaagctagtaaacgttccgcctttttttcacctttctacgatttctaggtttaagcttgaggtgacctacagaaatcgtctaagcggtatatttatatgactttggtttccgattgaaccgaaccggttcggtctatttgattttttggctcgacggcatacactacatgaaaaccaggattttcaatgtagtaactaatttgtcgtcattgatctgtccaattattatttttacgtctcttaaatcttttcattttaaagtctacatttttctaatatatttttttattaatcatctcaagatatttttttagtctacaaattacttttactgttgtagaaaatttggataatagtcagtaattctaaataatagaataaaaactcaaatcttaatataatagtttaacaaataaatcatattatactttttttgg

SEQ ID NO: 28487 - DNA, 2102 bp, Arabidopsis thaliana landsberg
atgtagcttagatgaccaaacccagctgaagaaactttttatcaatagttttgtttatatcttatttccatgttttgaaacttagttggtattagctatatattctcatttcaacataccactagcttacacgatgactttagggtcctatccaagcacaaacagtcggatgttatctgttccggtgatcttttgaagctctatatagctcattgactattgatttgtaagaagccaagtcagctacaatacctatctccggtttctgtttataatgcttcgatgcatttgcatgtctatggtgaccttccaatagggtgttgtatgtgatgtcatctggaacaaccccaatattaagcatggcatctagcaacatatcagcattcttcatctgtcccaatttgcatagaccattcagcagaacattatacgtcacaacactaggaacatgcccatcgctctgcatttccttgagcaatttgaaaccggtttgagcatcacctttcttacagaatgcatccatcatcattgtataggttacatcatccggcttcataccagctcgcatcatctctcttaaagctctttcagcatcaatgactcttccttctttgcacattccacaaataagggctgagaaacccaccctatcgagttctatcccattctgatccatctccttccttatctccaaagctgtttctacatttcctcctctacaaaatccatctataagagttgtgtatgtaattttatcgggcctcagacctctacgaatcattccatcaactatattccttgcagccaccaaatcacctttcttgcaaaagccatttactaaagtattatataaaacaatatcaggctgcagacccttacttaacatcttctgataactttctttcatcaagtcaatctctccattcctactatgaccatgaatcaaagtagtgaaaataacatcatttgggatcaaccctctctcacacatctcatcaaacaggccatgtgctccatccattttgttctctttacacaatgcattaatcaaggcactataggtgaaaacatctgggcgtgttctgcttttctccatatgatgtttgagtctaaacccttcatccaagtttcccactttacaatacccatttatcaaagtgttgaaactaaccactgtaggctgcaaactccgtttagtaatttcgtcgaacaccttctgtgcatcagatatattgccttctttacagaatttgttcatcaaaatattgaaaacgtacacattcaagggaaacccagcatccaaaatctccatatagaatccccaaatagtcccagttggattcaacttcatcatccgatcaagcaaattgccacagccacgaattggaacatcaaacctatgcttccgagatagcctaaaacattgaatagcatcgggtatgaatcctagatccgtgtacgtgatcatcaaagcatcaacaaggaaaccacacataggtgttcctctcatttctaccaaagaaatgaaaactgaagaagctgagtttttgcctttacgagagacgacgagctcgataagtgactgtgcttcggtgaacatttcgtgaacagcaagaaaacgagccatgacgaagtaagtctcaacggtaaaacgaaatccaggctgagatgagatgaatttgaagaaagcgaagatagaacagtgtgggagggagagagggttatggttggatgagatcaaccacatgatgaacgctgagcgaaggcaggacctttctgatagagggtcagtaagtgaacgaagagatctccaacgtcggatccttgtaagaatctctgatggcgactgagagttgaacaagaactgggtcatcgtcgttgtctgccccggagatagattctggagagtaccatgttggcaagaggagtgatgcacgacacaatctctgtgtggtgagacctagagagtgtgcgtcttagaatttcgattctgaacatctctgaggccctgactctcgatttctccggcgccggctaaatcgagaaacatttgaatcaaaaagtcgggttattaagtaaccgggcttctgtaagcaggttcg

SEQ ID NO: 28488 - DNA, 1791 bp, Arabidopsis thaliana landsberg
atttatacggcatatttcccttgttttatttcatcttcaattctttatgttcgtggtgcaaagatagatatgtattttgcctcataaatattattgctcattagtttttgatataaattcatatgatatccttgaataaattttacataatctgtttttagttacaatatacgaaaaactctttaaacattttcttagattagaaatatttttctctagtttttattaccaaactgacattttatattttaaatattatgaaaacaggagtggtggggaatgtacaacaaaaaagaagtaatcgatgtatcgactttccagttaacccaaaaaccggattgtgtgttctcaaagattgtgagtctgtgtgtaagaagacaagtaaagggttagagggtatttgctggaagtttaatgccaaaggaaaagatcctaagcaatgcaaatgttgtggtttatggcctccactttactaatgttgctacccaattatttctaataaaaattcttattataaagtaataaaatatttttatgaggtttatgacctactattttttacttgtattcacttgaaaagagtaacatgaagctgagaattgtgggtgtaaattgcggatcgaatctactctctctcgcctttaaaaagaacacctcctcctctcattttcttcattcgtttttgctcagaactaaacgaaattctctcccatttctctctttcttttcaaagtaggtctcaagagtatatgatttatatattttatttaaagttcgcagattctactatcgagtattgcaataccgatcttattgtgattgtattctttctttttatttttaaatcaggatttcgtgattttaccgttgggtggataaaatcgaatagcggagcgaagttagataattttttttcatatgaagtaaatcgaggtttgaatacattagatgaggaaaaatcatattataagcgtagtgtaaataccaaccatcactaaacacccacaaaaccttaattcatttgttatccgtaattgcttagcaaaagaaataatcaaatattatttaaatagaaaattaaaaaatggcaattttgtatagcaaaatatgttattcttttgaaaattccatctgttacacattcctctaattctatcgattggaaaaatagtattagttacaattcccttctaaagcatccaatggccataatttttttatgattgttaatgaagagaaaacagtggacagtgtcatcacatggaattggttgtggataaaacaaaacaccccactccatacatgatccactcttctcctctcaatcttcatcctcactaatgaattaataatacatttaaatataaaatgattgaattcattatttgctcgattcggaaaatcgtaattgaattcagataatggaagctagaagactcgcgatcctctgttctcacctgaacccacctggtccgaacccgacccgagacccgactctcagggtctccgattgtagctctggttcttccggcgacgggaaagtggaatcatctactctccaaaacgactgcgttttctgcaagattatccgtggcgagtctccatgtctcaaggtttacttttatgtctctgtttcttctaattcttatacacaacataactaactaaactcttactttgatgcacttttactactatgatatttctttgtgcattcttgatactaatccactaactcatgtataataaccatcattctctcctaacacttaccatttgctctattattta

SEQ ID NO: 28489 - DNA, 1508 bp, Arabidopsis thaliana landsberg
gttctaagaccaacaaatattttggttgacttacagtgtttttaatggtatctgtggcgacaatatcagagttatcatcaagacggtaagaagagagacagtgagagagaagactgatgctaacattccattcaacaaagtgatgagatccatcatgagcatgacgccaaactcttccaactctcactcgagccttcccatgtctttgctccaatctgatcccatcggcttcttgtgccattctaagtaaccttatcaaaccaaattgatacatagaaacatagagacacgttaatatctgattcaactcacggatctacagaatcaagtttaattttgacaaatcatcttcgagttctttaacacaatatcatcatccaatttagcccaggaattgctagcagagagaaagacaaaaagaaaaacagggatcacctgagagatcgatcaaatggtttcagcagacgatggagatggaaaacgcaaggggatgaagaagaagaagaagaagaagaagatcgatttcgccttgtatcaaacgaagatacctcagagcaaagaaacaaacgtatacttcctttccaaaaatctcaatggccattttcggtaaaataccctgccaaaagttaaattacgtaaacgtatacttaggacttgttattggttggtttattgatttggaaatctagcgtagaatttgaaaaattttaagatatatggattttgaaataacatgtgtttacccatggatttgaatccttctatttttctctttcaaatccgttcaattccatttaaaacataatttggattctcaaatccaaaaacaaatgactaaacgaataacaaaggattttaactagtatttataaatcatcgaatcaataacacatgattataattagaattttaaaatcaatgattgaataacatatgatttttgtttggattttcaattccttataaatctataaaccaataatccctcctaaatttgtaaggactaatattgaaaatagtaaatcggtgagggatttttggccaaaaacccaaacaaaaatgtatatgtagatcattcatcatcatatagataataattcttgtattctcctctacaatatctacttttcatgtatggataatgatttaacatcttaaaaatatgcaaccaaccaagctaagcaaactcttcacctaatattaaaagaacttaccaaaagtaatattttcaaattttcatacattttagcttatgtataataaaataacaaaatttttttatacgaaatggcaaaactgttgagaaacaaatcattacagaaatccacgtcagcagtcaaaagtaaaagaaaaacgaaaatacaatgaggtcataaatgcatttaaaactaacaaaaaaagaaagagatctcttatttcttcgaatttaatcattactagaaactgtgaccacgacattggtcgtggcctaatgaggaagaagtagtcaaagtcacctgaatcgatta

SEQ ID NO: 28490 - DNA, 1977 bp, Arabidopsis thaliana landsberg
  unsure (1)..(1977): unsure at all n locations
gaggcatatagaagttcgtgtttgctaaagtggcaggagtctggtttgagaataaggtagtgttttataaaatttctatggattttattcaatatcggttcttgttaatttgtaaatccggagagacttttcgttcttggatacgaaaaacatcgagaaccttgacattgcatttgaaggcagaggcaatctaattggccatttttattaatgatcaaatatcttggaacttattcgcatcatgtagatactttttagtatattccactctgcttatttcttcagattctgaatctcctattcttttccgtcaaccacaaaagaagcatagatagaatggaatttttgttttagcaaaatagatcatttctaggaagtatttgtctatattcactaaaagctatgggaaaatgtttcaagagttatttgtgtttgctagtgttgacatggttatggcactaagcaatatgtgtcggattattaggtgatttgttatttctatctgctatttgaacaactcttttcagacaggctgcactggaaggagagttgggaaaggttaagaacactgtggataatcttcagagtaaattacgagtggtatttatcctttccttcctcatctgtttatcttcaagtattatgaacctagatgcagcattcactaacgtcagatatttgttactctagggcttagaaattgagaatcatttgaagaagagggttcgtgcattggaaaagaagaatgtgggtactcaatgtattataattcctgaagtctagaattatttctcttaccctttggtgtcactgttaacctgctcacagattgttgcagatgggctgatnnnnnnnnnnnnnnnnnnnnnnnnnnnnnnnnnnnnccaactgagggcctacatcattgctttacttaatgaagaaggactatacattaaatcgatttccaaaaatgttgaagaaaaacttaaacttcactcatcagaagtacagaatgtagtgccaccgcaacacgatttaaaacctgatgagtctgaatgccgggatgtgcatatgactacagttgttgaatcttgccaagtaacgaaggtgtgattgctgggtgattttgctaccaaatttcctctttttttctctgcattttatgtctgtattttttgtgttttgtttaggaggcataattttggacttcctcattatttgtttggttagctcaaacttacatcgatgtctgcaactgctacttaagacataatgtctagaaccttagagattcctagatcctaattcctcaaccgtaatggacaatcagcatctaatagcatacttgatcttatataatgtgaaagtggttggagctatttgagatttggatcgttactgtctcttacaatttttcatgactttttttgttgttgttgtaagagcgtttctcttctgaatgcagcttgcggaagctagtattgccaaaatcatggctgaaagtagaggggatgcatctgaagcctttgcacaagcattacaagagaaggttattctcatttcctaacgatccatcatacactagtggagaagattcataacataattgcatctcatgtatcgtgactgttgactagtcttcattgcttaacggaagaaacaatccttgggtcttttttattcatatgagtatgctatatcatttatttctgttgtagtaatgtgtatatatgatttttgattcttttcggatgtattgttaggttggagctcttttacttctatcacagcaggaggagaggcatttacatgaagaaaatgtcaatgcagctcttcagcagaaagtagatgagcttcaaaggaatatcttgcaggtttcctttttctacattaagttgtttccagatgttgagatagaaaaaaataactatttaactcctatggccagttctgaataatcttgaaatattcttgttaggtgaccaataaaaaggt

SEQ ID NO: 28491 - DNA, 1844 bp, Arabidopsis thaliana landsberg
  unsure (1)..(1844): unsure at all n locations
gactagcgtttgtattaatgagtgtaagactttcttgaaaaaacctctcttcttcatcaaatgctcttatagttattgctcctgctactgattctgctaaatgattcgctacataagaccttgtcgtgccattgatccgcatcaactctttagctgtttggaagtagtacttctgtaaaacaatcaaaaactattgttggtttctttttcaagaaaacagaaaatctattagaaggaattcaaaaacaagaatctgacctgtaaacgaaaagctagataaaccatgggaacagatacaaacaagacttgccaagtaacaatagctaacactccaagactacaacctgtgtttaccgaagacgcaaccacaaagatcagaccaaaaggaacgtcaaggtctacaatgctcaagtcagatgagacctgcaaatccaaagtaattacagttaaagaagttgaataccagaatgtaaacataaatattcatcaagttcattagcatttaccctgctaagaatccgtccaagaggtgtggagtcataaaatgacataggtgctctaaaaagagagttaagaagctgagaaaacaatgaagcatatgacttcatgcacataatcacgacacagacagatctaaccatcaagcagagaactgagcacaatccaatcagtaagtagaccaagatcaacttcaaagtgctaacttgagggttatctacgtttgcagccatccaagagttctgaagaatctgtccaactgcaaatgtgacctgagctaagctcgcgatgaagaagaatatgtaacctttgttctgattcatgtactgtatgtacggtctcaatcccgtgtctcccttctctcgctcttcctgtttgatcaaacgactcggtttcaagaccttggattgagatgaaatgactctgttgatttccttcaccggtttggtggggttttctaccgcaaccactctttctgaaccagcggtttctctgtgagcgttcactagatcttgaaagtctctgcttctagctaggagttcttggtatgtatcagcttcagtgatttctccatctgacatcaactagagaaacaagtacaataaacaaccaagccaaaaacagaaaaccaaaagaatcaattctgatttcaagatcaaattaccaaaacagaatcaaaagcaggcaagaaatccacttgatgtgtaaccaacaacacagcttttcccgcgagagcatccataacatattcctgatttcatgcacattagcttcaacattttcaagagaatgacagtgtgaagtctctgctttagtaagtacttacttggaacagacttgaagcagtgtgtgcatcaacagcactaaatggatcatcaaggagataaatgtctgcatcttggtatagcgcacgagcgagttgaatcctctgtttctgtcctccacttagatttacacctctttcaccaatctcagtctggtctccatcaggtaagagctcaagatctttgtctaggctagatttttgaattgtctcacggtaacggtgttcatccatcacacctccaaagaggatgttatctcttattgtccccgtttggatccatgctgtttgagaaacataggctatggtaccataaaaatcgatctgttgaatgattcaaatcaagatgattagaaacataattttcgagtatctaaagttgttcaaatctaaagctaatgataagacttactgttcctgagacacatggagtttcaccgagaatggcagctataagtgttgacttgccagagccaacctcaccacaaacagccactttctcaccaaacttaacctcnagtct

SEQ ID NO: 28492 - DNA, 1784 bp, Arabidopsis thaliana landsberg
ccccttcgtggcgccgtgttcttctccggcttggccactctaacttgtagaccaagttacctctattcgtctggtctctctttatcttttcggtaagaactaaaacatccttgaatatgcttgtccttgtggatctgtgagagcaaaatactgtttatagttaaataaatgggaaaacccatctgttgtcatgtggtggattataaattatttatttatatgatagaactgttattcattattatatattaatgaaatcatatggttgagcaaatttctcaatattttattttagcctcattgattgcttcacgttgtaccttcttcctgtgatcctgttcgtttgatctaactttcttcttaatcattgtcgaattttcgaaacacttctcctccgttagtaaaatcatttttttttgggggtaaactagccgttagtaacaatttttttttttttttttaaatcatatttgacggaaaaacgttttacattttattttaatccgagttattgcatcacgagaacgtcgagaagacaatattaacttgttatatacatctcgtgttacctgcctattttgttcattgtccattctcttttctcgaatatgcgacatctatttttatgcttctcctcctcctctcatattttattagagtagatatttgcatgtgtcaccgcaattttcgcgttaatctatccaatttataaaataaaattaaaaaaactaatttagtagaatatgatcttgaagaatgatttaaattcatacacttgtcgaatatcgaacgtaatgttacaacctcaattacttttatcattcgatgaaataatatactttagtgtgtagaagattgaagaagcaagaggattatttaagaaaaaaaaacaaatgagatgaagtttgggtggtaaaaaataatggaaagtaactagagattattgaggaaagtctttgaaaataggagtagtttatacatagatatcaaagcatatactaaaatattatatgaatgggatccatgaagatgatgaattcaagctcgtgcgtcaaatctctattgagtattgaccattatttcctcctgcctccttttgtcgttttgaagctcatcaacaatggaagcttcaacttttattcttcttcttgtccttgtgctgttgcttgtctctgcgggaaaacatgtgatatattcttgccgcaactctacaccgaaaacatacccggttatcggatgcttaatttcattctataccaaccgaaaccggttactggattggtatacagagctcctaaccgaatccccgagtcggacggtagtcattcgccgcttagctgcacggagaaccgtagtgacggcgaacccctcgaacgtggagtatatcctcaaaacaaacttcgacaactatcccaaaggcaaaccttttacggagatcctcggagattttctcggcaacgggatcttcaacgttgacggaaacctctggttaaagcaaaggagacttgctacacacgacttcaccccaaagtcgctgagagaatacgtcaccgttttgagaaacgaggtggagaaggagctcttagcgtttctaaacgcagctgcggaagattcacaacccttcgatcttcaggagcttctccgtagattcactttcaatattggttgcattgttttcctcgggatcgatcgttgcactttaaacccttcgttcccccgttctgagttcgacagagcccttcaaacagcttttgcggtcagcgctggacaccggtccgcaccgc

SEQ ID NO: 28493 - DNA, 1289 bp, Arabidopsis thaliana landsberg
cagaaatcccctagtgggcttttcacaacgacatgctatataggctgctctggatcctacaaattaaaattcttgtgtgactacttaacgctatttcctactatttatttatacgtttatatcaatatacacgtaatcccattttcacacttcatataaaacgtttatactccatctttatttttattttatcgacaaatttgtttctgtgaattgttttttcaactcttcaatccaaaagcagttcatacagaagtttgttttggaaatgtatacacaaaaaatatttgtaacggacaccaataatttcaatagatattaattaatctgatcaaggaacaacaaatttttttttttgtttaaggtagtaatgtttacaattcgaaaatatttgaagatttgtagtaacgacgcgtagaaacataagttcgtagttatttcataactttaaattgttatgattggtgtagcttgtagcgatgacttcatagtttaagaccactaatcatgctgtcattatgtccactcaaagccgtaattttaaaataaaaccatactattaaaatttaatacaaatcatcatcatctccgatcgtataaatcagaagcgtcattttacaagttgattcctttgctctaataatattagtaaaaaaaaactttgcattgaattcaattcaaaataaacctttctttctttctttctttcttctctatcattttatctgaatccgcctcccaaattcaatcctttaattttcaactccaaatcgatccttcaatcaatttctgcaacttttagtcatcatcagctcaatttcggatctccggagttgtatttttactcctttgtcggaggtaaaatggctcagtcgtcgttggtggcggcggcggggagaagcggaagggttatcggcgattatgcggtgggtcgacaaatcgggtcggggtcgttttccgtggtttgggaagggaggcatcttgttcatggcaccgtcgttgctatcaaggagatcgctatggctcggcttaataagaagttgcaagagagtctcatgtcggagattatcatcttaaggaagattaatcatcctaacatcattcgctttatcgacatgatcgaggtttatatttctcttgttgtttctgggtttttagttttttcttattgctcttagtttctagctagaggatttgaatgcgatgagtctagatgtttaggtttgggttttggggttaagtgagttcctttggttgtctagtaatatagaatcagaacagtcatgata

SEQ ID NO: 28494 - DNA, 1922 bp, Arabidopsis thaliana landsberg
actttcgccttcaactccatcaatcctgacctatccggtccaatctccatagccaccatctccgatggttatgaccatgggggtttcgagacagctgactccatcgacgactacctcaaagactttaaaacttccggctcgaaaaccattgcagacatcatccaaaaacaccagactagtgataaccccatcacttgtatcgtctatgatgctttcctgccttgggcacttgacgttgctagagagtttggtttagttgcgactcctttctttacgcagccttgtgctgttaactatgtttattatctttcttacataaacaatggaagcttgcaacttcccattgaggaattgccttttcttgagctccaagatttgccttctttcttctctgtttctggctcttatcctgcttactttgagatggtgcttcaacagttcataaatttcgaaaaagctgatttcgttctcgttaatagcttccaagagttggaactgcatgttagatctctctctatctctttcttacaattcttaaaccatctcttgttcttgtgcatgtactaactgctctttttttgtttacaggagaatgaattgtggtcgaaagcttgtcctgtgttgacaattggtccaactattccatcaatttacttagaccaacgtatcaaatcagacaccggctatgatcttaatctctttgaatcgaaagatgattccttctgcattaactggctcgacacaaggccacaagggtcggtggtgtacgtagcattcggaagcatggctcagctgactaatgtgcagatggaggagcttgcttcagcagtaagcaacttcagcttcctgtgggtggtcagatcttcagaggaggaaaaactcccatcagggtttcttgagacagtgaataaagaaaagagcttggtcttgaaatggagtcctcagcttcaagttctgtcaaacaaagccatcggttgtttcatgactcactgtggctggaactcaaccatggagggtttgagtttaggggttcccatggtggctatgcctcaatggactgatcaaccaatgaatgcaaagtatatacaagatgtatggaaggttggggttcgtgtgaaagcagagaaagaaagtggcatttgcaaaagagaggagattgagtttagcatcaaggaagtgatggaaggagagaagagcaaagagatgaaagagaatgcgggaaaatggagagacttggctgtgaagtcactcagtgaaggaggttctacagatatcaacattaacgaatttgtatcaaaaattcaaatcaaataagttaagcacatgataaagtagcaaagattttatatctcttgatggatatttcaataaaacctttcaaaatgattcttcatctgttgtttgttcatcctctaattgcaacgagccggagttcttgtgtttgttatacagtaacgcgtttataaactatacaaacttatgcatacagccccataaagatgtggaatgacaaaaagaagaaattatcttctgttttttgttctacacaaaaaatatacatagcaagtgagtttgtccatgttcatatgactgagaaacactgaatcggattttgtccacaaatctcacgctcttcttgtttctccctccttcttcttccccttttatttcctgtgaaagaaaacattaaaacacacacaatctttcctctctgctttaactatagattatatgagaagatgaaatcttaccaagggaacttgaatgtgtctttccaccatccttgtttagagcaatttgctactattttgtcaagtcgaataataatttcagagaatgtcggtctaatacccgcttctggatgccaacatttctcgatcaacctgcagagtaagcgatataacaggttaagaatccgacac

SEQ ID NO: 28495 - DNA, 2753 bp, Arabidopsis thaliana landsberg
  unsure (1)..(2753): unsure at all n locations
ccgtctttatatatcatctcatctaagcattagatcatttcatcatcacaccaaacataattaacacttggaagagaacaacaacgacaagatcaagaaaagacaaagatttgtaagaaaatgggaagagctccatgctgcgacaaggcaaacgtgaagaaaggaccatggtcaccggaagaagatgtgaagctcaaggattacatcgacaaatatggcactggtggcaactggatcgcactgcctcagaaaattggtaagaattctgaaatgtttaaattctaatcccaaaagtaatcgcttataattttcaatttcgattgattagatcaagttttgttctgactttgagatttgtgtaaattatagggctgaagagatgtggtaagagttgcagactgagatggcttaattacttaagaccaaacatcaaacatggtggtttttctgaggaagaagatagtatcatcttgagtctctacattagcattggaagccggtcggtgatctatctctcttgatttctattaataataagttaattaacacctcttcattaaatatataattttttttgttatgaattagaggtaatttctgttgaaatttcgacttgagattcttgtctttttaccttttgtctatgaatcttatgctgaaacacatgcaagcccatgtttcttcaagctatggtatctcacatagaatttagggtttatattgtctctttcttcttgttttggtgtctttgtaagaacctttatacatttatatctattaaacgtgaacttggttcgtgattcttaaaaaatttctattagttttaacctgaatgtgatatatttatgcaggtggtccataattgcagctcagcttcctggaaggactgacaatgatatcaagaattactggaacacaaaattgaagaagaaacttctggaagacagaaacaaatgaatcgtcaagactccatagccgattctactgaaaacaatatcagcaacaacaacaataagagtcctcagaatctgagcaattcagcactagagaggctccagcttcacatgcagcttcagaatctacagagccctttctctagtttctacaacaaccctatcttgtggcccaagcttcatccattgctccagagtactacaactaatcaaaacactaagcttgcatctcaagaaagcttccaccctttaggagttaacgttgatcatcagcacaacaataccaagctagctcagataaacaatggagtctcttctctctactcggagaacgtagagcaatcccaaaatcccgctcatgaatttcaacctaatttcggtttttcacaggaccttcgattagataatcataacatggtccttatgaacagaggtgtttctaaagaattgtttcaagtgggcaacgagtttgagctaacgaacggttcgagttggtggtcagaggaagtggaactagagaggaaaacgacgtcctcgagttcttgggggtcagcttctgttcttgatcagacaactgagggaatggttatgcttcaagattacgctcagatgagctaccacagtgtttaataagttatatcatgcatatatataaatgcgtaactatagggatggataatggattattaatggaatatgtattttattacggtcataagcttatagcatgttgagggtgaaaggggctttttcataatttcttctaaaatgtaacgagttgtggataataatgtaaatcgttaattctacttgcttctattttattttggaaaaaataggagacgtaaataaattctacgataataatgtaaattttgtttccagaaaaaacattgattagttactaattgagtttgacctagaaaatggggtctgttcgttttctatttctaaaatcatgggccttcctttttccatttctataggcccatctaaagatgcaactcgtggttgatactagatagtgacttggtatgacaaggaagaaaagtaagctaaaatttgattaatctctattatctatgtcctcaactagaaagtaaaatacttgtgtacatttgaccaaagcgtatagttttagcatataataaaaagccacaggagtattaattaatggtaatcatagattttgtaaattaaagcattagatagaaagtcctttcagggaacattttttggccggctggattttatatcaagtaatctcgaatcgaatatccgataattgctaattaatttttatccctgtanagctaataaaattgaccaattctatccgcaataaattaattcatggacgatcaccttttccttgtgccacttgatattaagaaaccaattaagatatcattcaacgccattgatctataaattttcatttcctcttatgaatattaattttattcattacaacttcttgtatgcatgagatgacaaacactttttatttctcaaaaataaacttctcagttatgttttgcgaggaacaaaacaaaattctgtttttaaagtgaatcggatagtttttctttataatcatattgaataattaggataaaatgttcatatagctaagcactcaatcaactatatgaatgatatttaagaagttaatatacacacatagagacaaaaatcatattaaaacccctaattgacacttacccattaacctaccgtttaaccaaagggaaacataaaagagtggtaaccataatcgaacatggaagccacattgta

SEQ ID NO: 28496 - DNA, 4220 bp, Arabidopsis thaliana landsberg
  unsure (1)..(4220): unsure at all n locations
aaaactgattttcttcgtccatccttgattttccttgaataccttgtcttagctccaaaaattatttttcatcgctcacgatcaagttttgctcgatagccattcctcggcctagtcctagtcttggtcaggggcaaacgcaatcaagctatccctaaacaatagattcaaatccagatcaatgcacttccatgacaatgatccttataactttacgacttcctaatctcaatttccaatgatgaaacatagcaaagcaggctttaaacacaatctattaaagtcaataagcagtctaaacatccaatgtcttgggctagaacctacaaatctctgaaattagttggttaagacatttcatcaaacacttgttaggtagagaaagtctgaaatcaattttctattgatctcaaagaaaatagcattaagaattgctaaacaaatgcgaatcatgcatataaacacttagctagctaaagaacagaggaatccacataaacctaacccatccttaagaactctaaagaagactactcaagaacaatgaagaacatcatagaacaaaacccagaaaaatcataaaacccataaatcattataaacttagcaaatgatagatctcaataagataaacaactttgtagaagaaatgaaattcagattctcaacacaacaaccataaaatgcaaaagaaatcgaagaaccctaatatccaatagacaaaagcaagatatctttagtaaaaccttaaagagtctatttatgggcaatactaggatgccctaattagggaaaagaaaaaacaacttaaggcggcatagcaccactcgagtcttgggctagtagaaaagtcgagcaggtcactttggcacatcactcggcttctggccgagtagcttctcttcttcctcatgtactgcactcgacctccaaccgagtgccttggtctagtatactccttgcccttcttgtgtcttccactcgacctccagaagagtatatatgtcgagcatggcaccatgtcctcctttgatccgcagacttgagctcgtccatcccttgtgttagagacactcccaatcaagtccaaaagtacatgattcacctgtaaaacacttcaaatgcaactatactatgtaatgcaatgcaaaatgtgaaaggaaggaaaatggactaagaatgcatgaaaagagacatgaaactaagttaaatgcatgaaaaacaagggcttaaaatggttaaaatctagtgttgtctgtctcgaccctttttggactctcttcatgagttctcttttatgcgtttctcgcagatggtagcacgtaggagtaacgagttgtacttcttatccaacctctcgattgtctcgttaaaggtcgtctccgtagatcccagcttagactttatcccatgcaacaggttgagggacttatcgaattcgacatggattgtctcggttagaagtttatagctatcttctaaattcttgatcttgaccatggtcgccttagccttgtcctcatacttctttatttgagccgccgaactcaaatcgttactaaagagaactttaaaatcagacatgtgattctttccggcttctctttggcagtcggctagctcacgaaggagaaagatctcctcatggagtttctcttcgttcttgttagctctctcttcaagcattttgagtctttcttccaagaccgtattcttgtcaaggagctctctaacggtcgagcatgacctttcttttcctcggctatccggatggccaattctccgatggtttgagcacttccttgattattctctaaatccttccctcagttcttttctatagtttttaccttctttgtcaaggtggcaacgtctttcgtgagcttgatcttcattctcctaaagctcaaggaaagctcgtcgatcatacctgagagaatgccatcgaccttatccatcttgaagtggagagtcctcgtgtctagcgcttgttgatccaagtattggctcatcannnnnnnnnnnnnnnnnnnnnnnntcttttgtctccatggtatgtgagagtgatcttatagagacgaaatcgggtgacgaaatggttgaaccgatcggttcaagctgaacaggtccttgcccctttggcttttactgcccgagctctttcctcttcccgagggtggggaagcattaggcggggcatcatcatggtttcctctaatgatagtttcttttagggtttcaggttgtccgaaaccatactcttcgagagtttcttcatcgagaatcatgatagtcatgcaggagtaggtgtccttaaatcttgcgaaactatcttctttcttgaagaatcggtgagcccatcagtactttttgaacaatcttcagtctgatgaccctgagcatgcccttcttgagttttatagctcccgccattagcgtatgtatcaaccatcgaatcttcttctagtgagacggcttcttcttcttctaagtcctcttcttactcgatttggtcttgatttccctttcatagtgatttatgcattccatgcaatggtgtcctatgattcaggtggcttaaagcatttttaaaacatttgacctttaatacaaatatttgggttaaaaaaattgtattcaaatattagaaaagtattgaaaaattgttgattatttttaagaaagtataaaatattctactttttataaaaactaactttctaaattattgcagcaaatatattgatttattgaagacttttttctatcaaaacattgatgtacttaaccagcggatcacacaagtaattttaaaattatggccttccgattattaattttatatttgtggcctaaaggaagtgcttcacttgccttatggacaggccaggcctgattccatgagaggaggcaaataatcattagatcaaaatagtcaccaaaacatccaaacaaacttcatatatgttgcatcaacaacattaattaaaactgatctctcttcctcttcccattgaactcaccatgaccaatcttctataacaaatacaatatctatgttatttcggcaatgatccctgatatatatactagtgaagtatatggagtttggtttgatagcattaatgttatgattagcatgcataatgatacccaagtcaacaaatatagtttactcaccgaaggaatgcacctatcagcaaccgcgtagttgtgccgattttaattagaattcttcttgtagatgctgaaactttcaaaaaaaaaaatctgtaagtcggatgataaatcaaggaatcttattttagcatcgatagttacaatgtctagaaggtaacctcggaaaatataccttgaaaatccttggtaacaccgtaatgtagaggaatgtcagtataatgatcatcacctttcttgcaaaaggctaaatatgtgtcaaagtaattgaagaaccgcactacaacgaactctttttttttttcgtctccgtacccacaaaagactcctcaaaatttcggtgttcactgttcagaatatcttacttctgtttatcgttgactgaatcttaaaggaaaaaaatattattactaatattatttttctcttataaccaaagtgtaatccgcatttttgaccacttgactagtcctccagtgttgttggatatgggcttcgccccaacaacatggttaaagcccaacatatcgtaattggcaacgagggaggaaagaagagaagatcggcccgtttaaagacgaaagagcccaacaccagacgaagcccaccttcagggagctgctggtcaggagagagtcccaaatcgagaagaaaattgtactatagattgtccttgcagtattataaatactgacaaaggaatgtcaggaaaggacacctgaaatctgcagagaaaagcaatagaaacttctcattctgattcagaaacataagtctaattttgacttgtgaagtttgtatttacgttaagagatcagaaatctaatctcggttgtagaaatactctgtaaacggccgaacttcagtgatattaataaagatcttccttcaggctcgtcatttccttctttggtttagagggtcggttttatacaccaacaattggcgcgccaggtagggggctaccacaagaaaagaagaagagaaggccgcgggaagactgcgagaaggaaggatgcccccgaagtgaaaatgaaagtgac

SEQ ID NO: 28497 - DNA, 1346 bp, Arabidopsis thaliana landsberg
caatgaaacatatttttcactctgagtgtcacacacaaaatcaatatacaaacaacattacaagccattaaagagaacagagaaatttgattacactttacagttacaaagtcttgaaactttgatttgcacattcaagattagaaacatccacaagttgcctttggaacaattccagtggctctgtatttagcagacgtttctttcgctataagaacgtcttctccacgcttagcttcaatcattgctcttctctcttctgcttacttgtgaatcgctgcaaccttattcttcatcctctctgcatactctgctttcttcttctctaggtgctcctgcattaagaaaaaactcacaaattaacacttcacttctaatcacattaaaaccgtttcacctctctattgctcagttttattatacctcgattttcttgagttgcgcttcgacagctgctttcttgctgttttcccaagcatgaacatctgcaatcttcttctcagctctgtttcatgtcaatagtcagcaaaatcaggcaaagaacataaaaaagccaaaacctaaaaccagtgacgataaaataaaatgtcttacttgttctctgctttgctcttttcgctttcttcccacgctctgacgaaagacaatctcttttcctttgacaaatcagctagcttaacatctacaaaccaaacaatggaactcagaaactttaacaaacattacatccagaaagaagtcacacaattttgtttaagctcacctctatcgagcgatgcagacgcaggtttcgccggtgcaggctcttctacaggttctgtaaaaaaattcattccgttaaaatttcaaacataaccagcaaaattgccacagaagagagtcacaagcaaacacatacaaaacatatgcatggttatgaacataaagctacaatttttgggtgcttaatgaccatatacattgaattatacatcacaacaaaactaaatttaccaatctcgagactttaaatcgaaacgaattcgaatttctctgtgcactctaatcgtatttcaatgacaaattctatctctggagcaacccaatcctaataaccaataaaacctaatttttaaaatacagaaccaagttaaccccaaaaccaatatttcctcgtcaaagcagaagattatcagagaacagaatccataattacatgcgttaagagaaattaacttactctcaacaacagtaagggctttggagtcatcggaaatctgctccggaggtgggttttgaattttctcctctgcaacgtctttcgtgacatcagccggagtcggagctggagctggagccggaatctc

SEQ ID NO: 28498 - DNA, 508 bp, Arabidopsis thaliana landsberg
  unsure (1)..(508): unsure at all n locations
ctggattttccattttgcgcaattgcttaagaaccatgttgggtttgattctgattcgtacgtggaccttcatgaccttgggatgaagctgtatccggaagcaatggaggatgctgtcactggtgaagatgcgcaggaactctttcaaatcgctgctgataagttccaagaaatgggggcactagctttgttgaactggggtaacgttcacatgtccaaggcaaggaagcaagtctgtatacccgaggatgcctctagagaagctataatagaagcagttgaggctgcatttgtgtggacacagaacgagtacaacaaagctgcagagaaatatgaagaagcaattaaggttaaacctgatttttacgaagctcttctagcacttgggcaagagcagtttgaacatgcaaagctttgctggtatcatgcactcaaaagncaggtagacctagaaagtgaggcttctcaagaggtcctgaagctctataacaaagctgaagatagtatg

SEQ ID NO: 28499 - DNA, 1217 bp, Arabidopsis thaliana landsberg
aatatgctttagttaatattgaatacccagacaccaaaaagaagaaagacctgaaacaggaccctgagagttactgcaaatagcaaacttagaccttatctagtgtcctctctccaagtcttcctttcctaatctatgctacttactaagatttttctatggaagttcatgaaacactattctattctttataggaccagggtctatatacaaaatagagtcaacactttgggccaccgaatcttgatgaacttagagcatccatggcaacctcaatcatctttataagcgcttcaacatcatggaaactaaaatcgacaacctttttgatagcagagatacagtctccatgctttctttcttctgaggtgtcagtgacggctttaaaagcattttgggattttgctgaggcctccattgccagattcatgctccctgtctgtattagataaatatagaatatcagctttgtttggcacaggaagatagataacaaagacctccacagtttaggcaataggaggatcttagttgagatttcaaaactcaaacatgataggtaagagacaacccagttcgctttttcaaatactccaaatgtatcatgccataattgatgaaggtgggataacttacaaagtccaatagcggaacaaaatttagttggcttctagcaacagggagaaggtttccggcaacatgggaaagacctcttctggttttagcagacttcttaatcaccccttgatgattgaaactatcgacatcagatgcagatgatgacggtgaatcacctgaggtaacaattcaaatgaacaatatgtgactttactgaaacggacagcagtaaataaattgtccgtataaacagatcccaagcatatttttctctaaattttgtccagatattgaggaacttccaacataagttttgcctgaaaatacttcaaacctataaagtataaaaaatctgtaaactatgaaaaggtggacatactaagccaaaataataggtatacgttgactactgctgaggtaaatatcttctgagagaattttgacgcgagcaaaagaactgaggactattttagacaatgataactactacaattctgacttgaccatattgaaaataaatttccgggaaaaaaacgttcactaactgatatgatcatagatgaaatatacaatagtaccttgaggagtcatctgtacca

SEQ ID NO: 28500 - DNA, 5204 bp, Arabidopsis thaliana landsberg
ctcgtcccaaactgctctccccatctcatagtttctcgccacgaagtaagatttcattatcatgttgaacgtgtgtatcgatggctcaatttcgttctggatcatcttgttgtagatccttgtgccatgttccggcattttctggttcgccatcagtttgatcaacgcattatacgttttgccatccggagggtgtcccttttcttgcatctccttgagcagttcgtaaacagtatccagcttcttctgagtcccaaaccccgtgatcagacacgtgtaaaccgcagcatcaggttgcaacccggaatcaaccatgtcatcaaagtactcaatggcagtttccatgctcgactgtttgcagaagtcccggatcatgatggtatagctacggacattagggcaaggtcccttggatttcataacatggaacaatttgatcgcatctgattttttcatactcctcaacaacccttcaagcattacgttgtgagctacaatgtcaggtttcaatccgtgatcaatcatatcattccagattctagctgcttctatcaagttcctcaccctgcaccaaccattgagtagaacagtgtaagtcatcatattaggtgtaaacctctccttcagcttatcaaacagaacctgagcttcttttccaagcttagccctgccaagactatcaagcaagcaattaatggtttcaacaccaatcttaaacttgtacttcttcatcaactcaaagataccaacagctttcttcctctctttcgcagcagcgaaagctttcatcgcgatagtgaatgtctccatcgtcaatagacctttcgtacccatctcttcgagtaccgaaaccatcgtctcgaactgtctagtctttgctaaaatactcatcatggagttatatgttcttgagtcatgagcaaatccttgtctctctgcagcccaacagaagaacctaaatgcaggcttcctagcatgtcgaaaacgttctaaaacctcaacgatgagatcatgtgataaatctagtttcatttcatcaagaacagcttccatatttctatctaacgcaaacaattcatcaatcactttgcagactctctctacttcttccggattagtacttgattcaacacaactgaccccagtttcttcatcattatcgcattcagattcaacttcttcatcacatccatcactaacattagaactaccactagagaaacctctacacccaagactcgcatcaagcagttgtacagaggagtgtggcaatggaatttgacggtaaggatgataagtagaagaatgaatcatacgagagaagagagcaccggaaaatcgtacttcctcttctcctctcccgccgattacgcggctttgactggaaatgaattcatcggcatcgaatgaagaagagcaaatgaggaatcttcttaatgaagtctgagtggagctttttctcctagagagatagagccatggagcagcagccatggaagctcgacggcgattagcaatggcgaagtcggtgaaaagccactgatttacggcggagagctcttcacgtatttgggcctttgtttgattagaagctttgagtgataataattttgacccattaaaggcccattgatctggtcacatataaccattgggtccaccaggagcattaaagctcaaacgcataaagaatttttattttttagttggaaggtatctgtatgcatcttatcttcgttttagggtcgtgatattttctcaagtttttcttaggggaccaatttatttttagatttatttgattctatcttacatttctcttagttcacgttgtctttgtatacgtgtttatggatattacataactgaaaatcaagatcagtcaatcagtgtaacatcaatcatcaataaccctgcgggatgtatataaaactaagggatatatgaggaaaatcagattccagattaagttcataaatattgattcacctaaaatctataataacatagtagttcagaagcatgaaataattctataaaaaatcatgaattatctacataaaaatatcgcatattgtagataagagtcacccctgaaagaaaaacgatagttttctgtatttggttatcaatcaatcctatgtgggtttatatcttatctaatgtaaaaattacacaaaggatagtgtctgcaaatatctaaatgaaaacacttaattccaaaatgagaaatcaagtgggttttgcctagctaattgtataaatagtaacacaatcataatctcttcttccatcaggtcttcttcataatatatttcttctctaataattgaaagcaaaagaaaacagtttttttttttagaaaggtaaagaaatggaggaaacaaaggagagaaagatagtagtagcagtagacgaaagcgaagagagcatggaagctctgtcatggagtcttgacaatctttttccatatggttccaataatacactcatcctcctctacgtcaagccccctcttcccgtttactcttccctcgatgccgcaggttagtcctcgttctttcacgattcatatctttccctaattataatctgttcactttagttatagatttttgtttggtcgatttccagggtttatagtgacaggagacccggttgcagctttgaagaagtatgaatacgagctcgtggaatcggtcatggctcggtctcgaaccgtgtaccaagattatgagtctgatgtaagcttatttctatcgattttttatcacttaatttgctggattatacttgcttaaaaaacttgagaaattatgagaaagtgaatttaatcaagtagttatgagttaatctgtttatcatgagcaatatttagtacaaaaaatataacatatgataagcaaaatatggttgttttcaaagagagttggcgaaataaatgtaaatataaccaaattaatgtgcagattaatatagagagacgagttggaagaggagatgctaaggaagttatatgcaacgcagttcagaaacttagagttgatatgttagtaatgggcactcatgactatggcttcttcaaaaggtaaggtttcaatctcttataagaaacaaaaatattttggtttaatggttatttgataatcatttgatatatttgatagggctttgctagggagtgtgagcgagtattgcgccaaacgagtcaagtgtcctgtggttatcgtcaagaagcaagctcaagataattaagctcatatgattgcattgtgtatatgtttcgaaagaactggtgtaacacttgaatcaatcttcgtatgcgataataaaatacataacggtttaaacaaatttagcagatatttttgcttatataaaactagctgacaatgacatcaatcaaccaattaaattcaaatctacattctctacatacaatgccaaattaaaaactaatgtaaacgcaaatttcaatttaacgtatagaagaatgtaatgaaccatataccaagttttgaatatttgcaattttgttgtttgaacacttaattgttgttcgcttcaaagttcaataaaggcctcaaggcccaaagtatatctgttactcatccagtcgacacagtcatacttaaacgtcgccgtttccgtgttcgaagcttcgtgaaaatcttcaatctcgcgagagagaagaagaagaagaagaagaagaagaagcgatgttcctggtggattggttctatggagttctggcaactctgggactatggcagaaagaagcgaagattctgtttctaggtctcgacaacgccggcaaaaccaccttgcttcacatgttaaaggacgaggttcgttttcttcgagccatatcagtaatcgctgtctagaatcttgtttcttttacttagcgcgaacgaatcaaagtcttaatcagcgataatcgtttgatttgggtttcagagactggtccagcatcagccgacacagcatccgacatcggaagagcttagtatcggcaaaatcaagttcaaagccttcgatttgggaggtcatcagattgctcgtagagtctggaaggactattacgctaaggtttgatcttctttcttctttggattttattgttaggtcaatcaatttagcaagtctttggaaggactattgcgctcgtatagttgtatgtagactctaagctgactctgttatagattacaatcttccctgtgcccatataaacaatagttagatgatagaggtgaagtgaaatcttcaatgaagtttgtcatatagcaattctcttttgaatgttgcagcatgaggtcctgtgattacattctgctggttatgtgtacctagtaagctcttgctgtgtactactcctactctgttccttagccactgtgttgctccgttgggttatataagtttgcagatgatagtttgaaatgattgagctatagtaaaatcttcagatgatagatatacatatacatcatatactgtagtttaaaatgacattgtgattggtatgtggagccagtggaggttgaaaattagaagattgtatagctatagactactcttactgtcagttttagagtcatgaggtcccttgtgatttacattctcatagctgatgattccagtgaatcaagagattaatagactccggtgtttctattagctaccctctttgcattctatcttcaagtttgtaactttattattgtctcgtattaggttgatgcagtggtatacctagttgatgcatatgacaaagagaggtttgcagaatcaaagaaagagcttgacgctcttctctctgatgaatccctagcaaatgtccctttcctcatccttggaaacaaaatcgacattccgtacgctgcatcagaagacgagctgcgttatcatctaggcctcaccagtttcaccactgggaaaggtaaagtgaatctagcaggaacaaatgttcgtcctcttgaggtgttcatgtgcagcattgtcagaaagatgggttacggcgaaggatttaaatgggtttctcaatatatcgactagatcaatcatatttaagtcttatctatctatactgtgtgattggtatctgtacgtgttataacctaatgtataattacgattaatgtgtgtatacaacaagatttacggcttttaatatcaattttgtgttacagaccaaagtt

SEQ ID NO: 28501 - DNA, 2035 bp, Arabidopsis thaliana landsberg
aatgatatgtataaaaagataaaatggacattcttataaaagttacacaccatttttttgttagattagtttgtgaattaaaatatttttattgattatttatgcctactttcctaaaattttctccttttttacaatttctatatcacgactttttctaatagatactttcgtaatatttatcctgaatgtgttgcgccacacttacgatataaagatattttattgtttcaaaaaaaaaagaaattaatattaagaaaaagttattcaaggttcaataaataaaaaaaaatccgatatccagaatataccaaaaaatttttattcaaagttaaaatatagaaagatattagatatcaagagaaattattcaagtttaaaaaatagaaagaaattatataatatatttttttgaaatttttattcaaattttaaaaaataaggaacttagatattaggaaaaccttatttccatattataaaattataattttactaaatatatttaaaaaattgtgtttcctaaatttattatttctttttttaataatttctatactacaatcttttctaataaaaatattttataatatttattctgaatgtgttacgacacgtcatcgctacaaaccaaaataaacgggtgtggtgtgtttggttcggccttacaccaaatcgaacacaccaccatttttacccagaaatttgagtaccaagagagcgctttttcatcctaaagagatcttcaaatttagatttcaacacataaaaggtatgaaatttttcatctttttttccggctagttttttttggaataaccgtatcataatttctcaagatcacaactttatattaaaagcaaatctaatgaaaaaacaaacaataaatcctgtaggaaaatatttgtgtaagagcttcttctccgccatggatttagcttgaaaagtgttctccaaacaaaacccatttcttcgatttctctgagaaactcgtcaaacccattttcgcttttcgttgcaaaaaatgggttcttctcacattcctcttgatccgtctctaaatccgtcaccttcagtgatcccaaagcttgaaccagtcactgaatcaacccaaaacttggcctttcaacttccaaacacaaacccacaagcccttatttcatcacccgtctccgatttcaacgaagccacagacttttcctcagattacaacaccgtcgccgagtcagcccggtcatgtttcgctcaacggcttcaacgtcacgatgatgttgcggttcttgattccttaaccggagcaatcgtaccggttgaggagaatccggaaccggaaccgaatccttactcaaccagtgacccttcaccgtcggttgctactcaacgacctaaaccgcagccacgttcgtcggagctagtgaggatcactgatgttggacctgaaagtgagagacagtttcgtgaacatgtgaggaagacgagaatgatttatgattctcttaggatgtttttgatgatggaagaagctaaacgtaatggggttggtggaagaagagctagagctgatggtaaagctggtaaagctggttcaatgatgagagattgtatgttgtggatgaatcgtgataaacgaatcgtcggttcgattcccggtgttcaagttggggatatcttcttctttagggttgatttatgtgtcatgggtttacatggacactctcaagctgggatagattttcttacagggagtcttagttctaatggggagccaatagctactagtgtgattgtttctggtgggtatgaggatgatgatgatcaaggagatgtgattatgtatacaggtcagggtggacaagataggcttggaaggcaagctgaacatcagaggctggaaggtggaaaccttgcgatggaacggagtatgtattatgggattgaagtgagagttattagagggttgaagtatgagaatgaggtttctagtaaagaatatgtttatgatgggttgtttaggattgttgattcttggtttgat

SEQ ID NO: 28502 - DNA, 1886 bp, Arabidopsis thaliana landsberg
actatcacagatgttaggaagtctggtatttaccaatgaaagtttataagctacaagtaaagaccgtgggagtgctgaggtgaagtaccaatgtatggaatgtgtctagtttagcaactaattttcaaggacaacacatcatttcatacaaatgcaagtgccacaatattaaactttgaattggaaattccaaacggttatcattgtacagaacgcaatcctttaatcaggcagtagaaaaatgctagaacattatgcatcatatgaaaaataaatcaattgaggaaacaatttttttgaaggatacaccccaatcagaactccggtttagaatggagttaaaccagaaaacttcaaattctggccagacaaacttcttccacatgatagagtcaacgaaaatggtaagacctgtgctaaggattattccatgaccacagaaaatagactcgggaattagtgtctgaagggaaaaagcaaaatagatcacagaaagaagaggaattttaaccaacctacggccaacagagcggttccaacacaatacttaagtgctttccagaaggagatcgatttggtctgtcattgacaaacataaagcacccgcatcagatggaacggtaaagtatacggccaattatacatatacagaagttgagaacccaaactatttaatattcgtcaccagctcaccaataaaagttcaagaccaataggcccaagcagtaacatcgtatcgcatctgtggattacagtggcaaaaatctgattatcggataacagagatgtcagcaaaccccatagttctggatagcatgaccgattttctaaatctataatcgagaaaatatgtcaccacaaagataatacataccaggaaactcaaagctggataaaaatttccctttaaccaattaccatatgccagattgactgcaaaatcaaaatttaaaaacataagcagaacctagtaaggcctacgctagatgggtcatgggaaagattgctaggacatctgaaggaccactactagtagagtaagatgaatagaagtaattacctaatcccaaagctagaatattaggaagaggacgagtgcagtagaaaagaaaatgaaactgaagactggtgaaaagtacaaagaaagtttccacttgatttccaaactttttttttatctgacaaaccagtagattttggtcagtggcagtatataggagaaaaacagccaacaagatgcatgtaagagatcccaattccaaggacatgggaagggacaaagaatcagataggggagtcagaagtgtggtatggaaagaagcactaaaggaacttcatacctgaatccggaaaaatcttagtgtggacaatatgatgcagcccaacaccaaacgagctgcaagacaaaatgataaaactatgatgtgaattggttttgtctgtgtttaggggaaaatagttagcgattcattaaggaattatatagggagggagaaacagaagagaaacctgcaacaaggctataaaccttggggaagccaaggcagctgataattgatacaacaggtgatgcaaaaacagagactatgaaggctcctgcaagaacaaatcagagtggaataaaaaaaaaaccatccactaatgtataatgataaaaaaaaaaccatcaacaggtgatgcaaaaacagagagcgaaattcaacagccctccttaccaataaaagttcgagggacaacaccggggaactccaaatgatcatactgataggaaaaaaataaaaagacagaagtcggtaaaaattgacatcactctagagataaaaaaaaaaagagtaaagcttcagagaagaagtaaaaagagaggtcactcacagagtccaaatgat

SEQ ID NO: 28503 - DNA, 3898 bp, Arabidopsis thaliana landsberg
  unsure (1)..(3898): unsure at all n locations
cagtttgtctattatttgttatgacatctatattcatacatgatccgaatgttatcacttatcaccatttaaggaagtgtaaaacaaaagattcaaataatcagcaaaaaccctaattattaaataccatacaactacaactacaactacaaatgatatccatttcacaaaaatcttatatatatataaactctgtgcacagagacatatgctaaagaacattgacaacaacatatgcatatgagtatgaaatctctgtactgtacattctacaacatgagttacaaatatatgatgtctctacagtatttatatatatatagataggcaaataaaaatctccaacaagcacaattccaagagtaaattcgatttgagttcctccaaagtacatacctgaaagtaaagacaaaagaaggctaaggaatgtcggaaaatatagaatcatccaatannnnnnnnnnnnnnnnnnnnnnnnnnnnnnnnnctgattcttgaccgcttgaagatgtgatattgctattgacatcttcaataccgtattggttaaaaatcagatcatcattcacatgagcaggagttgtgctggatggatccgagagccagattggagacacgggtaggttttctctctgagtggagaatttgaagtgattgtcatcaagattctgggggaaaacagatgatggttccatgttggaatttagggttttcagggaaggtaagctgtggaagtcctgaagataagagccgaggaaaccgaggtcgagattgttgctggtggtattattactggtctctttgaaagaggcaatagagttaaggagactgagagtgtcaaagtcattagggttaacattgttactcatggaagacggttgaagaaggtattggaacaattggagtttggccatctcggtttggagtttgagtatagtgtgttcttgatcaataggaaactgttgttgcagatcaacaaagcctctcaggttagaagacaaagacatgagctgagataagccggagaagatatcggttcttggacggtgagtcattggatcaaaacccatctgaatcagcttcttcttcaaatgagtgttccagaaattcttgatctcgttatctgttctccctggtaactgattcgcaatcgttgaccaccttataacatcatcattcataagcaatcagtataagataatctggtacacaaacaaaaccgttgactaaaacatcaaaacaatcatcacaagattaattacttgtttccaagaactgaatgaagattcaagatagtctgttcctcgtccggagagaatctccctctcttgatgtctggtctcaagtagttcgtccatcttagcctgcaactcttcccacacctgttaagacctgcatatatagagaaacatatatatattcataagactaagacattagactcatatatcacaaacaaaactaggtttcatcaagtcttcaagatagtaccagcgagcttgggaagggcactccagctgctatggccatgtttgtgaatataattgatgagtttatcatcttcttcaggcaaccatggacctttcttcagaccagtttcatctgagctaggagatcttcccatgtttgatcaacttctgtatctaacaacggtctctcttcttgttttttacctcttctctttactattacttcttcaaatatttggtcgcttgcctcctttcttcacaaccactaactgcttcttatttctatatttatattgagtcgagcttccctctctctcttcaatgtccattcaccacgtgcctctttcttattcgtataccaaaacaacccatgtcgctttcacccttcagattccattttctatgcttttctcttctttattctctcacatacgtacggtataaccacttacagtcctaagcaatcttcttctcggacacaattcaagatagtactaaatcctgtggttcatggatttatgtcgctagagacctgcaaacataataatatgatcaggcattgcctgctagagaaaagattccaaagttctacagaaatgtttaggtgggggagaagaaggccagtaaaggactttgacaagaaagctataaactattcaaatcattttttaatcattcgctgacaaaacatagcagagaaatgattttaatcgcaccaaacaacagatgtcaccacaaggatggccagagagatcatctccttgtgtcattcatttcttgactctatatgtatttggtattctctaatatataaaaagaactttctatttgtatttagctttgtatcaagccatgagccctaatagttttaatatactagaaagccccagaaagaagcagaataattggtctgatatggaaactataagtcgtagagtattgttcaacacatttcttttgatcttgaggaagtcctgatatagcaaatttaggtaatacttacagaaatttccatttcctactcaaaaatgcttttttctggtgagaaaaatatgctatattaggaaacctgcaacagagagcattattatcaggatacgtgagaactaatctagttgcgttttgtatccattttctgatcaaatatatgagctatatataatcctgtcctacagatcaatcattcattcagttagcacgtaattatatggtttaatatataaaaagattatgggaaatgcatagacagtaacaggtgagagacaaatatgaaggacaaagtaactatgtaaagtatttgtattatgagaagagaagttactattcataatggtgacaggcttgatgttgacattttgttgaaaattggaaggagcttgttaggggagaggttggtgcagaaaatgatctaaatatccaccatctttgaaacctacaagactttcttcccactgcctctgcattggaccaaatggcatttcttgtccttttcttctgtgtcttttccataaattatatcataggatttcctgcaatttttccaaatgaaagacaattggtcctcaagaaacaaattctaagatacatagaacttggaaaaaggaaacattttcaccatacgaaggcatatcaaatctgtattagcctatatcaacgaactagataagtctcaccaagaggcttttcaaatgctcaatgtttagataatagcattcataagtacaggtttccatagtgtatcaactgcaaaatgtcctgtatataataaatgctgtttttcattaaacgatttgtgaaaaataaaagtatttttcacgttgttgactataaaaaaaatccgggaaagagagtaggatttgagttgcttgtgcatctagggtttctcagagtggaccacaatctcactggaggaagcaggtacagtatatatattaaagaaataaggaaggcactaggttcatgctaaactaattgttttcaagatacgctatgtcacttaaaccgtacttttcctctaatataaaaaaatggttgtgaatgtcagctaaacaaattgttttgcttcttctcctaagttcctaaccaacacatctaaaccctgactttcaaagccatgtttggaaaacaaacttttacctcttccctattctctgtaaatgtgaagagcatgcatcgagcgcagtactatattactcagattcaattttctacctaattgctaaattcttgaaatccaggaggtcactatcaaactttgtggatcacagtgatacatactagactgttggtacttacacaatctaagagaattccaagatgcttgtgttgaaaatttcatcagcatcagtaaggatcctgaaagatattgcaaccagtgaaaaaaacacaaaatgagacacatgcacacatataatattaacaaggtcata

SEQ ID NO: 28504 - DNA, 1392 bp, Arabidopsis thaliana landsberg
  unsure (1)..(1392): unsure at all n locations
ccaaatgaaccaagcgaccgactaataaatgttatcatctcgaaaaaaagacatgtcatccaagatcacgtatggcatatacagcctaaaacatatgatccgccgcatggtattcgacataattattcattataaccatcatgtgttagttatatcatattcaccggaaactatatgcaatcggttgctctatgctttgccactaactagacccaactcaaaacataatttaccatatctatataaacctggataatgtactcaccataatagatcaaattcttaccaatatttatcggagaatagttaaaaacaccgctttctgatcatttttcgatgacaaaaagttgtcaaacatctttagttggagacttccaacctggtatagtggtttagatagcgtgtgaccnnnnnnnnnnnnnnnnnnnnnnnnnnnnnnnnnnnnnnnnnntaatttgcctctaaaatttgtaatctttagcggaaactgaaagactgaactgctgaccaacaaattaaccgaaaccagcgatacaaaggtcttcaaattaaataacattccactttgaatcaaaagattcatatatatatacattgcaacatatttgccttaggtaaattaaatctcagtatatttttgataagcgattgaatattacaaaattctgatatatagctcaactggttgacatacttcgaccaaatgctattttccctcttttacctatgtcacactatgtgaaaagtgaaatggaagaaaatttctaccaaattccgataggttaactggttagcatattttcaccaattacatttgtactctttcagactttcacctatgtgaaaaattaaagaaagggaacgacggcgtatgagtcccgacaaagatttaaccgacaagacataaaatgcttacacgacgacgagaacacacacccgtggatcaaaggcggtgcacctcatcataaactttggaaagaagaaatatccaaaccaacctctatcttcatatatatatacatacatagaccgatcgaacattaattaatttcgttaagagagacaacaaaaagagagaacaatgtcgtcgtcgagggagctacaatacttggagtacacatacagaaacaaccgtcccacgacgggtctcctcaactccatcttcatgaccaccgtcaacacggccgctcgttctctcgtctccgtcgcttccaccgcctctacaccagagattccttctaggcgatggtcggcttcggaccacctcaggttcatgtctatgatgatgacgtggcttaccctttggatccttagagttttcttggactatcttcctcttcctctcatctcttcttcttcttctgcttattcttattcttatcgtccctttag

SEQ ID NO: 28505 - DNA, 1443 bp, Arabidopsis thaliana landsberg
  unsure (1)..(1443): unsure at all n locations
ccctttagctagtgctgtagctatggctctttaaacgttatcgtggaagaaaaactcgttgaaaggtacagttttgctttctatatcgattcaggttctttagattaaaatattaagttcacgttttggtttgaatctatagatcagcaagtcttggagaggaactgaggattcaattgaatgaaatcaagaaacagtttccgaagtacataaaggaagtacgaggaagaggcttgtttaatgcgattgagttcaatagcgaaagcttgtccccggtttcagcttacgatatttgcttgagcttgaaggagagaggagtcttggctaaacctactcacaacactattgtccggttaactccaccactctctataaggtaaattagaaacaactgaaccggtttggtttatttagtagcttatcataggtttcttggttgaatcaattattggttttctttcttttgccagctctgatgaactccgagaaggatctgaggctcttcacgatgtactcgagctcgatcttccaaatctgctgaaaatcaattccggtaaaactccggtttctcatataaccgagtgtgatcgctgtggaagaaacctctatgcttgaaccggtttgaaacttgattaggttctggtataattagattctttgtatcttgtgatttccataggacacagcaccggtttggtataagaaatatattaaagtataaggccgaaccggattgtaccgagcttggtagaaataactctggtttatttctggtttggcattaaataaaaccaacataaaataatatgatgcctgttttcataggtgttatacatgctatctcaacaaacaaataaatgttacataacaaaatgtaaggaagtatggatgtactaatttatacgcacacgtgttggcatgtgtagatagatattgatttggaatatgaaatcatgaataaacatatgcgtgtcttctataattgctcaacccaaacatgttgaggcgtgaaaccccatatgattggttggctctctaatatttaaatcacattatcataccctgatttaaaacaacaaatacatacttaaataactatctgaaacatgtaaattatataccacactaatggcctcatgatctcgatttctttctaaatctagtgaaagaatattactcatttcttgttgtcaaaatgcaataaaactatttagagggaagaaacttagatgtttcgttgatgaatctgcattgaatagtcacatgtgtctccattgtatcctactatcattttgtaagtaagtcaaatctaattaaggaaaacgccgaggcgtgcgaaatgggaaaacacacatgacacaacgtgcatgtttatcgcanaatcaacacatgactttgctagtcactagtgcattatgcatatcttttaagtatttatgatta

SEQ ID NO: 28506 - DNA, 1349 bp, Arabidopsis thaliana landsberg
  unsure (1)..(1349): unsure at all n locations
catcagagagcctctactatagtgcaaagagaatcacatttaacacaatataggctatagattaaacggaaccatatatatcactataccaagattcagaaagtgctacatctatgctcattaatggataattcaagaactaaacgaatttcaagagtttagaacagaatcatataagctcaataccgaccttaagaccaccaaaaaaccccgtaaaaaccaagccaaaacaaaaagaacatacgttgtaggatcagacaaaatggttctcaatgactcgatcgaattgctcgaagaagaagaaaggtctcttctgccactgaaatcacacccattatccgcagcgattgatgattcctcattcctagaaacaaaactcgcttccactgtcttaaaatgctgggaatagtaagctgcgttgtcttgtccaaccactatcactgcattaccattttagtccactgcctcaatactccaaaagtagaaacttttcaaaactagaattcccaaaaaaacataaactttgtgtgattctcataccagctcctgcagatacagaatcttcaccagcgtctttgttcatgccgatgtcaccttcgtttccgtctaagtcatcatcctcgtcttcttcttccacgtcaacgtcatcctcgccgtcggatccaccactgtcgttagggtttccgataatgggtttctccgagtagaaattctgacggaactcgagatgaggatgtggattagctgcggcggctgctgctgctgctgccgcgaaataccggtggtcgccgataaaggcagcgaattcacgggttttaggatcctgttcgccgacccgaaaacgtaacgggtnnnnnnnnnnnnnnnnnnnnnnnnnnnngttgaacggcgccggagatagacctttgccggacatggaattgaacgatcgaaaatgactaaaacccctaagaattaaacgaaaattgaagataattgagcatgtaagaaagggaaatcagggttcggtttagtttcgtgaagcaaagaaggaatctttaagaagagagatgagtgatgagaggaaaagttttcatttccagcgatcaaatgaaaaaggctaaagaggaagaagaagaagggaaggagaaatggcgtcgtttggagagaagataaacgaagtaagaaacggtgacgtatcaaccgcaacagacgtcaggctcagattctagggcccatggatcagaaagtaaagtgtgcagaactggattatgaaaagaagtcaacggaatccaccccctactgttgttttgttttttgtttgtcaaaaaaagattaccggtttttgttgtctgacaattattcattgt

SEQ ID NO: 28507 - DNA, 648 bp, Arabidopsis thaliana landsberg
tgcagccgggatgatccaggtaagccgcccaattattcttctagtctttttagtttttgaggcatattcaattagaggatacatttatttttctcttatattcttggtcccttcgttcgattgaacattatatttggcaggcagaactgaaagggagatcctttttatgccgcactgctgctagctttgtgtctgctctaatagggattattccaaaagatcctgtgttgccaaaagatttcgaatctaacaaagaaagcagtggtgcactaatagttgtaggctcatatgtcccgaaaacaacaaagcaggttagattatctactaacaacactaatttctttgatatcttctcaatgaaataaaattaaagagccctgagtcattttcttctaactaacaggttgaagaacttcaatcacaacataaccagaatttaaggagcatcgaggtaagagaagtagatgtaacacgggatacttatattagtatataccacatgttatgcatgctttgtttgctaagtatatagcaatgatcaacagatctctgtagaaaaagttgctctcaagtcatctgaagtgagagatgaagaaatcagaatagcagttgagatggccgatgctttccttcgggctggctgggaga

SEQ ID NO: 28508 - DNA, 1563 bp, Arabidopsis thaliana landsberg
  unsure (1)..(1563): unsure at all n locations
taaagagcatactctggttactacactgcaggaaggttttgacaagtcatctgatccttgactaactctgttattgcgtctctcaatctctcataatcctcagttttgttatagacctgatgagagatccgaacatacgcagtaattagtccactgtctttgtctttcactccttcctctccatccctcaatccgagataaaaaactggaacctcaactgagtaatgaacccgcagatatgaccgcaacttaatagcatcttcatcacttccaacacagagttttgaaggtaaaccgatcataaccatcccaacacacatttctggaggtgaccctagattcgttccccaagcatcagccagcattaaacccattctaacagcttcatcatggttcttcatcattatcccttccatccctccctcgaacctgtttacaaactccatcacagatggaaccacaagctgtgaactgtaatccctannnnnnnnnnnnnnnnnnnnnnnnnnnnnaccatttccaaactcatgagacaccacagggtgatgaacatcagactcagaaccacgtttcttacaatagaaaaacgcgatagacggtggacaaaagaaccatttatgcagattactcacatagtaatcagctccgatttctttcacatcaactttaacactaccaatggcatgagctgcatcaacaaaaacctgctccacaccttcctctctgcagatcttaaccaattctcgtaccggcatcaaaacacacggcatcgacgttatatgatcaatgatagctaacctaaccgttctaccattcgctctacctttctctagtccttctctaaacttggagataatctcttcgttcgaatttacagggaaaggtaacctaacctcaacagtagaacctcccacacgagagacataagcctgaatcgacttcttcacactctgaaacgcacagtgaaacatcactacagtatcttccttcttatacttcccttccgagaaacaccttccaactttctgaagaacaatagcagcagcagtggtggcgttatcaacgagcgagacctcatcaacatcatcggcgttgattaggtcactgatcacagttcgagaagcgagaagtccacgacggagaccgttgaagtagaactcatcaggctgacggagataacgaagctgccactcgcgttgcgcctcgagaacggagccaggacagcacccgaagctaccgttgttgattctggcaacaccggtctggtggtgagcgaactcagagtcgatatctgactcggttaataacccagcgagacgtggcttcttcggtgcgcggtgattgtgactcatcgaatcgccattgcgccgctctcccgcctccatcggaattgaaaaaaatcagagctagggtttcgtctcgaatcccaaattgagagagagagagagagactgtgtgggtttttgggggtcaaatcattcactgttggtacgtcatcgaagataaatgtggtgcggtaacacttttccgcttcccgacaattcataaagaaaaattcaaaat

SEQ ID NO: 28509 - DNA, 1861 bp, Arabidopsis thaliana landsberg
  unsure (1)..(1861): unsure at all n locations
tgcgggagcttgggtattcgattgcctctcgaccttgtcgttttgtttacaagcatccatgaattctggtgctgggcgctcttcttctgtttctgctcatcctcctctatcttcgaattcatccgggagaagaaacttgaagactnnnnnnnnnnnnnnnnnnnnnnnagcctctgccaaaatccctatgcctccgataaatccaaaggatcctttcctctccacgctcgcttctattgccgcgaattctccggaaaagcttctcaatcggccggttaacgctgatgtgccgccatatcttgacatctttgactcccctcagctcatgtcttctcctgcacaggttaactattctcctccattttccgatcccgatacaatgatttgtatgcgctttgcgtttagttaagtcgtcaagtatccagcctctagttattgcacacagactgacttaattctgagagctccttgaatttgcaagagttactgtgagatgtgccagattgattacgcaacactgtgatttgatgagtttgatagtcgccacatcactttgatttcactgtttcaaatccgttgacggaatctattggttgaaattaggttgaaagatcagtggcttataacgagcaccgaccgagaactcctccaccggacttgccatctatgcttcttgacgggagaattgtttacattggaatgcctgtaagttatgtggattcttatggattttttggttgggactgcatagactgatgatgacatattttgctttcagcttgtgccggcagtgactgagctagttgtcgctgagctaatgtatcttcagtggctggatcccaaggaacccatttacatttacatcaactccacagggaccactcgtgatgatggagagacggtaagtttgaaaactttgtgaatcttttggaccatttctcttgttagttctaatttcagtgaataactcactaaacaggttggaatggaatcagaagggtttgcgatctatgactctttgatgcaacttaaaaacgaggtaatgttaaaatatgagttatcagcttgtgaaatgcaaacatgtaagtaataagttttgctagagattgcacaagctacttgatctgttaccgagataaacactttttcgtctccacggtatttttcatgtgagcatgttggttcttatttgtgcaggtacatacagtatgtgtgggagcagccataggtcaggcctgtctattactttctgcgggaaccaagggtaaacggtttatgatgccacatgccaaaggtatagacttcgactgcattctggccgcttctatggctcaccattgataatcagaacctctcatacgtttgattcattatgtcacagcgatgattcagcaaccacgtgtaccttcttctgggttgatgcctgccagtgatgtcctgattcgggccaaagaggtttgatgaatcgctctacacacttaatattctggaaatttaaatttgatcgagattttctctttctgctttgcttctacctactttcctatattatatctctgataatttggacagaaatttctcacttaagcatttggttcagaatttcatgacctaattaggtgaagaatctgagtttgattacttcatcttcctcattcctgttatgcaattgcaggtcattacaaatagggatatacttgtggaactactatcaaagcatactgggaatgtgagtgcgaaatattttcataactttgtggagaaatttgatagctgattaaaacattcttatatgtcatatagtccgtggagactgaagctaaaataatgagaaggccatattacatggatgcaccaaaag

SEQ ID NO: 28510 - DNA, 1377 bp, Arabidopsis thaliana landsberg
gaagtgtgaacaagcctatatttcatatttgaatgataactaacaagctaaactaacgtttcaagactatttcaatcaatctctttgtgtctaaaaagtgaaaagaactcgactttttcttctcttttaccttaaattctatagatacctcactaaaatacgcaatggaacacattttaaagtaacatattaaaacctgtgaacctaactaacccacttttctgcaacaacaatataaccaaatgcacattgaaatctatgtaacttacacagaacaataaagacttggaaacttacatgtttgcaaggaataccaaacttcttgagtctaagcgtacgagtcacgagcaatttcggaagatcgcctaactcggtttcaagcttaacaatatgagtctcaactcctccaccaatcccactcaaaaactcaggaattccaactttcactacaaaaaaatctcaaagtagcaatcaaaaaccattcacaacatctcaatagttagtcttccctaaatacttgcaaactttgaataacaataacgatcactgaaactgaatctactcagacgagaagaccaatcatgaatctccacacaaatgaaacttgcaacaaccctaaggtaacgaatcagccaatacacgcaagtttagcatccgcatttctccgacgcaaaatctgaacaaataaaaacggtttaccgtgataaggagcggcggatttggagtagaatctatggaagttaagagtcgaagacgctggtgctgtcgtaagaacagatctcgcgctctgtatcagtcgcatccacgccattatcggagcttttcctcgggcgagatagagagagagagagagattttgggtttttgagtttctctgatgtgagttccttactacgacgtcgttttctgaaataagctcatcgattgtttattaaacggctaagcccattacatctttggcccattagcctaaacctttttttatcacgttcccttacaaaaaaaatgtaacaaagatttgtgggtttagggttttgtccttgacactgtagttgagctatgggtatgccgtatgtgtatgtctaaagctcagactattttttttccaatggaagaaaaagtcgtcaaatacgacgagaagaggaagaaatagacgatttggtttcggcaaagattcctttggatctcatgatcgagattccaattagattgcctgctaaatcactgatgaagttcaagtgtgtctctaagctctgagtttctcttatccattctcgatatttaaccaacctttatcttacggtcgcatctccaccacaacaacctcatcgtgtacacatacgtttcgtaaacgagtacctgtgtagttctgtaatg

SEQ ID NO: 28511 - DNA, 1812 bp, Arabidopsis thaliana landsberg
aatgttttatgctacgtctaacttattcacctaatatagtaataaagaactatgttaaacttttgtcatataaatacagtatcggataactttcaaagaaaacatattagtgaaacaattagaaactaattaattaccttctggccggtaaaataccgaccccgggggcgtaagagtttgcagctccagaccgtaaggattcaaccaccgcttcctcagcgtcaacggacgtttggaagcaagggtagacggaggggtcgccgtgacccagaggcaaaatagtctttttgacgtctttgctgcagcagtcgaataacctagcaagtgtacctttcattgagacactagccgcttccttggccgctttgttgcctttgaacctccagacgctgccaccgatgcctccgtggtctgttgtcttgcgttcatcgtattcctctttgtccgtttcaaatgaaggcaggagaaggttcatgtgttgactcattgctccgagtgaacttcttcctcttggtttgttttttcttttgtgtgcttattcttttgtgaaagtggaatcatatatataagcatgaaacataaattagatgttttttttgctttttttgtgtgttcagtttggaatgtgcgctcgatcactcgagttcatagacacaactcagacaagcactaacccatacttaaatgctacccataagccactagcgacaagcacaaacataaattagattatcacttagatatatataagcacagattaatccgtaaaatatacatgattattggtacgtctttatatcttcatgttattgatcaatacgaaatgggtcattcaggcattcacgagaggtgtctaattttatagttgtcttttagttattctttctttttataaagagtcttttaaaattattgttaaaaacaaaaaaaactacaatacctcgtgaatgggcaatttaataagagagaaaaagaggcaagtgggaaccgtagccaacttcaacacaaaaagtcatcctcgaattccaatgagctttgtaacgatgctaaatgcagatgaagaatggccagccctaaaaccaatccttcaaaacacacgtaatctgctcaacattgtgaaggaggtcaaagtaatgtttacatatataccgaggtttaaatgagctttcggatagaaagacaaaggtgtctctttcatttgttaactatgatcctaaattatattctatcccgcctagttaagttaaatcctctgtggattcagaacttttgtaacagatatttgaggtcagtttgaagttgttatttagcctaaacaaaaattaagagaaaacaatgaccattggaacgaagtgtagttcccgtcaaaagattagagaggtaattttaaaaaagggttttttgacgtccacgataaaaacaactagatccgcgcaatggtcggtgaccatttaaggttacgagtaacattgaggttcccacttctaacgtattctgaatgtttttttttctgtataattgatttttttttctcaaagttttaattgtagttttacttacatacagatacagtactaattaaaatactctaaaacttatttaaatccttcataacttaacataaaattcgattttgaaaacccaattttctttaatcgtcttggaaatgggagtttagaataacacatttattcatgttttttttttatacataaaacacaattgttcaagtttgtgatatatggtcttacgcatttccaaaaactaaccatattgtaagaaaagttaagaattttttttcctttttttttt

SEQ ID NO: 28512 - DNA, 1479 bp, Arabidopsis thaliana landsberg
gcgcaacataaacataagaaaactaaacaatctttccaacgaattttcagaatcattatttttgtatggcatgaaaataaacacaatttaacttttgctacttaccgatgggcatatttgtttattatatagaatattgcttcgaataatttggatacatgataaaaatttgattagaaagaagggacattgtggtaaaatacgaaggaagaaaagacctttgactagtagtatctccgacgcggagagcacttctgtcgacaaaactaaagatccgaaccgtccattattcactaccgattcatatcttccaaaggtgccacgagacgacccacgtgtatggccacgtttttgccatcatggaatcaccataaaaggaaaaataaaaaatacttttttagtttattttctttcattattatgaaaagaaaacaataaagaaaaggcccacaagcccgacaactgcttcgaatccaacggctgggataaacaaatgatccaacggtataaactaagccacgccagtagatagttattggcatttagaggctaaagggccaacgaggctttttttttttgcgttggcgtaaaagagcttctatccacgaagtggtccctacattacaaaatgcgactcacatggatgtatctacgtgtcggttatccattgggtgatgtagtaaatattgtctgggctctctatttttgtttatttttattttgtgtactgtagaaagaaatcagagagcataatactagtactagtattattcaacttaggttttcggtgacgtaagcaaaggtacagaccacatcagctttgaatctagaccgttgatctcggtttctcgattagaaaaaaatcgacggttaagctgcaataaaaacgtgtgttttatataacttcgaatcatctgacgtggccatcaatattttgtagtggaaaaaaaatgtggggtcgataagtcagaaaaggagattaatcatccaacggctcaaacgtgtccccgacaaaatgacgtgtccgtctggtaagcggatagtcttacttacgcatttatgtgggccccatgtgacgaggactcaattcctctatcctcatttcctaaattatccttgtcacttcattctatttcctcgatgtaccattgctatagccgcattgtttgaactttgaatataaaagcctaatgttcacactataggcaatttagcttcatcattacgcatcgtagtaggccttgagcccatattttaagactaacctcaaaagctaggcccaaattctatcttggactatttataaagacccatatagaaaagtaaaaaaatccaatcaaagaatttacagaatgaggtactctttaagccatacttttgctccttaggcaattattgtacaaaggacactcgtggttagagctgctacataacgagattatcaacttaaatgtgacgacatagagagagagagagaga

SEQ ID NO: 28513 - DNA, 1551 bp, Arabidopsis thaliana landsberg
accagaatttcatcggtcaaagtctgacattcttcaacacccgaacctagaaaacatctataaatacctcatttggttcattcccatatttcacctgcaaacattctgaatacaacaacccatattgcacctaaatcacttcctcatatacaattcttcacaacagtaaaaaatccacacatatttttttgttcttatatacaaatttggagagattgggatggagttttttgagatgtctcgagtttggtacatattcttcaaagttttcgtcgtagttatttgcctcatgttcttgaagctctttctgcgttgttggatatggccagttcgagctcaaaagaagcttagaggaaacggatttgttggtccagctcctagttttccatttggaaaccttaatgacatgaagaaactgaaaatggcctcggttgtggtggataatagcaaatcttccaccatcatcaatcatgacatacactctattgcacttccacatttcgctcggtggcaacaagaatacggtaactaataaatctatatcctcttatttaaattccggacaattagaccatataagttgtttagctaacaacatttggattaccatatctaaatattaacgtagattattggttacgtgttatgtgatgcagggaaagtatttgtgtactggctagggatagagccgttcgtgtacgtggccgatcctgaattcttgagtgttatgtcgaaaggtgtattggggaagagttggggaaaaccaaatgtttttaagaaagacagagagccaatgtttggtaccggtttggttatggtcgaaggagatgattggacacgacatcgccacatcatcactcctgcatttgcccctcttaatcttaaggtatagatatgtacttacaatagttaaacttttttaaaaaaaatcgtttgcattggcaagagtccaagttgtagaaaattaatagggtgactaatctagttcaacaatttagactatatagtccttttccaaaagcatgagccaccatttttcatgacataaatttcaaggtcttatgatgttgaaaagactagaaagtactatattagactcattcaaaatcaaagattcatacgaaatattcctctttttctcattacttttaattattcgtcttaaaaacaggttatgacaaatatgatggtggaatcagtctccaatatgttggaccgatggggcatacaaataaactcgggtaatcccgaattcgacatggagagcgagatcataggaacagccggtgagattatcgccaagacaagcttcggtgtcacgggagaaaatggaactcaagtcctcaaaaacctaagagccgtgcaattcgctctcttcaactcaaatcgctacgtaggcgtgccattcagcaacattttgagttacaagcaaaccgttaaagcgaaggggctaggtcatgagatagatgggtctcttttgtcgttcataaacaaacggaagatattctttgctgaaggagatgacccaggccacgattttttggaatgttg

SEQ ID NO: 28514 - DNA, 1940 bp, Arabidopsis thaliana landsberg
  unsure (1)..(1940): unsure at all n locations
ttggacagtttacttcctcttacatttccaaccagtcaaatccctttgaccttttcgagacattctttggtgcaagtatgggtggatttcccgggatggaccaagctgattttgggagaacccgccgcagtagggttaccaaaggtgaagatttacggtgagtttctattaggaaacaaagcatttattgacttaccgccaaaggatttcctctctattctctggtagcataacaacattcactgtttgctgataagataccattcaatcattaccttaaaaatattgttagtgtctcctaacttaccatgtgtcctgaaattttctactaccatgggcttgaatcagcaagcaaggaggtttgtgtctgtatgtccactcgcttgctttttcttttggagtttttccttgctcttcatgttctgcataagctttgagaaaaaccaaaagtgattaatttgcatttttgtttctattgcgttttaggtatgacatcaccttataactttcggaggctatttttggatctgagaaagaatttgatcttacgcatctggagacatgtgaagcttgtgctggcaccggggcaaaagcaggatccaagatgagaatatgctccacttgtggtgggcggggtcaagttatgagaactgagcaaacaccatttggcatgttttcacaggtccgtgcagttgatttctttccgttctgtctgctttatctctgttgcagttaattcgagtcgatgtcagaaatggcatctgattggagcatcagagttgatgtcaatgtgtagtttactcaaactaatctgtttgtggttagtagtaagtgcnnnnnnnnnnnnnnnnnnnnnntttggttgaatccagtttgtggttttattgtttgtgaaagtttgtttttgctggtaacactacctccttataaatttcctatgtgtgtggtctcgttaggtttctatatgtccaaactgtggtggagatggtgaggtgatttctgaaaattgccggaaatgttctggagaagggcgtgtgcgtataaaaaaaagcatcaaagtcaaaattcccccgggagttagtgcaggtagcatccttagagtcgccggagaaggtgattctggtcccagagggtatgttgagaaaattaccgattgataaattaccagtagaaaaccattccttctgttatatgatcttaatggttctgatttttggtaatcgactttctgcttccactagtggccctccaggagatttgtatgtatatcttgatgttgaagatgtccggggaattgaaagagatggcataaacctattatctaccctttcgatcagttaccttgatgctatactgggtgctgttgttaaggtgatttagttctttgtattggatgtataagcagtacactctacttacgtgttgatagtctcacaatttaccattcatcttatgattaatctaaaacatcgttgtaggtgaaaacagttgaaggagacactgaactgcagatacctccaggtacacaacctggtgatgtgctagtcctggcaaagaaaggagtaccgaaactgaatagaccgtctatccgcggtgaccacttgtttacagtcaaagtttctgtaccaaatcaaataaggtattaccgtttgaactgtcttgtggcttatttaacgaatccaaacaaaattttgtgagtctgtcgataccttctttcaattcgttttctggacctacggacagtgctggagaacgggagttgctggaggaacttgcatctctgaaggacacgtccagcaacggctcacgaactcgtgctaagcctcagcaacccagtagtaagttgtcaaatctctaataaagagggctctttgattgtatgccaatattaatggaacctcttgtatcttctgtgcatcggcatcgatgtgagactattt

SEQ ID NO: 28515 - DNA, 1427 bp, Arabidopsis thaliana landsberg
  unsure (1)..(1427): unsure at all n locations
ttacattggcctgtatctgcgagcatgtcaatctatcaaacaccattttgtttcttgtgcacgcatctgtcatctggagaaaaggatacagatcaagagaaaagaaacgatgatgtacgtgaaatccacagaagaacgcagtttcttcctcattctttaaatgccaatgagcttccaagaagcatctgtaatcatgagtacgttttatttctcagttgatccattcaactacatctcttaatttttttaacataacaagataaccttgtgtagaagaataatctggctgggagatctgaactatcggattaacttgtcgtatgagaagacacatgaacttattgcaagaaaggaatggcaaaggttggtagagtacgaccaggtacctttactgcagcattgttttggtttaatactaaattgtgaagttctaatgtttatgttttttaagttacatatgaatctatcaagattgaaattagatgtttattctctgatagctttcaagagaaatgacaaaagggaacctattcgagggatggtcagagggaactttagattttgcaccaacatataaatacgaaatcgattcagaaaattacatcggagatgacccggaatccgggaaacgtagaccggcctggtattgtcttcatacactgtgatacaacatttttacttgatatgataaaaaggcaaaaacgatgagtttggagtgactatgattgatcaggtgtgaccgcatcatttggaacggaaagggaatgaagctcttcaattacagaagaaacgagattaaactatcggatcaccggcctgtcacagccacgttcttggccgaggttgaggttttgtctccacggaaacttcaacatgcgcttacacttacatatgctgagattcaaggccttgacgcctaaacaaccacttccgtcagatcccatttgtgtatagtaatttaacgatttgtatgcccttcatgtataatagtgttcacgtacacagaaatattgtagatagaaatactgagtgaaaacaaagaccgtatctttgatgatataaacattggcaattgagttgagatgtaaactatagtgttagtgtatgcacaaatataagaattagctcagacttacataaaagttaattaatgggctttgttatactccaataatgggctcaataaagcccaaacaacctgccactcacttcacttcccagttcccactgactttgatcactgatttttttttcctgtctcattttccattttcccccaaaataaaaaaatatcacaaatcccatgaaaaatcacagagcttagaactctccacactctcaaactccgacgacttgactttaagatcatccctgaggagatncgtacttagcaatgggaggaaaatcagagccagcgaaatcggaat

SEQ ID NO: 28516 - DNA, 1323 bp, Arabidopsis thaliana landsberg
cctgaaagcacaacgaggtctttcttgtcgaggcctttggactggaattgagtgataaggctactgatattattaaatggtgatggtaagtttaataaggcctcagtgatgtttgtaaccagaccgtctcttcgtcccgtttcaacctcccacgacggtccattgagctgaacatatattgattggttatcataaaatacatgatgttaaaagttcaacacaacatataatacataattttttttatggatatattttctttaatatattagtcagaaaatctcagatagaaagctgaactagtctcttgaaaatttaagtcaagtgcattttgtagcatcaaaaaaatagaagaatacgcccaaccctatttatgatgtctataatcgccatgtgaactttgtagtaataaatacaaggagcgtgtaataaagacaccgtgagctctgaccaaatattagatcacatgatagtaagaatttatacttactgcaaccattgcgtctctagcgacaagtgccaagatatcagagcaagaaacaattcccggacacactttttctagagccgccttggaatcggctatgatgccaaaccctcgaagacttaggttaggaactgcactcttctcaccttgattgtttggtttatctaacaaaactgatccgtcacatccctgttaatcatacacgattcactcatattattaagaacgtgacatcatgaaatatattaaaatcattatccatttcacttattacagaaacatacccgaacgaagcagtcgtggaagaacattctaagcaaaggagcaccaagtgttggtgctttgttcatcgcatcgaacacgacctttttaactataccctcgagttgtgggcatgttttgctgtagaaacctactttcaaaccttgcgaattggcttgagcaaacaacaaaactaagaacaagcaagagacaactagtcgcttagaagctgccattttcttaaaaaatctttagtttgttgctcttagcttttgttttttgctcgattgataatgaattgttgatgaaggttgaagctattttatactcaattatgtaagtagtttaaactaacttgcaatattataagagtttgtggttagaagattgagattaattaacatcaaaatgtagttgactatcattggtctgcggtggaatgcttgttgtatttttgttgtaattaagaccaatcattgtttgtagaaataagaagaggcaaattgatacagtcgtactatatatatgtgtatataatatttgtgtcgatgttgtcttatgcatagtgtatattg

SEQ ID NO: 28517 - DNA, 1761 bp, Arabidopsis thaliana landsberg
cagacatcgggtaactattcttacgaaactcatttctttatccgaatcgctacattgctcttgtgagtgagtgagttcatggctcatgaggtatcattgacagagtaaatgtactgttgttttgaaagttttagtgtagttcaattttggaaagatttgggcatcgactatttgtttgcatttgtgtttacttatatgcatactgtgtggcgacattagaattgattagtggtgtgtatacttagcaaaatggtctgttctctacttagtgttttggtgtcaagatctcttaaacgaatttgtataattttaacttgatagggagggttaatcagagaaaaactatgggacttgctggtcaatgagcctggcgttgtcatggaagaaggttttcctaatgcaacaggaagggaacagtcgatgagaggaatgagaaactcagaggtctgcttacatccagctggtgacactcccacttcatgccgtctctttgatgccattcaaagtctatgcatccctgtgattgtcagcgacaccatagagctcccgtttgagggaataatcgattactcagaattctcggtttttgcctctgtaagtgatgcattaacacctaaatggttggctaatcatctcggaaggttctctgaaagagagaaggaaacattgagaagtagaatagcaaaggttcagtcagtttttgtgtatgataatggtcatgccgatgggattggacctattgaacccaatggtgcggtgaatcacatatggaagaaggttcagcagaaggtgccaatggtgaaggaggcagtgattagggagaggagaaaaccagcaggtgcttccgttccacttcgatgtcaatgtatctaaataatgcaaccaatccaaaagatagaaagtgttccttttactttgttggtcttttcttttgtacttgtttcgtttacgaacattgttatggccactttaaaatccatgttccttagggttcacagaaaatattgaatcatgtaagaggtttcattatcaatccatagtgccaactcgagtatgtgaccacgttttgatgcatgacttaccggttcatgtggttggacctaatggtcgggttagtgatttgtcgatgaattcgattaaactccctaaaatacggctagattcatatttctgcataacttgggtcgaatgatcgctaagggattgaaagttgtagcggttaggctagtgacttggggttaccaaacactaaatgttttgacaaacaaatgtaacaataaacacttttttgatttcttctttcttatacaaaaacaatactttcacatgtaccaactgacactttgttttttttagtacagactttcacttgcctgaatctgcctttcaatgaaatggagaaaagacagacacaagagacaatccaatcacttaaatccaccccagaaacttgctaaaaaactgcacaatgatggggtagataaaaactggagttgtctctatatacaagtgaagtaaaaaatcaaatgaaagaatcatatgagagagatatttttttttttttaatcaatttttttaaaaattttgaccgattattatcaaataacttctactttcaagctataatcatatgctttttgcccttacgagtgtccttggtcgcaccactggtcagggacgcacaagaaatgcgttttcatgaatttcctgaaccttgtcttgtaaacaaacgggctgatcactgtcggctgcacattcttt

SEQ ID NO: 28518 - DNA, 1493 bp, Arabidopsis thaliana landsberg
ttgactgggtagggaatctgagcagtctcagggtgtttacagcttatgagaatgatttggtgggtgagataccgaatgggttaggtttggtttctgagttggaattgttgaatcttcactcaaaccaacttgaggggaagattccaaaagggatttttgagaaagggaagcttaaagttttggtcttgacacagaatagattgaccggtgaactccctgaagcagtaggaatctgcagcggcctctcgagcattagaattgggaataacgagcttgtgggagtcattccgaggacaatcgggaacattagtggacttacttactttgaagcagacaagaacaatctttcaggtgagattgttgcagagttctccaagtgttctaatctcactctgctgaatctggcagctaatgggttcgctggaaccattccaacagagcttggtcagctcattaatcttcaagaactgattctctcaggtaatagtctctttggggagatccctaagtcgtttcttggaagtggaaacctaaacaagcttgatttgagtaacaacagacttaacggaaccatcccaaaggaactctgcagcatgccaaggctacagtatttacttcttgatcaaaattccataagaggagacatacctcatgagattggaaactgtgtgaagctacttcagctccaactgggtcgaaattacttgacgggaaccattcctcctgagattggtcgcatgaggaatttgcagatagcactcaacttaagtttcaaccatcttcatggatcattgcctcccgagttaggaaaactcgacaagctcgtgtcattggatgtctctaacaatttgctcacaggatccataccgccactactaaaaggtatgatgagtttgatcgaggttaatttctcaaacaaccttttgaatggtccagtgccagtctttgttccctttcaaaagtctccaaattcgagctttttgggaaacaaagagctttgtggagcaccattgagctcttcttgtggatattctgaagatcttgaccatttgagatataatcacagagtctcctacagaattgtgctcgcagtgattggttctggtgtagctgtctttgtatcagtcactgtggttgttcttctcttcatgatgagggagaaacaagagaaagcagcggctaaaaatgttgatgttgaagaaaatgttgaggatgagcaaccagcaattatcgcgggaaatgtcttccttgaaaatcttaaacaaggaattgatcttgatgcagttgtgaaagcaactatgaaggagtcaaataaactcagtacgggaactttcagttcagtttataaagccgttatgccttcggggatgattgtttcggtgaagaaactcaagtctatggatagagccatatctcatcatcagaacaagatgatcagagaactcgaaagactcagcaactttgccatgaccatttgttagaccgataggttg

SEQ ID NO: 28519 - DNA, 2109 bp, Arabidopsis thaliana landsberg
gggttggggttagacctacccacaaatggttaatcagcttttcttggtattttgtgcagctgtgcatactctatgcccttttctacactgtcagttgtgcaacagtcatgttgcagtgcaagaataggttatcatgtgttgttaatgagctctgtttctcgatttttatggtatggcggaaatgttgtagggtttcctgagcctgcagcaggacaatactaatatactggatttaaatgtggtccagggaacactaagatttgcagatttggagtttgggcaatagtaactaatgtaattctgcttcaataataacacatctgttatgccattattaagtattgttaatgcagatcttgattatgtagtaactgattgtacagggaacgggaatccagagaaaaaaagtgaattaagataagtaaaacggatatcatcaacttctatcaaaacgttacgtagcacctctagtaaaaacgaatttgagattaactgattataaaaaatgtaaacgagaatgaatacatataactttgatttaaatataatacatctatcagttagtttgagcatacaatactttcaaagataaaagtttgacatattactgaagataatcaccggttttgattaggtgctccaacagataacctcgaggcgcatgtgacctggattcccatccattgtctttcgtacaaccgctctataattagtctctctataattaggctcatcgtctatcactggttcacaggcacagtgaaaacttatgtagaagattgcattagccgccttgagcttctcactcggctctgtttcagcttctcctcgagtttcgacaacaaccttttgaatcgtcaatggtaggcatcccgcaatatctattgcctcaaactgttgacactatttcttgtaaaatgcaaactcagcgaagagatgcaggttagggtccatcaacaactctgaattttccacctgagggatccacaaccaacagtcattaacaagacatgacttggtaaacatatactcttttagttaagaactagatgcagcagagagttaattaccacatagcaatgttgcacatcctcatcagaaaaccatttgggcatttcaccttggtaccgatcatctattaatgcctcattgtcccactcatgatccgcctctcgggtctctttttgccaaaatataaaaaaatgaagtcaaaagtctaattataaaccctaggaatggaatagagtaattgctctgttttacctatcacatcgcaaaaagcatatctcccacgttgattgcacagtgtttgcaagcttgtcatgcttaacccacgtccttagaacgtatagagaataatcgtcggctggatcctcagcctccattgtaaagaaaatcttggaaccatactcggaatataaactcattctcacacgctcaaacgtgaagtttttaccctaatacgagataataatatagaatgataaagtgtcctagagaacaggggtagaataaaaatatattataaaaaaatcttctgaaaattgtaacaataaagtccaagtctgccgaggaggcaaatgtcataaaaatcatccgacattccctgaaaaaaatcagaaacctatgctcattaacaaaaaaaatcattgggagatagtaagaaataaagatggacaaaagatatttacttccgaatcagatgacgcggcacggattatcttatcatcccaggtagacatgccacgctgacgcctgtcagcttcctcctcacgatgctttcgcacctacatcaaaatcaaaaccgaatttgaacaagtagctaaaccatgaggatcaaatccaattataaatgtaaaacatacgaagaaaaaatcagaaaggagataaaaaaatgtttcaccatctctgtgaattcgagataccatggatcatcgcgatatcctccaccagcctgcggcggcgattcatccccaatttcctcgtcgtcaacgatttccttcgacaccacattcgaacataaatgtaaaacatacggagaaaaaaattatcagaaagggagattaaaaaaaaatgttttaccatctctgtgaattggagatactcagg

SEQ ID NO: 28520 - DNA, 2016 bp, Arabidopsis thaliana landsberg
  unsure (1)..(2016): unsure at all n locations
taagatattaaattccaggagcaagcaacgataagaacctaaattgccattttttctccttaagaatttctccatatctgcaacccagtcaaaccattttcccacatattcttttcgtctactagatccagaagctgtacgttgcagggacggaaaacgatacaaaatatttccctaagcaacatgaaaaaattgttaataaaaatggccaatgaaaaccctgcagatcatgcacatttgggcatcacatttcaagacaccagaaagaggatttgtatacctcttcatccaactcaggttgaccatcaaaccgaagaagaacaggtagaatgtaggattcatcgttctgtaaacatcaaaaaagaaaacttgtgaagctgaacggtatgtctttcacattatttagtgatacaactagcgcaagaggtaaaggagtacaaaggacaaatacaaagatagatagcagcatannnnnnnnnnnnnnnnnnnnnnnntttgcaagaaacaataagcaaaacataccatagcactctttgaagatggcacatcaaggtatggagcaagttcatcagcggcaacaacacctcctctagatgttatatactgcccaatctgagaataagtatcaaaaacgagtaaattactaatatttcattatatgagcgtgatgtacctttaaactcataacctttaaaagaagatttaaaaaagcattttactacatttccttttgatatgtcgaaagtagtcttttattgaaaaataaaataaaacattatcgaatagtaacctgaaacggatatagaaaacataagtaaattcaagtccagcacattaccatctgccatctctcttcttcgattccttgatttgggtctccatctccaaatacaaacgagaaaacctagagatgaaccctcacttatttcaagccattatcactcataagcagcaaaagaagaaacatttagcaaagcatgaaaactctcttaagttcaaactctacttacagattcaatgaaattcattccctttccttcatcttctcgagctcgtcgcctgttgtaataattgggatcccagtaccttacataaaaacactagaatatgactacgaggttctgttaaatcaattactgatcctctctattggttgagagtaggagcctttgacatcatgaaattaaaattaccaaagcagatcgacagggttgatatagatattgaatcatgaatcataagtgcgcccgtgttttctttgtcgattatcatcctcgcttttagcaaaatccaaaaaaggttagtgcaaaatccgaatcaagttcattgatcagaatgataatatctgttgataacaagcagacttaattgcggtcaaggcaaacacataccttttgcttgaaagcagggctataattgacgtgtagacaataacgatagacgctataagcgccgtgccaaaggaaacacgagccagatgatctacagcaccctgcgagacacataatagagctcagaacattcaaattcagagcaattcactgttaaaaggaaatcaataaattttaacagaaaaaaaatactacctttgccttttcaagaaatggttcaatttgtatccttaacgacttggcagccaacttagttcgatagtcccttgggaaaacataaagcacatcaccttcatccgacacctgaatgaagaaaacatttcattgattttagcaacttcacacatctaaaacgaaacatgaatcgcgtaaagatcaatactttctatcaaaatctcctcaaatcaatacactattctcatgacagctattcaaatttctaatgtattgttactttcctacttaataaagatcaatactttatatcagactctcctcaaagcatctcaatttgagttaatgggcatgaaattgaactagcgaatacctccaaaaacccatcagtatcagccgctatagcttgaagagctgtctagcttcagtaaccttcaagccaccgctactc

SEQ ID NO: 28521 - DNA, 1937 bp, Arabidopsis thaliana landsberg
tttaatgcaattatttatatatcgattcatatatagattcccatcctatatacaaaatgttttaaactttgagactcgagctgatgtcagaaagaatattcatataagagaaatcgaaaattaagtattaaaggtcaaactatattgatgaacgaacgaacctgttcaacacgaaagacatgtcttctctaagaaatgatcttgatccgattgatacagccaagttctaaccaatgaaacatccccgaataaaaaaacacaaagtaccgacgaagaaataaaacaaagtgtacgcatacgtaatcaccacaactgttatagtaataataataataatcttatacgaattaattatgattaggggcaacaaagaggaggtcagaataacaccaatcacacgattaaataagaacatttaaccatcaggctccaaaccgaaacttagaaacttgttttttttttttgtttccttctttgatctttctttcagaagaaaagattgatttaaatttgagaaaccaagcgactgtttgtttactttctttattattacagatttacaggtacagacaaagttgtatgtaagtgtgattagaacagtggatgctcttatcacgggtccacttgctctctaaaaagaatattgaagctcataattacatctttagagactaaaacaatcttaatcattcaccttcaccaagtacttgtgtccagaagaaaaagaaggaaaaaaagaacacaccattcaagaaagagagaagcttcttgtgataagaaatttcacaggttttgtttttgttttgtttatatatattctcagatttgattttgcttaccattatatgtatgaagaaatagagagaccaattactttttacattagacagagtaaaatccagtctgtgcatcttctcaatgttttttttttgtttgttggtgctttctctaagtgttcttgggtataggtcccaaagtgaagctttttctgtttctttgtgcaaacaaatcttgataaagttagtaacttttggtgaaaatcttaccctttcatggacaatcagatttgatttcgtttccatgtccataggtgagaattttgtaattgaaattgatggcactctactttgattgatggataccttcttaagtcaactcttcattgaaagcgaagctacttatatagattatatagcatctctatgatatgattcttctcttgtcttattcttgggtgggtctttgacaatgtttctgcaactttttcagattgggttttaacattccaaggagaggactttgtcttgtctctattcatcttcaagacccttatgagtttcggttcttgagtaaacaacagctaagcacagtctctgagaactagaagattaggtagtatctgtaggaggtataaaaacgaatctttagacatggaagatgatggtggtagagatggatgcgaatgatatggtgggttttcaccaaactctaactttggtgtattctctgactccgctatggatatggatttcatggatgaactcttgtttgatggatgttggcttgagacaactgatggtaagagcttgaagcagaccatgggacaacaagtatccgattctactaccatgaatgacaacaacaacaactcgtacctttacggttatcaatatgctgagaacctttcacaagatcatatctccaacgaagaaacagggagaaagtttcctccaataccaccgggctttctcaagatcgaggatctctccaatcaagtaccttttgaccagtctgcagttatgagttctgcacaagcagagaagtttctccttgaagaatctgagggaggaagaagatatttgattgctccaagaacaagccaacgtccttctttatcagtgaaagagagattagtacaagctatagagggtcttaac

SEQ ID NO: 28522 - DNA, 942 bp, Arabidopsis thaliana landsberg
  unsure (1)..(942): unsure at all n locations
gaatctcgcaacggcgttagcagcggagagaaattacctaacggaggaaacggaagcatcagggagtttaacgccgttaaaagtgtcgttaatgagattgctcgaagaaacggcggagagagtcgtcgttgaagagaatgaaacggagagagtaacggcgtcggcgtcgtcgacggttagaggagttaataatgattcggtgtgttgcgtgtgcatgggaaggaagaaaggagcagcgtttatcccatgtggacatactttttgcagagtgtgttctcgagaggtgtggcttaatcgaggatcgtgtcctctttgtaaccgtccgatcatcgagatcctcgacatttattgaaaaacgatcggacggctaaatgtcctcgatccacgtgagtaagggaagtgatgatccctagatacgtttccaaatttttaactacggtttgtgtactttgtacgtttcttttggttattgaagaagatgatgtaaatgcaaaaaagaatacaagaggttttttgttcacgaggcccatttagtctattcaagcccagtaaacgtttattttggattttatctagcctaaacaatgctcgcctcacaccgtcgagtggattcttggccgttgatcttgtctctcacgtggcagtatcgtagtcgaatgtacatgatctatgtggaatagtcgatattatccctcttggtgtgagtttggtagttgatgaaagcaaaacatttacgtaacaatgtctataaaatcagtacaggtctattcttgttcactagcttcgaaattttagtcgaagaaacaaaaaaaaatggcgacggttcaattgtccacccaatttcgctgccaaaccagagtttcaatctcaccgaactctaaatctatctccatgcctncgtttctggtaccagtgacctcaattattcaccgcccgatgatc

SEQ ID NO: 28523 - DNA, 1648 bp, Arabidopsis thaliana landsberg
agtgaatggaagagactatagatgtcctagggagggaacaaaaagaacccaccacccatgtgcgaatctcgtcttcttctttctactcgttaagtacccaatggaccttcctcgttgatgtgactctcatatatagcttctttccgatttcacccttttttctatctattccctcctctcttttttccatgtacacatttaaactacaaaaattgatgggaacatgaaaatggattatacaaagagcaacccaaatatttttctttctttagttagtttgatcaatggcaagaaaacaaaattatataggtgaataataatttgttaactaaaaatttggaacgaaatttcgagcgtgcgtctttattaattaccagctaaactattttatataatatttttgataaatactacaataataattaacaagttaataatgatgtaaaagtctatgatgcatgctcatatagtgaaacaaaaatatttaataaaattacatgtcccacctaatcaaattattagaaaaataagtcttaatttttcttaattttcatcatatgtattgtcgcataatacaaatactattatctaattcatgatttttttaatgaaaaacgttccaaatatattataaatacatgcaaaggctatttatattggatggtatgggtttggctcaagaaagagaaaacagaaggcaacattaaatacttttcgtgattacatctcattgcttgtgtacaaaatttcactatcatccattttgttttaggcttttaaaagaaatcccataaaatcccattattcttcttcttttattttttcttatcatccacactattccacccaacctttttcttagataactcaaatatttatggccaatcaattaatttcctttcttttattctaactttctaagtatagtaaccccccataagaattgaatacccccacccaaaccacttttacataaccgaaattaaacaaacacccttaatcaaaagtataaaaatacataataaatatcaaacaaccattatacacaaatacagaaaattgaagcaatttccataaaagagtagaatataacctctctatcatttcagaagtttttttccatttaatatcaaaatttggtttgtaacaaaatgatgtttacttttcagaaaaataaaaataataaaccataacatacacacatttatagggacatttatatataaattacaattgagagttctacaagaagcattacaagcacaactattactgcttcttttactataaataagctgaaaccagaagtactcttcacatctgcttcatagctctccttctactttaaacaaacttctaattttaccccaaacacatcagtaaaaaaacacaaacccatcagaggtaagaaaatttggaattttagtggtctcttaaaaaacataaaatatatatattaaaatttctcaaattactaatgccttcggctggaaattttaatagtaataatgaaaatactaatattgatagatgagtttccgataatgccctcagactctgaagttctttcccatgaaagtctgaccaaacttccaattcgccggagcaatgttccacgacgtcgagcttctacggtcactgcttgtga

SEQ ID NO: 28524 - DNA, 1493 bp, Arabidopsis thaliana landsberg
cagaatcaatattctcacatctcgtttaatcaataagcacaatgcttcacctgtccgaacaggccttatcggtcacacacaatctagcattcgcaaatcaagactgattttttctttttctttcaggaaatcagaagaaccaagaatcagaacctgaaggaatgcgatgaaagcaagagcggcatcgataaaagccaaacagagattgacggcgatgaagctaggagcatagcatttatccttggttgattcgaaaagagtcgctaagatcttcatcgtgaatccgctcttttcttctcgatcctcccaagagatcgaatgcctagattttaggtttgtaagagagagaggatcaaagaacaccaccgagacagatggttgtaggagatgggttgggtctggtctgagagacaaaaataaaaattattttttatatttatatatttcctggacaacacaatatactatctattaaatttaattgctacaagtggtacggcacactagaatatacaacaattactgccataaattaattaattaattactcttggcttaaaagaattattaagtaatcaatatctcttttaactaaaattaattattaattattgttagaagatgtaaaatgagggttttttgtaaaaatcagaactaaacgagttatttttgcaaaacagagacacctcttttctgcaactctcttctccgaccatgctcaggtacataatccgatttcttttgtatagtttgtgttctgcaatagactcaagcttctttagtttccaatttctctagattttctgcatttctttcaaattggatcaacaaagacgatgatttgacaactcctttgccttaaaaccttaccaaagtgagtcctaaactcacaaacaattcagggattactaatcaaactttgacaattccagtgactacaaatttacttgtcattgatggtagactatagagtttgagaaaatgcatgtagcaagcaaaattaaatcactttgtattcagaaatgaatttgaataagtacattagtttggtatgatctttgttctacagcaaatacattacatgtttgaaggaatatcctaaagaatgaaaaaatctaaagggaaaaaaatgaatctgttcttattgtgtgttcagttgctttgatggacttaaaaatcgacaagaaagattatatgtccgcacactttgtgggtgtgaaccctagcctagacctctttgtatcatagagtatatggaaattctgttgctggtagtttccgatgatcgagaaggtagattttggagttcctagaattgccaagcaaaccaaatcctcgctcaaccaaatgaaggagttctcagcagggaaattccaaactgtgccgtctacaaatgcaatcccgagctcaggtaggtggatgttgttctcctctatgccagatacattgaagcaaggatcaaggaccgggaaatctctaaatattgggtagtt

SEQ ID NO: 28525 - DNA, 1759 bp, Arabidopsis thaliana landsberg
  unsure (1)..(1759): unsure at all n locations
aaagccatacacgtaagattgatcatggctggcttaagctttttcgttttagctcactgacttacatgaagcgggggtagtgataggtgtcaacttgtaacattatagtcttccctttagaatcatctcttctacaagacgtttcagtattcttattcttcttactctgcatcgtcctattaggtttccatagagtttgggtttcataatcaggttctgttcacatttttaagttgtctgacaaatttattcaacatggtcatgaaatctaaatgcctattttctttatatatatatttgatggctttgttagaccatctgttttattactagcataattactccttaattcttgtcaagtttttgaccgatatctaagcatacacaacagaaggacctctcacaatgtatgatccattcgaccaaaccatagaaactggaaggtcattgtcagagattgtaatggtgagaccttgaatttcatcagtttagaaaccaaagacatttcagtggcccatattatatgcccatacggcccagcccattaagaaacaattggagcaatcggagaaaaaagagccagagataagctaaaannnnnnnnnnnnnnnnnnnnnnnnnnnnnnnnnnnntgacttcttcggcggcgatcagatctgacatctacgacagagaagaacgcaagcagttaatcttccttctttcgattcttcttcttcttcattctcttgttcactgtgttcgaattctgtcttctttctcttgattgctcagtcgtgtgtgcaggcaataccaagcacatattcgtggcctgaatgcttacgagcggcataagaagttcttgaaagactacggtactacacgtctttcaatctccttgtaaatgtctttggatttgttagctcgataattaggttttaataatggacaaaaagtttgggaaatagggtaaataagtggctttctatttatccaaaatccatattgtcccaaatcaaaactggttgatgaacagtcttctcctctgagctaggaaggaggctacagtcagccttacatgtcttattttgttggtttccattagaaagagtattcttttaccctggagttagctactatttgaggagctgttggtgttcttgtttaagattttgtagtttcattctttgttttgcaactttacagttcgattttatgggaaggataagcctgcagaagttaagttaccggttaaaactgatcaggacacactacgagaaggatacaggtatggtgcaattgtcaatatgtttttgtgttttggaaagtttgaagttttaagatgcatgctttgttgatgaatttacaagtcttattgttgaatcttactttgaattcgccctattactacatcgcctttgtatgtttttacttaattttgggcttgtcttgcaaggtttatacgttctgaagaagatgatttggatccttcttgggagcaaagactggtgaaacgatactatgataagctttttaaagagtatccttcaaaacatagtgctgcttcagatacactaacatccgttagattactttaagttatgggattgtggataagtgcatgtctgttctccttgactgtttgaagatactgtatagctgacatgtcaaggtacaagactggtaaggtaaagtctagagtgtgagtaccacatctcattttagattcctgtaatcttttgttcagttgacttattttgaatttttttgtagatgggtt

SEQ ID NO: 28526 - DNA, 1491 bp, Arabidopsis thaliana landsberg
ttatatataatctttgaaggaaattttttaaaaaatggaaattatctaaatataccgcatatcaattcatttatataactttttgtcaatacatttatttcgaatacgacaaacacaaaaatttgcatttttaaagtctcaaatacccaaaaaacccatatatagattcatataataatctttaaaaaggaaaaaaaaaaaaagaagataaatagtaaaatttagaaatcatctaaatatattgcatatcaattaatttatatatctttatttttatgtaaatatatattcatttattgcgaatatgacaaacataaaagataactaataaaatttggaaatcatctaaatatgttgtatatcagttaatttaaataaatatattttgatatgtacatattcatttatatcgacaaatagaaaagattttgtatctattaaaaagcgcaaaacccctaaacgtcatagattcatataacaatattcattaataaatatatattaaaaaaattactaacaaaatttttagaaattatctaattatatctcatatcaattaattttggtcgtatgttagttgtagtaaatgtttactttctgcaatcaactattttagatatgtatataaaattggactttctaaacagtatatatataaacacatattggctaaatagtaatgagagattacggtgggcaacgttgaatagttcagttctaaagaattactaaaacttgcaaactcttcgataaatctatttataagtatcttgaaaataaatctcttcctcatctgctctcttgcattgttataagatggatctctcactctccggtggtgattttaggtttgctttcaacaacgttaatttttctgatcgtcttcttcggatcgagatcacccaaagcagcggtgagggtgaggttatctgttctagtatcgtcgattgggctagagatcgcaaacgcagaagagaagatgtcactaatcataccaatggttatttttttttgtgtactttgatatttttgcctaacattaaaagtatatatctataaagtatgaaatgtttattatttttcagatgctacatgtcacgtggagtctgatttaaacaaaaattcgtgtgagatagttaatgagaacagcaacaacaaaacacaagtattggtaactgcggctgaacaagaaccaaaatcaggtaatttatattttatctttgcatgtgactgtttagttccttttttttatgtgagatgattcaatggtgtttgtaatttgcaggtggtgaagatgagaatgagaggctcactaataataatacttcagttctaagtgttcaagagttacatataagctctgcaattttggcagccaaaagtccatttttctacaaggtatataacttactcattgatttgatacaatattaattaagcaaaccatattatatcaattatttgtactatgcaattgagacaggtgagtgt

SEQ ID NO: 28527 - DNA, 961 bp, Arabidopsis thaliana landsberg
ctgatttccatggcttattaattcaaagagctttagtatcatgcaatgaacttccactgaatgtttgcaggatctgtcatgatacagataactgggatctattagttaagtactcgaagaaattctgcaaagctggagtcaagctcaggaagaccacatttgatgtctggatggaatttgctgccaaaagaggtacattttgtgtagttggtttccttagtcttacttccaacgattctttggtcgatagaggagcttgttacaaccattccgtaatttgaacttgtgaagtggtcttgagatatgtctacgtaaacatcagacaaagatattatcctatcatatcgaaacagatatgccaacataactgttagcaaaacagatcatttttggtagccaatttggtaaaagggaccagaagtatgattttttttatttttcttttatgtaatctcatgaatgacctgaccacaaatcagatttaggctccgttactgttagaacaggaaaaactaaagatgtgagcaagagaattaaatcagagcagaacacaattggacttgtaataaatttgctatacaatttggataattgcttactgtctctgacttattggactcttgctttatcaggagacacagagtcgttatgggatgttgataaactgagatgtgagacttacactcaacacaccctttccggtgcttgtatatgtgcaaaggtaaaacagttctttatgcttcctcatgttatggacaataatcactcctgttcataatttctagaaccaagtttcggattgttcttgaaacgattgctctctctctctctcgcacggttttctgctagaacgtacacctgaagaagctgctgcagtcatccaaattatctgtcacgtgtgagccagaacctgttaaatatctgtttctttttccaggatcaaagaagtttctgagatacc

SEQ ID NO: 28528 - DNA, 1261 bp, Arabidopsis thaliana landsberg
gagaaatgttcagaaggggaaggatgttctttttaaagcggaaaaagaattcagggcggctactttgaatgtggatggagcacttaagcttaaggagtcgatgatttgcaaaggattggtgccattgaagtatacatacgatgtacttatagatgggttgtgtaagataaagagactagaagatgctaaatcgttgctggtagagatggatagtatcggtgtgtctcttgataatcatacttatagtttactgattgatggcttactgaagggtagaaatgcagatgctgcgaaaggacatagtccatgagatggtttcacatggtattaacatcaaaccttatatgtatgattgttgtatttgtgtgatgtcaaaggaaggggtgatggagaaggcaaaggctctctttgatggaatgatcgcatccggactgataccacaggctcaggcttatgctagtctgatcgaaggatactgtcgagaaaagaatgtacgtcagggttatgagttacttgttgaaatgaaaaagaggaacattgtcatatctccatatacttatggtacagtggtgaaaggcatgtgctcttctggggatctcgatggagcttataacattgtgaaggaaatgattgcaagtggttgcagacccaatgtggttatatataccacattgatcaaaacctttctccagaatagtaggtttggagatgcaatgagggtgttaaaagaaatgaaagaacaaggaatcgcaccagacatattttgctacaattcccttataattggcctttcaaaagctaaaagaatggacgaagcaaggtcttttctggttgaaatggtcgagaacggattaaagcctaatgctttcacctatggggcttttatcagtggatatatagaggcaagggaatttgcatctgcagataagtatgtgaaagagatgcgggaatgtggcgtacttccaaataaggttctttgcacgggtttgatcaatgagtattgcaaaaaggggaaagtaatagaggcgtgttcagcatatagatccatggttgaccaagggatcctgggggatgctaaaacatacactgttcttatgaatggtctttttaaaaatgataaagtagatgatgccgaggagattttccgcgaaatgcgtgggaagggtattgcacctgatgtattctcttatggagttctcattaatggattttctaagttgggaaatatgccgaaggcttctagtattactgatgagatggt

SEQ ID NO: 28529 - DNA, 1579 bp, Arabidopsis thaliana landsberg
  unsure (1)..(1579): unsure at all n locations
cttttatcacccaaactgcgacgagcacatcatgagtacaatgcaagatttatcttctactgtgtcggttagccctagcttcagtttctacgcctccggtgacctagtcgaaaccgccgttagagttatacgtgagtccgagagttattattccgttaaagttgacggcgaaaacgacaaagaattcgagttcgaaacattaccgttaggtgacgagagcctctttcatttctcaacgatgacgacgacttttaagcgctcttccgacgacgatgacgtggcagacgatcgagtcacctcgaagaatcttttctacggtggatggagtgttgatcctccatctctaacttcgccgtcggaatcaatttcatcgtcggattctgacgattcggaaaacatttctccgagcaaattctactgtttctggagtccgatcagatccccggctagagacgatagcttgaagagtaaaggatcttcgagacggtgtcgtataaaggaatttctgaggagaagccacagcgacggagccgtttcgaccgtgagcgcaactaaacggtgcagtttcaaggatcttctaaggagaagccacagcgacggcggcggcgagggatcttcgatttcgacgagtggaaacggctctctggtagtgaaagggaggaataaaacggcggcgtataagcctgatgtggataagagaagaaagtcttacttaccttacaggcaagatttgatcggcgttttcgccgggatgggtagattccgtaattaacgaatgtttgattatttcctaattttattatttaagtgtgcatattcacaaagaggtcctcgtttgatttttaattttctcttttgaccatgtaatactttttggtgatattaaattcacttgtgttttttgtcttttttacttttccactgaaatgttgtgcaaagtgtaagactttcgaagaaatagagaatattttaacgaaggggatcgttttgtccagttgcattcttgaagaaatcaatgatctcggtgatacaacaagagtaagaactctctggtgattcattgtcacaagctcttcagttctcggtctaggtcagtttccaatgtgctaattaggtctttagttagggtttagtagtttaaacaggggattctaacatagactatagctttgatgcatgtatatcttgttaaccaagaatgatggtggctatttaacaggaaaagattcggtgttaactcagtttggtaatagttttctgatgtttcttggatcattccccactttccttgcaattcaagtaacatggcttggctgccatcagacatataaggtctattcgtcatgtctagattgcgcttgcctattttaagcacgtattgagaaatttccctcttgacttccaagatggaaaactttttgactagagaaatcagttctgttcagtttgagccacaacaatcaacattctctcttaattagtccacttgttgtgcctagtctgctattaagtaagtgcctggaaacaaggaattgggagtataaaaatttcttaatattcgnttttcatgcaacaaagc

SEQ ID NO: 28530 - DNA, 1447 bp, Arabidopsis thaliana landsberg
  unsure (1)..(1447): unsure at all n locations
atgtctcaggggcagatgtgaatcatcctctgccactagctcgagagcatgtagagagaagcagcgacgggacaggttgaatgacaagtaagttttaacaattttgtatatccttccttttactctttagtaggtactaaaatgatctccttttaaataaataacaggtttatggaattgggtgcaattttggagcctggaaatcctcccaaaacagacaaggctgctatcttggttgatgctgtccgcatggtgacacagctacggggcgaggcccagaagctgaaggactccaattcaagtcttcaggacaaaatcaaagagttaaaggtgaaatttgtaatcctcctttatccccataaaatcatcgaatgcttactagtttccggtttatgtcaatcagactgagaaaaacgagctgcgagatgagaaacagaggctgaagacagagaaagaaaagctggagcagcagctgaaagccatgaatgctcctcaaccaagttttttcccagccccacctatgatgcctactgcttttgcttcagcgcaaggccaagctcctggaaacaagatggtgccaatcatcagttacccaggagttgccatgtggcagttcatgcctcctgcttcagtcgatacttctcaggatcatgtccttcgtcctcctgttgcttaatcaagaaaaatcatcaaccggtttgcttcttgcttccgcttaaaagaaaagtctccatttgttttgctctcctctctttctcggctttcttagtcttatccttttgctttgtcgtgttatcatcgtaactgttatctgttgaacaatgatatgacattgtaaactccaattgcttcgcgcaatgttatctattcacatgtaaatttaagtagagtttggcagatcatctctcactttatgtgttcttacattaatacatagaatgtggttacttcctcgccataagagtttgaaagtacaaaaaattagaaacaggagagaccgcaaaacatgatccggtagagaagtgaaaactccactnnnnnnnnnnnnnnnnnnnnnnnnngatctgtgaatctcctctctgggtgccaatgtagaaaatggtcttggtttgtgttatcatgatgctctaatgtgacagctcttgataaatctgtcagaagaatcaagatacttagcccagagaggacgtagatgaggaaatgctatatccagccaaggcttagctcttccattgaaatgaacaacagcggcactttcagcatcggcatagctcgtggtctcttggtatccgagaccaagcatatgccagaacggatctatggtttggacatgaccgtggaaagcaatcaacccaggaggcaaagttcctagctgccacaaactcaggtctgattttaagttcttgcacacatacatgntaaataagtttgagttaagatgattact

SEQ ID NO: 28531 - DNA, 1150 bp, Arabidopsis thaliana landsberg
tctgactaaagactatgtaatataaatagtttttcttaacccaaaataaacttttggttttttttcactaaaacttttttatttattcattggctttgaagttttgttttgaataattattgcgatcattggttgggattacgtatagaaaacgttttaaactcaatgggtggataatttataaaatatatttgtagaagctaattttgtattattagattggtagcatattgtccaattctgcatacatctaatcctttatataataaaaagagtttattgtgtttattatgtataaagattcttatagcattaaaatataaaaggaaaaacttaaaaaaatttctctcaggcacatttatcgaggttcctctttgggatattggtttttgaaaaacaagatctcaaccactctttgtttctaaaaacagcaattcccacccacctttctttacccaaaatagactttctaaggaaaactcagtcttgaaggcttttccggcgagctttcacgaaggagtccggcgtgggagacgcccctccgtacgtgaagaaggcctagtgctcctttcttgaagtttggtgggcgtgcttgtgttatggtttctgtattgttttcctcctgctttgaatgctcttccaccagatctggtaaactattgagtagttattacaagaagacaagggctttctctcgtcaaaggtccatttaagaagtagtattttacttacctcaacatttacttcaagagtcgggtaccttcttgtctgaacctttttgataagtttcctcttttgtttttgccatgtcttgaaccttctcatattgtaatgatgaactgtggtggttggaaagtgtaacggtttcagatctgaaaattaccgttactttgactaaatctctctttgaactttgttgcaaactatctcaccttttggtgaagaaccttttggaagacttaaagaccacaagcttgtgaaaactgattccctcttctggtttgacaatggatagacgcataccatatcatcttaagggaaaaggtccttcatccgacttctctccacctcctcagaagagaataagagcccccgaaatagatacttcggatcttatccgtgacaatgctctcactgtcatggggagact

SEQ ID NO: 28532 - DNA, 847 bp, Arabidopsis thaliana landsberg
catgatcattaggtaattaggaatatcattcaaaagatattctatggcctacataaagaaattctggatattagactctctttttttaataatcacttggtgtaataaaattaaaataattaaatatgtaagagttcttacttaaagatgatcgggagtgtttggaatcccaagaacggtgaagctacggtttacttctgaataattaaaggcagtcactttgattttaaaaagaaagtggtttccaataaagccatccatgtatgtagacagatttgggaatacggattcattgacctaaattgagtaggcaaaattagtatgaaactattaaaaatgttatagaaaatgttttcgataaggtttaccttattgtgtaacttctcatatgaaagtgggcatattagatgcatgatgacatagtttgatacgataagtgttgctatatcactaccgtctagaacaacaaatgcaacatggaacctgaaatgcaaataaagcaatattagatatttgttttcaagttaaatgaatgaaaataggtaagaatttttgtataacccatcatttttgaaaactttggattcttggcagttagtacaaagaagtaaattttggtgtggttcaagtgtgcctagacaaattttgcatgggaagttgtccaagcatatgttggtagtacatccacaattgtagcttggcaaaggaagtatgaatcctacatttcattgtgattgtttgttttaataaaagtaataaatctttttacaaactacatccaaacaaacctgttgcattcttgtaaaaagtgaattcacacaatcttgcattaccacgttggtttcca

SEQ ID NO: 28533 - DNA, 1801 bp, Arabidopsis thaliana landsberg
tgtccgtaagtgtccagattcagttagaagagtctccaactcctcctgcatcgtccacacaagttgtaaagtcctccctcaggcaaccatctgacaacaagctctttgtttttctatgtattaaatttctaaggatccaaaaaaacgtaatttccacgtcgtacatccagatgaatcctaaagtactacagctaatattttccagttaacagtgctacgatgtaactttagggactttgttcgggggaaagtcagcatcctaaatgaatgtcattgatatactgctttcaaatacagtgctttactacactgagactcagctaaataactgcaaaactggtactttggtacaaagtacatgcatacaaaaacgcacctagactgaaaatttgttttcttctcctttttaaccaatctctagctatcttgcttaaatagttctgtcaaagaatagatttactagtccgaattacaggtttctaacatctttcagttattagtttgtggtgccacctatcgatttgatgttatgaaattatgaatgcgtaaattatattaactaaaaacacataccacaacacagttattaccggaagatgcaagattctccatatcttcaacacggtttaatgctctgtaaagaagcattagaagcgtgtctattccctccctcactgggtgagttaagtccttctcacgtgatatctcgaggtacctgtcgtaacatgtaacgttatctcattatatgccaactcagaccacagagaacagggatatctacaaaagctgtagaggaaaacaatatacataaaaagtgtaattgtatcacctggttatgtttttaattgctgaatccagtaaatcagctctactagggggatctgagaaaaactcttcgtcaaccggagtgtccattcctgcttttctaagaaaattggctctctggatggccatcagcccattatctacaacatcttcgaaaggagctgggggaggatgcagtccccagtatctgtttcttggaacctgaaaccaagcaaaaattttagttaagcagagtgcagctggacaaggcttaagacatcataaagttcgggttcgctacaagtcaggcaatgccttgagtaaggaaaataatgaactttggttgataatcagtcaatttttagaaacaaattagagtatataattaaaaaccagctgacaggaaaaaaaattataccaccaaagaccagcgattaggatcccgcatgataaaaggaaaaacttcagaaggttccattttttctgacttcaaaaattgattcacagcttcctcaaagcgcaaatcaaaaagcagtagataccctatttgagcatgaagaaacgaaagcatgtctttcgaaatttccccctgtgagtcaagttctcccaccaaggagatggtttctctatatctctttttcctcaagaggtctttaatctgttcttcataaggcactctccgataaaaaataagctgaaacatcacaatgaaagagtcaacaaaaaattcttgactattttattaacaagatatactccaaagaaatgaagatagccattatcaggataaacacctttgacaaggtagtgacaaccaaaaggtttccgtctcctgcctcatctgcggccaaaagtgaaggcccacatccttgaggaccaaaactaactgattgaacacaagcaccagacttcttctgatgtattaaaaaaattccatctccaacagtcaccaagtagaaagacaattctccaacagaatcaggcctactcaaaacac

SEQ ID NO: 28534 - DNA, 1416 bp, Arabidopsis thaliana landsberg
tcacgaatatgtgtgacttgtgaggagaaaacaaccacttacacgtttccacgtggcatattccccttcactccgcctcaggatattttcaattttcaaaatatacaaaacggtgtcgcttttctgtgcgttttgtgagtaataaagcttgaccggagtgtcttgtctctgctgcttcaatcgccggcgaacgatggcggtctcagctttccgtggcacgcggttaccgttatttcaccattctcaggtttacttgttttctcttctctttccttcagtaaagtcgtttccttgatctgctctttatggcttagctaccaaaatttgcaaaggtcctttactcgctgctcaatctcgatagcttcatttttcagtttcccgtcgcgagaactgtgtcaggaacgtctaagaagatgatcggagccagtaatttcaagggttttgttcttacagcccagtattcgcaaactcaggaccttttcacttctcgtcttcaaagtacagaaatttccttcttcttgtaaactcaatctcattgtatacatctatgattctgaattgtatctcgttagggtattctttgttgcttattggatttattttgtaaaaatctacatattggatgacagtttattgatccatttacttgtttacatggcttttgatgcaggccagatagagaaattgcccaaattggttgaggatatagttcagacatcgataaacacaggtccacgaggtgtgacacgcctgtccaaggtgttcaagcctttgtaggggttggaggagagtggctaaatgatttatctaaggtggctgaaattatctttttgcttatgatgtcaaactatctttgattgctaactactctctcactcgctgcagtctacaagcgcgtctggtggattaccaagtgaattgcagcttggtctactgtctcctctatatttgaggaaactctttgaacgcatgggagctacttacattaagctgggccaggtaaatcatgttgctaaatgtagagcatattgtatcctctgatgatatcatgtaaatatctagaaccatgtgaactgtgtatgtctaaagtaagcttagttatcatattttgttgcttctctatatatttcctattctatccatttaacaatacttgtaatgtatctttgaatttgtagtttatagcatctgcgccaactttgttcccaccagaatatgtcaaagaatttcagaactgctttgacaaagctcctcctgtgccatttgaagaaattcgtaaaatcttgcaagaggagcttgggagacccattgaaagtgtatcgaatatgttgacctacgccaattgcatcagctcaatagcacaagtgtgttcttctacttgtacttcaatgatcgaaattcattttgtgcatgtac

SEQ ID NO: 28535 - DNA, 1220 bp, Arabidopsis thaliana landsberg
  unsure (1)..(1220): unsure at all n locations
tctgttcggcgttcgggtataacccaaacccgaaagtgtaaaccaaacccgaacctaacacattttgtcattaacctctctagtctttgtcgatttagtttcttagggtttcttatggtttgtcgtcgattgtcgacttacaattcatcaattactttttttgaatcaatcttggaggctcaatcagaggtactttcgatttctccactccatgttctatgaatttctctgtctgtcagtcgaattcgaagtcattgagagttcgagacattgactcatgtacaatcacaattgtcgagttttattgttagattatgaaggcattgatattctatgttcgctgtttcgcttatgaggtcaagaaatcgaacgcagtcaatctttgctcaagttttcttttcgagtttcactgagcttactacatgctaattagtttcttctcgataatcattggtcgtcacttgttttgaataatgatgttgaattcaatgacattgcagatgggcgtcttgtaatgagccacacgaccgagatgagcaaatgcatgaggacaatgatatgacaaacgaagagtttgaaacacctacttctagaaaggcaaacaagggcaaagagaaaaacaatgaaggggcagggaatagtggttctacggaaaacaagagggcaaggtcttgggtttggatcatctaaccaaacatacaaatgatgctgacaaatgtaattgcaattattgtggaaaagagctggcgtgtccaaccaagtctggaacctctactctaaagaagcatcttcaaaatacatgcaaggcataccaagtttggaaatgtgatcatgtacataatagtcaaacctcatgatggtcctggtggttgtatgagtactagtaaagttagtgaatcagttggagagaagcaactaatgagttgttagttttagatgagttgtcattagcttttggaagtgcttagcttggagaaatgtttgctcaagagttcaaatgtataagcctcattcccgaagaacagctacaagagacgttgntgaggcttatgttagtaagaaagcagcctgaaaagatatcgaaacaataactgagatgtcattggcgacaatattgggttgtccaatattgcacctagtatatgatagcaacactcacttgttgagccaatgggagttgaggagatgatatagtattcagctatatggacatagggtcg

SEQ ID NO: 28536 - DNA, 2157 bp, Arabidopsis thaliana landsberg
gcattatttagtggctgtgccaatgttcttcttgtctgtgggttctcctcagaattttgacccggttctcggttcaatggtatataagaggaaatcagcttcgtttaacacttcttcgagtctgtattctgctaaagcacctgcggttcacccgtggagcatatcaagcgaacaagatttcatcaaattggttcagcaaatggctgagggcgacccgcttctgatggagttggtatgatggactcagggtatagagcttgcagtaatgcaatgatagaaacagagttatacaaaaattgtgtttttgattcttttcttattggttcccttttcagaatttttttcttctgggggttgtgaagaaagtcatgtaatgttccattgtaaccatacgttttgtgagtgtatgatatttccccatctaaaatcagtctctgcttcatcaataaagacaaaaagacaactgaaaacatgcctgaatatacaagtaatgacacagttttgatcccataagaaaaagacattggaatgctaaggaagcttggtgaagagatcctgaagctgagtgtggctcaccacaacaccaagtttctgtgaaattgctgctgtcactgtttcgggatccaagcttgacaatgtatccgcaccgctcatggcaatgtactcgctcaaattgtgcaagattccatcttcagaagtaagacaaaagcgagctgagcagatgaatattgttgatgaaagggtaaaaagtaacatcttaccttgggcaacaatgggttcatagggtggaggttgagcagtccaacttccatcaggttctttcatgtgtcttctatcggaagcgaaatgcttaaagaacagaggagcatgaacaatgcggaagaacctgatctcaacaaaacaaaaagaaaaaaccaactacattacaattacatgatgctgaatttcctatccaaatctatattgctccttatgcctttcataaactgttttgcggataaatatccggttcaggaacacaagaagataaagaagcctatatagtttctcggtgatagaaaagtaaaggctactgctttggcaccctgatatctattacttggtggtacagtgatgtgaaagatatagattacctctggtactctgcgaaaagctgaaaagatggctggatagtttcagtcacatatgaggctaagggtgaagggaaaggcaaagtcgaatcaagttcccacaccaaaggctcagaatcactttctttcttcctgtaatcaatattcatgggaatccaaaccaaaaaccaagtttaattctaaaaactgacatcactggtttggacattataggtttacctggacacagatgacatgataatcccacagtacaaccccatcagctctggtactagctttctgatgccaaagtggaacctacaagaaaatcaaatcagtacaatggacattgaaatatacacactctgattaccaaacgacttcgtaacggtgatgtaattccaacatgaaacaagaccaaagataagaattattaataaagagcaacaagcttgcctgcttcttctcattggagataaaaacaacaaacaaatcagaacacgttgcctccgctacaccattctcgcacaacgtcttgcagagcagatacacattctcttcgctacaagaaaaagtcaacatctttatcttaagtactcctacccataagtcaaaataatcaactacaaccctctaaaacgagtaatctggattcggaagttacatagaacatgtagaagagaccgttctataatttgaagaaacctaaatcgatgagaaattttgttttaaaagaagaagaataccagtagtaaggagtgtgctggaaccgagtggcatccatagcaataggctccgaggtgacgccggacattctctcttaggatttgatcagtactcttatctaattttcctacttccagcaacgttgatcatctaatcgtcaaaactaaaaagtggtcgtgtacaattgggtaaatggtgaccggagaagagacagagagttaaataagttaatgcccaacgacgatgtatcgtgaacagaccaaacgacgacgtagtgaatacaatcgtaatcgtattcgtattcgtgaatgggtcaaacgcc

SEQ ID NO: 28537 - DNA, 4968 bp, Arabidopsis thaliana landsberg
  unsure (1)..(4968): unsure at all n locations
caaaaagtaggtagctccataaatgaaaatgacgacgtaaagatcccgatttgtttgtgtatataccttgttacgtaagctttattaattgacaaacgtaaaatgaaggttattttaaaaaccaagaagctacaaatgaaaccattaatttagagggatggctaaaaactggagatctttgctacatcgataaagatgggtttctttttgttgtggatcgattgaaagaactgataaaannnnnnnnnnnnnnnnnnnnnaaacatctatcttcattctttcacaaacagtgaaattttaaaattataaagatctaacgataagtaattgataaacaggtgcctccagctgaactagaagctcttctgattactcatccggacattctcgatgccgccgttattccgtaaaatatttcataacttttttttttcctccaatttaaacgccatgatttttgccttataaacgtaaaacacaacatgttcatgtatgtatgcttttgtgtacgtactgcaaagttttccggacaaagaagcaggacaatatccaatggcttacgtggttcgaaaacacgagagcaatctctctgagaaacaagtcattgacttcatctctaagcaggtgtgcttttaaaatcacaaaacaacaccttctcttctttaccttgttataatgtttttaggtggtaaattagttttatgatagttggtttcaaaagattactaaaattttgagcaggtagcaccatataagaagataagaaaggtctcatttataaactccataccaaaaactgcatccggtaagacgcttcgcaaggatctaatcaaattggctacttctaaactttgaaaggatcttatttgctagattctcacttttacttgtagttgaaataactgggatgtatgttctctttcaataatctcgcttttatttcaataaagagaggattgtaatatatctataatgctgaataattttaattaaagacactagtatcaaatatgtagtagacaatttgctgataacacgagtttatatcttatcaaaattataatatccaaaagtgaatagaaagataatataacaaatgtgtgtgttatgacttattacaagatcaataatccgaaattcaacattttaagtttttaaccgaagaaaaagaaagaaagagggatggacgatcggaattggtttggatttgagcaacaagaagataaatttggtgtgtggctagacccaaggacaatatggcaagtgaagtgggctttgaggttacctaatcctggttatgggtcactggttacccaaataaaaaatctcacgtcatcaaactgaacatagaagccaacaaaacaaaacataggggttaggcacggcggcgacggtcaaatcgaatctcccggtagttctcaggaacgagaaccacgtgacttcaccaaacttgtgataaaatattcttacaatgaaaagttctctatgttttgtattattattgtgtgtttctcatcacaattcttattgttttgtgtcggccacatcaagtatcatattatctacatcatttaataatccgacacatgttgtagatagtatggtatattaatatttcatattcatattacagactaatcgtttagagaagttgtacttagagaagagcttcatattaagaaatatggcgtatcctgagagagatctcattgttgatcctagaagcggtttctgcaagtcaatctctacattatatagcaagcgaaacccattatgtcgcccgccaaatcagtcgcttgaggtcacaactttcatatcatctcaaccgcaatccggcaccaccgcgttcatcgaggcctccacgggccaccgcttgacattctcggatctctggagagccgttgatcgcgtcgccgactgtctatatcatgaagtcggaatacgaagaggcgacgtcgtcctcatcctttctccaaactccatctacattcccgttgtttgcctctccgtcatgtctctcggcgccgctttcaccaccgcaaacactctcaatacttccggtgaaatctccaaacagattgccgacagtaatccaactctcgtcttcactacgcgccagctggcaccaaaactccccgtcgctatctccgtcgttctcaccgacgacgaagtttaccaggagctcactagcgcaatcagagtcgttgggattttaagcgagatggtgaagaaagaaccgagtgggcaacgagtcagggaccgagtcaaccaggacgacacggcgatgatgctttactcgtcgggaaccacgggaccgagcaaaggagtgatctcgtctcaccggaatttaacagcttacgttgcgaaatacatcgacgataaatggaaacgagacgagatattcgtatgtaccgtgccgatgttccactccttcgggttattggcgttcgcaatgggctccgtagcatcgggttcaacggtggtgattctccggagattcgggctcgacgatatgatgcaagcggtggagaagtacaaagccacgattctgagtttggctccaccggttttggtagctatgattaacggtgcagatcagctcaaggccaagtacgattggacctccctgagaaaggttaggtgtggtggagcaccgttaagcaaggaggtcacggatagcttcctagagaagtatccaacggttgatatttttcaaggatatgcgttgagtgaatcgcacggttcaggagcttcgacggaatctgtggaggagagtctgaaatacggtgcggttgggttgttgtcgtccggtattgaagcgaggattgtggatccggagacgggtcgggtcatgggtgtgaaccaacccggtgagctctggctcaagggtccttctatttctaaaggtaaacaaacacttaacgctaaatatttggcagtaattagattatttgaaatagacattttattattgggaaattatttataaaacaaatattatgatcaagtttttaagcagtaatgggttttggatttggtgtgagtaattgagttttgtatacatctatatgattagtattcgtaacgtagacaccctaaccgaagaatgacttcagttcatttgcaaattaaatgaaacttatttaagtgaactcaatactattgaataacaaaagaaacactcttaaatctgtcttgggacaaaacaaaaacaattttttgcatggcaaagatatagttttgaattaaactaacatttatatgctttaaaggttatttcggaaatgaagaagctacaaatgaaactattaatctagaaggatggctaaaaactggagatctctgctatatcgatgaagatgggtttctatttgttgtggatcgactgaaagaattgatcaaatacaaaggctaccaggttcatcatcgttatgtttactaatagtgtaaattttcttaaaaatgaaaatctagtggttaatatatgataagcaggtgcctccagctgaactagaggctcttttgatcgctcatccacacattcttgatgctgctgttattccgtaaaatatttaacaactaaaacaccatgatttttgtcattcaaatatcgaaaaacatgtagtttgtttcttttgtgcattgtacaggtttccggatagagaagccggacaatatccgatggcttatgtagcccgaaagcccgagagcaatctctccgaaaaagaagttattgacttcatctctaatcaggtacttctataatcacaaaacgtacaacatcttctttatcatatattgttttacttaaaagttaaactatttttgggtggtaaataatttgatgagcaggtggcaccgtataagaaaataagaaaggttgcatttataagttccataccaaagactgcatccggcaaaacacttcgcaaagatctaatcaaactagcaacttctaaactttgaaaggatctatttgcttgactttcttaattttattgatggtattgtttttcaataagagagaaactgtaaatctgtaatcattgtatatatttttctgtatacatatgtatagtgttgaataatttccaaggacagatataattagtttgcattaggcccaaaggcgtaatggatcaaagactcaaagtatagtgggcttttttataatatagtccacgtcataaaacttaaatcagaaacgacgtaattaccaatctctaacgaccaatcaccgagaggctttcgatacaaccaaagtcctttaacatggcggttaagcacggcgtcgacggcgacggcagcgaaatcgaatcgagaactctggcggtagatcgaaaaagcggtttctgcgaatcaacatcgatattctacagcaaacgtgagccaatggctctcccgccaaaccaatttctcgacgtcacgtctttcattgcatcacagcctcatcgcggcaaaaccgtattcggcgacgccgtaaccggtcgtcgactaagcttccctgagctctggctcggtgtcgaaagagtcgcgggttgtctttacgcattaggtgtacgcaaaggaaatgtcgtcattatactctctccaaactcaatcctcttcccgatcgtctccctctccgtaatgtcactcggcgcaatcataaccaccgctaatccgatcaacacgtccgacgaaatctccaaacagataggcgattcgcgtcctgttctcgccttcaccacatgcaaactcgtctccaaactcgccgccgcgtcgaattttaatctcccggtggttctcatggacgactaccacgttccttcgcaaacttacggtgaccgcgtgaaactagtcgggaggttagagacgatgattgaaacagaaccgagtgagtcacgagttaagcaacgagtcaaccaggacgacacggcggctctgttatactcatcaggtacgacggggacgagtaaagaagtgatg

SEQ ID NO: 28538 - DNA, 1208 bp, Arabidopsis thaliana landsberg
tcttcttcttcttctcctctgcttcctctgctttcttaatctttttcgcttccttctctgctttcttcttctcttcttccacagccaacttccttgctttttcattctcttcctccaaagtcttgaccaaacgcttgatgcaaatatctgcatcttgtgtgtcagatttaggcatcaaagtctccgcaacatccgccggggacatatcggtttcttcgagctttctttcgatctcttcatacaagtcgtgtgtttcaatctccaagtagttcttagccaaaaccttgaatgcttcaaacttgcaataagacatctcaatgtggttgtccatccttcctctacgtatcaatgctggatcaagcttatccacaaaattagttgtgaacactatgatcttctcaccactacaagctgaccataacccatcaatggagtttaataaccctgacaaagtaaccttgctctgcttatcatctaccttgggcttcttctcaccttcctttttctcctctccatcctcctcttcatcttcctcttttttcttctttcgctgccccgtaagatcaagcgagcaatcaatatcttcaatcacaatgatagacttactagttgtatccaacaacaacttcttcagctctgagttatccttcaccgtcgttagctcaagatcatacacatcatagtccaagaaattcgctattgcagctatcatcgtcgatttccctgtcccgggcgggccaaacaagagataaccgcgcttccatggcttcccaaccttcttgtaataatctttccctttgctaaactttatcaaatccttcttaatcccttctttcttctctggatccatagccaaagtctcaaacgtcgccggatggtgaaaaggaacgttgctccactttcctgacctccaaggataccattcttgacttgagttattagtgtaaagcttcctctctctgttcatcaatccaatagctttcccttctctcaaaacatgatcaagataagtctcaatgatcatacctcggtgtcgcctatggaaactaagagtaaagtgccttctctcctctgagctgcgttgaccataattagactgaggctgaatcactttcacattcgaataccacttcaccttcacaccttcgaactcatcttcaatttcctcatgatcatccatactaaacaccaaagatttgctgtttttc

SEQ ID NO: 28539 - DNA, 2644 bp, Arabidopsis thaliana landsberg
aaaactgattttggttcttaagctaagtttaagtgttgtgacttctttaaaaaaactgattctttgatgatttcagattcttgatctctgtaacgcgagagctgatctgagaaagagagtccactctacaatcgataagtacgctgagcgtggacttaggtcattagctgtttcaagacaggtgagaagaaatcttacattttgtaacaagttataggaagaaggaaaaagagagagagagtttaatgtaaattttgtgtgtctatgtttcagactgtaccagagaaaacaaaagaaagctctggtagtccatgggaatttgttggtgtgttgcctctgtttgatcctccaagacatgatagtgccgaaaccattagaagagctctagacctcggtgtcaatgtcaagatgattactggtttatatctaaacattactcttcgctatagcgaaaacaccgaatttcttactaatgtttccaatggttttataggtgatcaacttgctattgcgaaggagacaggacgtagacttggaatgggatcaaacatgtacccatcctcttctttactcggtaaacacaaagacgaagccatggctcacattcctgttgaggatttgattgagaaagctgatggctttgctggagtcttcccaggtttgtttaagagccatttttgtttccacaaacacaaacttgctcttctctctgtaacatttggtctcttttttttctttaccaaattcattcagagcacaaatacgaaattgtgaagaagttgcaaaaaaggaagcatatctgtggtatgactgcagatggagtgaatgacgctccagcattgaagaaagctgatataggtatcgctgtggcggatgccactgatgctgctcggggtgcttctgatattgtcttaacagaacctggacttagtgttatcatcagtgctgtcttgactagccgtgcaattttccagagaatgaaaaattacacggtacataaatgcttctgcctcattggctattacctgataaagtttaaattgaatgcttatattgaatttttttggtttaccttcattttgcagatatatgctgtttctatcactatacgtattgtcgtaagtttctcagtcgaaattgcatcagattttcacaaatacttggtcttattttcatctgataacacatttttctatacctttgtgttacagatgggtttcatgcttctatgtgtcttctgggagtttgacttccctccattcatggttcttgtaattgcaatccttaacgatggttagtaactgttaactccctcgatgatttagcttacggcttttgctggtgcttgaagcattcaccctgctaaatttgctttcctgttgaaaaggtactataatgaccatatccaaggacagagtcaagccttctccaactccagattgttggaaactcaaagaaatttttgctactggtgttgtgcttggagcttacttggcgatcatgactgttgtgtttttctgggcagcatacgaaaccaacttcttccatgtaagctacacactatccctctccttgtttactctaatttcaactgtcagcaaaatataactatacttttttcccttttgtggtagaacattttccatgtgagaaacttcaaccagcaccatttcaaaatgaaagacaagaaagtggctgcacatttgaatgaacagatggcttccgcggtctaccttcaagtcagcacgatcagccaagcgttgatcttcgtgacccgttccaggagctggtcatttgttgagcgtcccggttttcttcttgtaattgctttcctaatagctcagctggtaaagagatttccgtcacctatctcattattttccttagttacttacctctttgtttatagtttgttaatagaatccaactctgtattattttgataggttgcatcggtgatatcggcaatggcaaattggccttttgctggaatcagaagcattggatggggttggactggagttatctggatattcaacatagtaacttacatgttacttgatcctatcaaattcctagtccgttatgctctaagtggcaaatcatgggaccgaatggtcgaggggagggtacgtagaccaaaaaaaagacagaatcacttaactctaaattcggtacttcacaattacgttggcctaactagaactcgtgatttgtttgcagactgcactcacaggaaagaagaattttggccaagaagaaagaatggctgcgtgggccaccgagaagcgtacacagcacggtttagagacgggtcaaaagccagtttatgagagaaatagcgcaacggaacttaacaatatggctgaggaagctaaaaggcgtgcagaaattgcaaggttagttttttttttatattagagatcgttagtctctgtcatgtttgagagatgatctcatttctagtatgctgatgaattttgcagaatgagagagcttcagacattgaaggggaaggttgaatcagctgcaaagctgaaaggctatgatcttgaggatcctaacagcaacaactacacaatctgagacagtaacaatctctgcttagttcattttgtcttttattttcgatgtattattatta

SEQ ID NO: 28540 - DNA, 1081 bp, Arabidopsis thaliana landsberg
gatgtgtcatttacataaacgaatatcgatcctttcaagttgttgtgtgtgtgtgtatctttaagtacctcttattatttgtgtcttcttccaatcttttatattcgtctcacatggattccaatttcatatacgtgttttttttgtcaacgtatatatcccatatatgctactctcctagaattcctaaaagctatattgagataaaaaaaaaaatatattattctttctagatatgaaaatatatatgattgcgtgaagaatttgagagattcatgaagcatatcaaaagaaaacaaggagagccgtaagaaatttgtggaaggcacacgccatgaagagattatcttcttctgaaattcgcatattcttttcaaaaaatattgaaaactcagtttgatatttgtgaggaagtcttacaatttaattccaaagttgatgtttggaaacagacaaaggacgtatgtttttcggtcaagcaacttgctatataggttagtagttactccatatatatatttttaattactgtggttagttacactttttgtgttgtcgcaagtcatgcacatttctttctaaaagactaaaagctcttggctatatattttgaactgccccataatatagtaatggactctttatttctgtgtaattatgtgtttacatcatatgctacgtacagaaaaatgataaggtatcaaacttttgtgtagttgtctcatacgagttggaagaagtactacatggacacattcaaaccttatctcattttttatatacagaagaatggaataaaacaaacaaattatctcatttagctttcatgtaatccatcaattaatggagattatacgtttcatatcatccatcaattactgtacatcttgcttagtgtaatacaatatatccaataatttataacatttttggatctaatccatgttcacgcaagtcatttttcaaaaccaggataattttgaaaatgattgtaaattttatagcaattaggaatgaaatttctataatcgaaaacccacactctaaacctaaactaaaaccttaaacctaaatcagaaat

SEQ ID NO: 28541 - DNA, 1741 bp, Arabidopsis thaliana landsberg
acgctcttgagcaacacatcaagaaccttctctgcccatcgtctccatttttcttcaacaccttgtatgatccttaccgtgaaggtgctgacttcgtccgtggataccctttcagtctccgtgagggtgtttccaccgctgtttcccacggtctgtggctcaacatccctgattacgatgcccctacccaacttgtgaagcctaaggaaaggaacacaaggtagtgttttatttaacatcttctgtctacattttttttttccggtttttattagctaccaatgcttaactggcatcactattaggtatgtggatgctgtcatgaccatcccaaagggaactcttttccctatgtgtggtataacttgcctttgaccgtgagctcattggtccggctatgtactttggtctcatgggtgatggtcagcctattggtcgctacgacgatatgtgggctggatggtgtatcaaggtacttactttccccattccactcgttgcttcaaaatgaatttaaatgttaatttgtttactgatctccctcttatgttcttcaggtgatctgtgaccatttgggattgggagtgaagacaggtttgccctacatttaccacagcaaagccagcaacccgtttgtgaacttgaagaaggagtacaagggaatcttctggcaggaggatatcattcctttcttccagagcgcaaagctcacgaaagaagctgtgacagttcaacaatgctacatggagctgtccaagttggtgaaggagaagctaagccccattgatccttactttgacaagcttgcagatgctatggtcacttggattgaagcttgggatgagcttaacccacccactaaagcttgagcagcaaaaaaaccaccaccgcagttttggttattagctcaacatatcatctatcttctccgttttgtttttgttttgtcttttctcaaattttccggcgattcttcagttctcgtttttaagttgccggagtttatttaaatagtgaatggtgtagttctatttatgaccgagacaatctctcttttgaggtttttcgtttttgtttcaataataaaaaatcatatcccttagtcgttggtgtctttgcttgctggtttgttgactgttattttggatcaaattagttgaaagacaggaacagattccaatcaaatcaagccttaaacatatttgatttagtagaacccagttggtgtttttggctgtatccgacatgttatgtaaaaatggccaagagactccaacatcattattaaaaggattttggaaaagagatgatgaaaacaacatctttatgtatcagcaaatgcttttagacttaaatcattaagccggactgcgggaatacgctggtctgtattgataagctcttgaacaaactctaaaaaaccttaaccctttttttatgatcacccaaagaaggagaccaattaggcttttatccatctaaggattaaagtcaaacacgtattttccctggggacgacttttaacagaatcggacttgtactcttttaactttttatacttaaaaaattggcaagtagctctgataatttggtgctaatcagcttcaaatggacagaacgatgcagctcatgaaaaataataattgcttttgactttgttttcttgttttctaattactactagatgtacaagggggtttcattgtagcatctaactagttttagattaaaagggcacgg

SEQ ID NO: 28542 - DNA, 3412 bp, Arabidopsis thaliana landsberg
ctgctatattttgctgcgattttggacattgcacaggtattattttaacatgttacttctatttcagtcatgaagagtcagctgatcatggcggtcatatggaaacgccttagcgacaccggaaaaaactggcggcatgtctataaggtaaacaatattattgtcttgctggcttaatttgtgttgaatttctgtagcagtgactaaagtatttcatgctgtttacctcttctctctccccttcaggctttgacagttttggagtacatggtaggccatggatcagaacgtgttatagacgagattagagaacgtgcatatcaaatttcggtaatgactaccttgagtacattattttggaagtattcaacatcaagagaatcctttagtgctatatctcagtagttgactatcttacttgtatatatgtctattttccttgtggcagacattgtccgattttcagtatattgattccggtggtagagatcaaggaagcaatgttaggaagaaatcacagagcctggtggctttggtgaatgacaaggaaagaatagctgaagtcagacagaaggctgctgctaatagagataagtaagtttgcttgtcattgtatctttctggaactggtggatagttttctctctgtgtgagtctcggtggacactcgtttgatttcttgttgctagtggcttacaattgttattatgcttctcggtagtctattaattggtagtactggcactttaactgtattagcttctgaattttgaaagtttttatctcgagaaaaaaaaatgacatgtcttttggttcattcaaactatgctgaacatatcaacctacattattttacaacaggtatcgcagctcagcaccaggtgggatgtataagccttcaggcggatatggggataaatatgattacggaagccgggatgaagagcgaagtagttatggaagagaaagagaatatggttacagagatgatgatagaaatagtcgtgatggagatcgtcattccagggactctgaagaccggtatgggagagatggtaatagggatgatgattacaggggaaggagcagaagtgttgataactatgggtcacgaggtaggagttcggaaagagagcgggaggatgatggccattcttcatcacggtatgttaaatttcaagtcgcctaaatcctgaaataaaaaaggaaggggaaaattttgaagattatcaactccatttggatagaatatttttattttgaatactagcgtagatgtccttgattttaaaaatcatttcgaaccgcaatcttcttagtctagttccattttcaaattttaaatggatacactcctttttgtcctgtaggggcagtggtgctcgagctgatgataattctcaggatgggaggtaatttctgataaatttctactgaagtttaggcattcttttattgtatgacaactcatctcaccttctttcgggattataatggtagaggggggctccagaggaagttttctgaacaaaatattggcgctccacccagttatgaagaagctgtcagtgattcacgcagccctgtatatagtgaaaggtgatcattttctgctttgaaaattgaaagctaccttggtttttattggtgctgatgaatctttctatgccagggatggtggggagaccccacaagttaccgctccaggagctgcttctcctcctcccccacaagttgctgctccagaggctgcttctcctccaattggaaccaacacagccaatacaactgctacttttgttaatgaatcaccttctcagaaagttgagactttcgatgaatttgatccacgcagtgcgttttcaggtacagaatactcaaactcttgcaattctttagttgtatcttgagatattttcttagtttttcaaactcctcggcagcatagagattacatgaaaatctttaatcaataactataactaattcagtaaatgtttcaaggcttagttggagggtgtatgattgtattctcatgtctgtatggtatatttctatcccattaaactctgcttgttctgagtgtggccgttgtgttcctttacttttccagctggccctccagcatatgcatctacagatggtgttacagctcctccaacagtgacttctatgtctgccccgcctgcctcaattaatgcagaaatggatttgcttggctctctttcagatgcattttcaccaaatcccttggctattgcaacatctgattccacttctgttgaaaccaatggacaagcaaacactggtttagctccatcgttttctacttctcagtcatctactcaggtattctcatttaccaattatgtttaaagtttttttaatgggtatgttactgggttcatctgaaaactcaaccggatggtttatttatcttttgccctttgtgcagccttttgatgatccatttggtgactctcctttcaaagccatcacttctgctgacactgagccaagccaacatcagagttttggagttccttttcagccaacaccaccaacttcaaatcctaacaatgaacataactttggttttggggaagcattttcagctgttaccgattctgaacctggcgttcaaaatatgcaagctccaccgaacttatccgtctttcctcaagagcagtttgatacatcgcagagcgaaatcgatattcttgccggcattctcccaccatctggaccgccagtttctctgtctccacaaccagattccactatgccaacatcccaatttcatcccaatggtaactcctatgaaagctatcatcatcaagccgcgcctacagatctaaacatgcaaggacaaacaccgtttggtcaagcttcacaacaatttaacatggtttcacattcacaaaatcatcatgaaggtatgcaattcaacaatgggggcttcacgcaacagccaggctatgcaggtccagcaacctctcaacctccacaatatactcctggtgtatcttcacacccaccaagtgagagttttcctcaccaaccaggttctgccacctcagcaagctcgcaaactccttacgctactacacccaatgtatcagctgggcagtttgatggtgggagtttcatgacacagcaaccttatggtgtgacacaacaagttcatgttgtcccttcccatataccacagcgaactcaatctggacctgttgcagcgtttgggaataataacaatatcgttggagatatgcaccaacctggttctgccccctcatcaagctcgcaaactccttaccctactacgcccaatgcaccaagtggtcagtttgatggtggaaattttatgacacaacaaccttatggtgtgaataccgaagttcatggcgtccct

SEQ ID NO: 28543 - DNA, 3915 bp, Arabidopsis thaliana landsberg
gctctgttatgaatatcaccgacacggtacttgcttctcaagattttcgaccatagactcacatcatcatgaagtaaacgccacccaattttcgagagaagagccgtattcatctgtgtagagcaccagatgcctaaccctccatcctgttttggcaagcacacacgatcccatgcaataagatgttcctggctttgtatgatgaagacataattgctactctacttaatattaaaaaaaaccttcgtggaataaattttaagaatttgtcgctgacgtgtctcgtgatgattcgtccacgtggttggcaaacggctcctatttaaaatctcaaaaccaaaaaaaaaaatcaagcgaggaatatgctgagcttatcactgagtaatcatgttcctccattaacgctcttgagccatgaacgaagaatcctcaagctccaaagtcgatcgtctattctctttcaccaactcttccacactaagttccttctcctgtcgaattcttcctctttgtcttcttcacatggagttgttgctatttcggcatctccgtcttcagtcgcagttccggaattagaagacgaggaccacttcgatgacgaattacgtcgtctattggcgctcgtaccggaggagatacgccagacactgaaggagcaccctgaaattagtgaactcatagagatagtgttggatttaggtcgtaaacctctggcgcgattcccttcaggtgactttgttatctccgacgatgctgttagagttaaagatctggaattcgctgtttctcaggttggtgagtgttcttctctggtgatattttcgtctgatgaaacatctatataattgatgcttaataagaccatgaaactgctcaggttggtgagtttactaatgataatcgagctggaatcagccggacgttgcatcggattagtgcgataaggaatcggaaaggagaaattattggattaacttgccgtgttggtcgatctgttagaggaagcgctaatttgctgcgtgatcttgttcaagatgggaactcattgttgcttattggtcctccaggtgtggggaaaactacaatgattaggtttgtgttagtttcttcctacattgatctgcttgctcatagttcctttagatcatggatttgatatgtagtcatcattttgctatttcagggaggtagcacgaatgctaggaaatgactatgagaagagagtaatgattgttgatacttccaatgagattggtggtgatggtgatatacctcatccagggatcggtaatgctaggcggatgcaagtccctaactctgacatacaaacacaggttggttagtagtttagattgagctttgtgtatttaagtgtggttggagaatggttatatgtgtttcactttacttaccttcaggtgctgattgaggcagtagaaaacgatatgccccaagtaattgtgattgatgagattggaactaaacttgaagcgatagctgcaagtactatagcagaacgtggaatccagttagtcgccactgctcatggagccactatcgagaatttgattaagaatccttcattagaccttctggttggaagtgtacaggttagtcatcatatgtttgcataccgttcaatcccaagattggtcgtagtttggagattctagtttgacattattttgatgagaatctcttgcaaattgttattctagcataattcaatgccaacatagcactgcatttcttatccaaaaattggtttaggagatatgtttccgtttccgcacgtgcatcttgatatattagctaaacaagagatgacgaggcacaggaactgcgtagaagatttgaattgagtgagatcatgttgtggtagctcaaatggtcaatgtttttggacaaaatattttctgttgactcgttgttcagccctgtaaagatgcattctataataacttttatttcagacatattgatggagactttttggcagagtgtaactcttggagatgaggaagcgaccagaagaggtggccagaagactgtccttgaaagaaaaggtccttcaacatttaactgtggtgcagaaatagtttcaaagactgaagttcgagttcatcgtagtcttgaagcaactgttgatgctatcctcgcaggtagattctgtcttttttaagttggaactgtaggtagatccaaggtccagatacataaatccggcatatattttgattcaacacctttttaagattctggcttcagtgaacttttttcttttggctcatcccctggctaaaaggtcgcttaccaaacgttgaaatccgcaaaataaagtctcatggagtggaagtgattatggagaaggaacctttcatcgacgagaagactgtggataagaaacatgaagaggaaacattagatgtttcgaagctcaccaaggaggaaactgtctctgaagtccttcaaactaaggagataactgaagcagaatcttcagagaaagatacattgatgtatctatatgtctatggggtaaaattataatgacttttgcagattctccagtttttaatagtctgatgctatctctgttaatttccaatattaatacacttattcgtcaatttctcccacccagattgcagaatcaactgttcttcaggcaatcaaacaactagagatggaaactgcggtagagttaactgacgacattagtgaagcagaagccttactcgcgttgcaagcaaagatcaggaagaatccccggattaaatcatttgctacatctcacggtatacctgtttatgtaacaaaggtaaaaaaataactaagaatgtcttgttcttcaaggtttttagtatcagcttccttaccaaaagaagcactttttcttgcagactaactcaggtatccaagtggccaaggcgatacgggcattactaacagattacgaagacggactcggagagtttggatcagaagatcgtctaaaactatctgaaaaaatggacgccttagaagtaactaaagagctagtcaaaaaaattctttgatagtaccacagttcactattgcttaacattgatttgtttatatgcaggaagcgagattagcgatagagcggatagtgataccgaaaaaggaaacaaccgatttactcccgaggccacctaggattgtgtctcttcaaggaaagctagtcaggaagtataatttacgatcagaaagaaaatggagaggggatgagatgtatctacggattctcccttatagcacggaagaagatagagacgaccgtgaagatgaaggagagtttggagaagcgaacggggaagagcttgacgagttaggtttcgccaccggcgagtctaatgactcaccctctggcatcgataggttacctctattgcctgattagttttatttgttcatacattgttacagatacacttttgtgaatgagaaaagtcaaaaaaaagaaaaaaatgtcaactgaaaaaaaaaatgaattgggtaatttatgaattgaaactcaaactagtctcgaaattttgtagatgcctaatttttcactaaaaacgcttagctcgtcggaatttgacttccaactaattttgttcttaaaaagttcttggaaaactcgcttattttcatatcataaatcaattattcatgttaaatttagaaatatcatactcttaaaaaatatagttgactttacagcaaatcaaacactttgattgattttgtttcttgcagatcctttaaaaaaggatgggggtaatgaagttgtgtgacctgagtgactctatgcatatctaaccgtcattagaaatttctttaacttatctttatctccttttcagagatcatgatccattttaatcctatgattgttatttaattcaa

SEQ ID NO: 28544 - DNA, 2138 bp, Arabidopsis thaliana landsberg
tacgcacattctagttttgaaaatagttaaattgtcccccctcatacttaggaaaatagtttacatctttaaagtattaaaatagtataagatatattattttaaattctaatcttaacattcttaaatgatgatttttgttttcattcataggcaaaatatgagttttcgttcactaattggagtgcattgataaatgataataaattggagttttcgtttacaactttatatatatggtccaaatttcagtggagactccacacaaattccaaattattcctttgccattcaactttgtttgtgcatcattccaaatactactctcaattccctttcgttaatcattgcattcttttattcgtgcgttactaacaccactacactatctacgaacaacaccaattgtgcataatgtagttggagtttttttaaaatttttatatatatagcaaattgaatatcatcaaaagtcactcaaggaaatcatctttaatcgatagatatgttcaagggttagttaaatatatgtacatatgagatgatataattaagaatgtatatatggaaagttgatatttaggtgtaataaaacgtgcaaatcgaatatgcctattttaatcctattgttctgacatacatttagtgtataattattttgttagtatgctaaactagcatataacgcattatcgagataatatcgttagcgaaatgtggatagcgtttgatgcatggatgaaatgacatggagtacaaaccaacttgatatgttaataatatatttgaagatataaacaaatattcagttattgaaccaatgtttagatttcaaagacacatatatatgcgaagacgataacattattattaaaagttaacaaaatatttagcatgaagagcaataaaagttgacttgcgactgaataatcatgtagaaaaaatacatgcattagaatagttaacagataacgtattatcaggataatattgttagcgaaatatggatggagttttgatatatggatgaaaaaacttaagatacaaacctacttaacaggttaataatacagttgacgatataaacaaattatcagctattgaaccaacgatttgatttcaaagattgtataattatgggaagatgaaacataattattaaaaagtaacaaaatatttaacgtcaagagcaaatatgatataggggtataagagtattttcatgatgtagagaaaaggctcaacaatagctttttcagacacttaattttgtaatcttttatgtaaacagagtgataatacccaaaaataaatcaaaacagattaaaaactaagatgtgcttcttagctaagagtttattatgagtgataaaaacagttatgtgtcatgttccaaaattttaattttaataatttttaagatgcaaggctaaacattgtagatggtcttagtaatcaaacaaacgcattaacgcatgcatatttgtttttaattgtgagttaacaataacagtggcattgtcctccgtgagacatagatttgcagtaaccgccttttccattgtcgcatccattgagacaccaactgttacatctctgctcgtcattttttgtgttgcactttccaaatttcgggtggttattacaacacaaggaaccaccattctctacattatatccttcaacatctgccaatatcacaaagaattgaaacagttttgtctaatatgagttcatggaattttgtgattaaagtaataagtttgtattgtaacgcaaaaataagtttgttagagtgtaaaagcttgagtaaatacccctaattataagagagaatacgttccaataaatgaaaaagtgagaataaggagctaagcaaaggaaaaaactttcaaaccagccaatgttaatagtttttttttttttttttataagtgtttatagatgattgtgaaagtgatgattttattataatacaatgagatgtttatatacacgtagaggtaactaatcacaattaatgtaaatatatgaatatacataattagaggattgattgatatattcaaggatataaatatattctttgattgattgtgaagatacgatggtatccgtttaaacttgttttggtaatc

SEQ ID NO: 28545 - DNA, 2316 bp, Arabidopsis thaliana landsberg
ctcgcttacttcaaagtcaattactccgcattcgtctcgttagtccttgctttctccatactctagcatacctagtaattcctaacatacactacctttcctgtccttacaatctctctgatctgaaacttttacaaatttctttctacagcaatcattgttccaggatctccagttacctgcaaaatagctcaaaaatgattactaaagagctaaaataggtaaatcagagacacccatttttttactccactttctcataatcaaggtaaaaagaacaatatatttaaggttatgcttctctaactttcaaaagtgaacactgagcattcccacagaaatttgcacaggcaatacaactcagaatgcagattataagcatagggtaatcaaaggtagcacactgttgaataactttctcgttatattaaattcaagaagttgcaccaaaagtttcaaataaactttaatacacatcctataatagagtcctgcatgtggatcatcatcagtttcaaaaggcaacgaaaatccaactaatagatataaaagttaaaatgataccctccataatatttctgatgtcttccaacgattagtaagatgttcaaacagaagtctgaaacccacaggctacagtgcgaaacaaatatcaggaccaacacaaatcatattaggtagatgtacctggatggtcaatgcatgttccgtaatatctacaactcttgctctgaatgtgtcaactagccacatgatctgtgaattcattaaaacagaagcttaatcaaatttagagagaaaactaaacaccacctttgccctaatcagaagcaaccagccagtacagtaaactctaatttcccataggcaaggaatagtacctctgccctggattctggatgtgcattcacttttacaagcatcagctcacgctccacttgcggctcacttgagatatcttcaacctaattcatgtccaagtcaatgaagagaatggaaaaggaaatcgcaaatgtaatcttcaaataatgaataagcaaattggctgatgcgtaaagttggtgcgaatgaaactatagtcatgcagaaactaataagtgcgatctaacaaaagaacaacctttagaacattaacgagcttctggagttgctcgatgacctgctgaagtaccctttcagttccacagacaactatggtgaatagagccttgtctctgttcagaccaacagcaagactctcaatattgtatcctctccttgcaaacactcctgcaatcctattaatcattccgctttcgtctccaacaaatactgaaattgtgtgcttcctcaccctgattttaatgcacaaagaatcaatcaaagcaaaggccaaaaggaaacgactttaagcaaatattattcacagtacttcgattttggagtcgcagatgaagcttcggagaaagacgcatcagagatcttcccatcgacgcttctaacgaatccttccattctcttacccatttcatcgccacggtgcgaagatataccggagagatatgaaatcttcgccgggaacgatacacgcgtcgaggatacaagagcaggagaagaatcggaacatgccgattctcaagccgcgaatagatggtgaagaacttacagaaatggccgccattgacgagacgaagccgaaggttttttgctactgaagaagactgacgacgacgaaacggcaagtgaaaaagaacgtatatatgttggttagaccggtcaaaccgtccggtccggttcggttgttaacgaccttagaaatcaatggctttaagaaaagcccaaaaggcttcgagtagataagaccaacacgtcagctccacgtataacaaccttttcgagtcaactattttcctaattttgctaaaaagtatcttgggttcgtcggaactaattgtaattatgagaagtttagggtaaaattcataatttaggaaaagaaaatgattttaaatccggtaaagccaccgaaaaaagtggacaatcaagaagagtccatatttacgcgggactcgccaaataatgattgaaaggaaaagtcaaatcaaagtcaatcggaaacagacgtcgccaataatatcttcacccgtcaaattaaaattaattatttctcgataagcaacgcgctagagacggatctcacataatcaccagatcaattttctcgagaaaaagaaaatgtgattatccattcgattttttcgcagaagaagacgaaagagagaagaagagaaagagatttgaaatcatggcgaatgtagtgggacagctaaaacgagg

SEQ ID NO: 28546 - DNA, 3569 bp, Arabidopsis thaliana landsberg
  unsure (1)..(3569): unsure at all n locations
ataaaataatttcgaagttctaccaaaaatatgaataatgtgcatatgtataaactctgccatggttgaacaaaagtttatattttcgacgcttttcaaattaatacattgatactttaggtatatacgccgtacacagcacgtctacgtagccaacttttgtcatgcatgatgcatttatacaaatcgagttatttgtaagtaatatcgtaaatttctatttaaatccagtgcaatatatttttatcattaaaaatgcaaatcaaacatgaagcatatgaaaaaaatacaccagaaccatacattttatattaaaaaaattatctacaacaactatgcaataaaattatgaaaatgtaaataatcaatccattgggatagttttcataattaacaataatatgttggcaaatcgaagtgagtgaagcatgagatggaaattaaaaaagaggaaaacagttaggggcggtgacggtggaagagcattaacgacatttggtgatgacaaagcagatctatgcaccaaccagatcttgtatatctgccacatcatccacgccagcaaaaaatatacatacgtgttatgtttaattaatcaaagtttatagcttctcgtggttacagatttttctttctttttttagtagatatgataatgtgaaataactataaatcataagtcgtatctaatttagttaaaattaaagtgagatacatttgacataatagtgtatatatacgtgtaattagtgacgtgtattatattttttccaaatgcacatgaacgcatacgtaaccacttgcatgtgaatttattatctacctctactctctcccgacgatttctcgtcttttcatttatttcattctttatacaaaacagttttcacttctagttatgtctatctattgttcttatgtattttattatgtgtatatagatgccaattctcaatttttcatctccaactaacaaaacaacttgacgatcgatatgctaaaacattgtaaggcatgtccgtgtgtattgaatggtatcacagtctacggaagttgcacattaatgtggaaaaatgtatgtcgaacaaatataaagtacataaatagatctgacccactgctccaagaggactagggcctgtacggcgtacgatcatgtatttgatcatctgacaatgaaaacatgatatatagcacaacccaaaagatccaatctgatatgatatatatatatatatatatatatatatatatatatatgaatccaaatatatgtcaatgaaaacatgatatatagcacaacccaaaagatccaatctgatatgatatatatgaatccaactatatgtctttaaaatatcgattcatttcacatatattgagcaagtatagtactcctatagtctcctactgtatatgagttaattcacttattaagttgttactattgaactttgacatggtattagtgtatggttattaatccaagtaaagtttgttatctaatcctaaatgatttataaaggaatctttgatttacataacacttgttctttgatttgatttgagatacgtatctaggaacctttgttttgggaagaaaatgatgtgtgcgcttaattaatactaatacaaagcgctgaaatcatgaaataatgtcacaaacatgtaaatgcgcagcaattacttaggcttggaatacaagtaagtatagatgctaattatgaactccaaatcaagcaatacaagaaatcatacaaaatgatttataaaggaacctcggattttagctttgtgcataaatgaatctttggtttatttaaattaaacatgatcctacatatatgctcgatcgaaatttgaacactattaatgcataatatcatggacaaccgatgagatatttgttaattagaattttcttaagagatagctaagaaataattttatagagaaagatgtaatcgaaaatgtaaaataagacagatttaaagttcaagatatagtattgagtgttatatatatcatctctaattcacttttgaccaaactaaaattaaatctgacacatagtcacactgtttaacataaacagatttcacgagaggatttgtagcataaatttgataattataattttatcaagtaaaaataataaaatacctataattatgtcgcaccatattcactacaattgtttattctccaaaaaaaaacaatctttttgctgtaaaaatgtttagatttttgttaattttcctttttttttgtttttggtttacagattttgtttgtatagacaaggtcgggctgacccggatattcggatccgtattgacaccgtgaacccaaccaaccaaaaccctaaacccttttttgacttgtctctacttgttagttcaccgccgcgttctcagtctctcaaattcctctgtgctttcgattcttaccagtgaatntttcttattttacttatcttatgctcgtattggaggaactgagcaaaaccctagttgtttaattgggtcaaatttgtagattgagaatccaaatttatcgacctagttattgaatcccgagttgataccttgaaacccttttgcagtcgcagtaaaatgggtaagctggggaagaaagctaggaaatttgccaagaaaaatctccagtctgttgagaaacgaagcagaaagctcaagctttttatcaagaagaaatttgcaaagagtaagttattcttcgctttcacttctcttatcttccctttttagtgttggaatattggatacataatggttgtgctatagttgaaagatttgattttttattgtactttgtatctaattttctcgctgattgtttagagccaatgataactttctgtgggtttaggaaatgagcgtcaccaagcaggagataaacaggagaagaaggtagagcaacaacctaagaagaggtaagagttttgactgtgtagctgtacagtcctgccactcaaacatctgtgtgcagttatccgtttgagtttcttgcatacgctgcttctctgttcttactttatttaagtaaagtttgctccatttgcctttgtgtttcattagttttttaaaagattgatagctcgaatattagttatgcactgtgtgaaatgatttctcgcctatacgttttcagatgtcaagaagaagaatttcaggatatagcaatagatgcagtattcggaaaggatgatgatgaagttctccgcgatggtgattcagatagtgatggatatctggatgaggtatttaacttagtgtttggtgaaaatatgaacacaaattttgttttagctattttctgttgtttcaggttttgttagcatgctcttattgtttatacagcaaagtaacattgaaactatcaatcatcccatgcagttggtaaatgaaactgactcagatattatgaagtgcaaagtactctcaagatcttttttagccacttgctgtgacatggttgataaggagcagtatgttccagcattggttagattgttaaattggtatcgagctgcatgtcaatatgggcac

SEQ ID NO: 28547 - DNA, 1384 bp, Arabidopsis thaliana landsberg
tatacatactcggatcagtcgtcaaaagctttggaatttgatacttttgatttttcgagaatcttgaaaatcagtcatgggttctggaaaagagcgtgacactttcgtctacctcgctaagctctctgagcaagctgagcgttatgaaggtaaggaatcttcttcttcttcttctcactcgaatcaggtctttttgatagcttcttgagctcgatttctgtttgattttactggactttgatatcatcgaacgggtttcaatcgtttggtttgattgagagtttacgaatggggaacttcttatcaaggaattagattcaaaagtcttgatttttagcagatgggtattgaaaaatgtgaattctttttttcacagaaatggtggaatcaatgaaaagtgttgcgaaattgaatgttgatctgacggtggaagagaggaacttactctctgtgggttacaagaacgtgattggttcaaggagagcttcgtggaggatcttctcgtcgattgaacaaaaggaagcagtgaaagggaatgatgttaatgtaaagaggatcaaagagtatatggagaaggttgagttagagctttctaacatatgcattgatattatgtctgtcttagatgagcatctcattccttcggcttccgagggtgaatctactgtcttcttcaacaagatgtaagctctataatgcttctttacatggtgtttaacttaaggttgtgtgtctgaagattttgttttggtttttgtaggaaaggtgactattaccgctatcttgctgagttcaaatcatggaacgagaggaaagaggctgctgatcagtctttgaaagcctatgaggtgttcttatagtgatttgtagtgttattgatcactggacattcttggtttttcgttactttacttttgagtttttgtttgtttctttcctttacagattgctactactgctgctgaggctaagctccctccaacacaccctatcagattgggtttggctttgaatttctctgtcttctactacgagatcatgaacgcacctgaaaggtttacagattgttaattatactactaagataagaaaaaagactcattgttttggagatttgagatttttttttcttgctcttttctcttcagggcatgtcaccttgctaagcaggcgttcgatgaagctatctcagagcttgacactctgaacgaggaatcctacaaagatagcaccttaataatgcaactccttagggacaatctgaccttgtggacttctgacatctcagaagaaggaggtaatgatcatcactttggacctaagcacactctttaaatatgatgttttgatgtcttacacaattgctctttggtgtttttccatt

SEQ ID NO: 28548 - DNA, 1498 bp, Arabidopsis thaliana landsberg
taacggatgatgggggacgtgtgaaatttcgttaatgactgatcacgccctctttatttaggcctggtcaacgaaagatcatgttttaaaaattagtcaacgtttagttcatgttttaaacggtcacatacgaagttgatgtataaaatggccattcttttaaagttgggggattaaataacatttttccccaaataaaacatactaacttaatttatggaaaataattattttgatttgaatatacaaataaatgtgaaatccgcataatacccgatcaagatgaaaaatgatgaatcaatccatgtcatttaacattttttctacaatttatatctgcatgtgcacataaagttctatgaccacgcaagttttctgagagatatataattcaaaaatgttgggttttgggacaattttagaaaaacaaaattggcgtgccatgttgatgacttcaatacgtgggcttaaacctgggtagaccaaaagttatcaccaatttatttacaattttaagcgtctgtctccattttttttttttcaatttattgtgattttatttgatgtggcctactatagtagtgattttgcgcatcaaagctaaccaaaaaaatattgcgcatcaaatgtatataattagtttttgtttttataatgaaatgtatatgagtatatacgaatcatatttcatttccacttaatattagtatataaaagtttcatgatttatgtcatttcgaatttaaatttgtcattagtggaattttaatgtgggttataccaaaaaagaacaaaaagcattgtcttaaagaaaacctaatttaagttggatgggttgtttatactcttatatctttttctttttgaaaacttaagatataaaattatcaattacaattcattttttcaaaaaacttgtgttaccattaagttcgttatatggtatgctcctataggatatcatggttaagttttttttttatcaaagggatatcagggttaattatatatccattatatgtatcatattttacttgattataaccaatttcagactaggtagttaattttttttctttatttcatgttcttgagttgttattatagtgtaatgccttaatattattagagattgtaattacaatatatataggctagttacaagagagactagggtaatactaattacaattataccctatttatacataacctctatacaccccctcaagatggaggcaggggaatgactccaatcttgctattgagctcagtgaatcgttgacgtgagagagtcttggtgagagagtcagcgagttggtctttggtggagacgtgcgcaacgcggagtattccagcttgaacattgtcacgtatgaaatggtagtccaaggcgatatgtttcatacgtgaatgaaaaacaaaattggccgagagatatgtggcaccgacattgtcacagtagatgaccggcgtaatgagcagcggatactccaag

SEQ ID NO: 28549 - DNA, 406 bp, Arabidopsis thaliana landsberg
gactcgccttcgttgtgttacatcattgataacaatttccatttcatccatcaactcgttcaatttcatcacccttctgctcattctcaatatacttctcgaggcaacgtttaatattcccgcggttttgtcccatcgcttccgggatcccattgcctaacgatccagatgtcatttccattgtggtatgtaccctgagaccaattacaagaagaataaaacgcaggttttcgcgttggttttgataggtttcgtaatggcagctttgtctacttccatagcagaactatggtaagatacgacatctctctatgcaatatgttattgtgtgtgggtcataaacctttcgttttagcaaggtcatgttttgtcctccaactaattaattcggccttctcgtctgtgt

SEQ ID NO: 28550 - DNA, 1579 bp, Arabidopsis thaliana landsberg
gaagttcaaagaacagagaggtctgaacaagacactgagtgatcaagcaatccatcttgttcttgttgctaaagctcgtggaattactgctggggagaattattttgttgatcttccggaaacatctaagacggaactcacgtatgggtctcttttgaactgttactgcaaggagttgttgacagagaaagcggaaggtttgctgaataagatgaaagagctcaacattactcctagttccatgtcttataacagcctcatgactctttacaccaagacaggtgagactgagaaagttccggcgatgattcaagaattgaaggcggagaatgtgatgccggattcgtacacttataatgtctggatgagggctttggctgctactaatgatatttctggtgttgagagagtcattgaagagatgaatagagatggtagagttgctccggattggactacgtatagcaatatggcatcgatatatgttgatgctggactgtctcagaaagctgagaaggctcttcaggaactggagatgaaaaacacgcaacgggattttacggcatatcagtttcttattactttgtatggacgtctggggaagctgactgaagtttacagaatttggcgttcgttgaggctggctattccgaaaacctcaaatgtagcttatctaaacatgatacaagtgctggtcaagttgaatgatttacctggtgcagagacattgttcaaggaatggcaagctaactgttctacttatgacatcaggattgtgaatgtgttgattggagcttatgctcaagagggtctaatccagaaagcaaatgagctcaaggagaaagctcccagaagaggtggaaagctcaatgctaaaacatgggagatcttcatggattactatgtaaagagcggtgatatggctcgagcactcgaatgcatgtcaaagtcagtctccatcggcaaaggagatggtggcaagtggctaccgtcacatgaaacagtcagagctttgatgagctatttcgagcaaaagaaagatgttaatggagctgagaatttgttggagattttaaagaatggaacagacaacataggcgcagaaatatttgaaccattgataagaacatatgcagcagcgggaaagagtcaccctgctatgcgacggcgcctgaagatggaaaacgtggaggttaatgaagcgacaaagaagctactcgatgaagtatctcaggatgtgtgaggtctgttccatctctttctccttcattattcacttcagacaaagacatcattagtcgtgataggggcacttgcattctcacagctctgtctcttattggtaataaaaaaataggctctgaatcggcaaaatcaattgtatgggtctgttttactttcaccgtagactgtttgttcatgtttttgtgaattgtttttggtttagcttggatttacagttgagacagctctcacaacgtaatctcttttctttggagatcttattttgctgatttaagacagaaacattatcaagaatacgatattatgctcatcattggtaattaaattgggaaac

SEQ ID NO: 28551 - DNA, 3003 bp, Arabidopsis thaliana landsberg
aaacagtagtgtctgacgaaactcggatgcttagataagctcctccaccaattgcagaagctttatgcagtccgattgccacaaatcgaagcctccacagtccacaaagcgaaacccacaaattcaatcttcctaaaccctagaatcgccactcgcattgcacacaaagtctgctcttcgaaacttttccgggtttcgctttttaaagcccagaattttcagattttcctatagtaacttctctgaatgttcaactctatttgaatttctacagagaaagacatagcagttatcgattgaaaactcagaagaagaagcataagagcgtgtgctcacgcacgggttaagtttgtcaatattacataaagttcaatacatattggttgaagtgttagttttgcaattataatttttttgttggtcatatttgcaaatttcccatatttttagtctaatttcagtttttagtttatttcggttcggtttcatagttcttttggatttcaaacggtttataaatacatttcggttcgattacagttcaaataattctatttttccggttcaggttattcttttttccggaatgcgaaaaaaagaatatcattgtttgctctctcaatctcaacaacaacacttctctcactcaatcgctttctctttgagacgtttgtttagtttcaacaaacaaatcaaaacacacaaagtttgtgtcttcccttaagattcactcaaatctcgcaacacacacattcaacaaatcctgattcataacatctcaccaaatctctcaaaagatctccaaatctaaaatgttcttcttcttcttcttcatctgaatccaaaacaacaatggtgagacgtttcctctcttctcacaaatctctcatcactgttttctggatcgccactttcgcttccttattcatctggcaattcggcggcgtttccacaaatctctactccggtttctcccttttctggtcgtcgtcttcaacaaccaccaccgtcttctccggtggattccccaagctcagacctgtagttttcaatctaacagacttcggtgctgtcggcgatggtgtcacaatcaacactgaagctttcgagaaagctatttataagatctctaagcttgctaagaaaggaggtggtcaacttaatgttcctcctggtcgttggctcactgctccgtttaatctcactagttatatgactcttttcctctctgagaacgctgagattcttgctcttcaggttttgtttcctctgatttgaaattgtgatctatgtgtttgggatctgtttagggttttgatgcagagtttgttatttggttcactattgaattaagattgggttttgatgttgaaacgtttttaggatgaaaagtattggtctttgcttcctcctttaccttcatatggatatggaagagagcatcatggacctcgttatggaagtttcattcatggacagaatcttagagatgttgttgttacaggttagttgattggtttgtgaattttgcttctggggactattcttgtgtttgcaatgtaactcttcttgtgtttgcattgtccttgttgagctttttaggcagtagctgaaatgagggcttttcatgtagtaagactattcagaatgtttaagctctagttgtaaaggttttatgtctctcttagctgcttgaattgactaagttttggtattagatgatcaaagttgaattgactcaacttatgtggctaatagtattttctttctttgccaaacctgggagtttaatctgtcaactgtatgattgatggctaattgatgatggaaaacagggaataatggtagcaacaacgggcagggacaaacgtggtggaagaagtatcgccaggagctgcttaaccacacgagaggaccactggtgcagataatgtggtcaagtgacattgtttttgccaatatcactttgcgtgattctccattttggacgcttcacccatatgactgcaaaaatgtcacaatcaccaatatgaccattttggcgcctgtgttcgaagccccaaacactgatggtatcgatccgggtaagtaattctgactttggctggatgttgcaactcagatatttaacaaaggaattagatacctaagctcatgtgatgcaaataataaccgaacagaaacagtcaagatggctagagctagtgtaattagtagtgatacctctaggcctctaagctattagatcaatgaaacaaaatggagaaacaatcttagttccctacctgcaactgggattctagcgactagtatatgtagacttcaggaatttcagatgcttaagagcgacacagctcctttcattgtatctgaccattgcatataaccatatggtacctaatggtacataacatataaccttattgataaaaatcaggtcagagtatgggcttggacgatctgtaaacattacttggctttaatggtggctaatatctttttgttgtgcatcagattcgtgtgaggacatgttaatcgagaactcttacatcagcgttggggatgatggaatcgcaataaagagcggttgggaccagtatggaactacatatggaaaaccttcaaagaacatactcatccgcaacctcatcatccgctccatggttaggtaagagagaattgctttccctaatcaatgttgatctaataatcaacgtgtacctaaagcctctgtgcaaaaacagcgctggtatatcaataggaagtgagatgtctggtggtgtctcgaatatcacagtcgagaatattctgatttggagctcccggcgtggagttaggattaaaaccgcaccaggacgaggtgggtatgtccgggatataacattccggaatgtcacattggatgagttgagagttggtattgtcattaaaacagactacaacgagcacccagatggtggattcaatccccaagcctttccgatactcgagaacataaaaaac

SEQ ID NO: 28552 - DNA, 1642 bp, Arabidopsis thaliana landsberg
  unsure (1)..(1642): unsure at all n locations
accaggtggattttactatggaaagatcaagtttcctcccgagtatccttacaagccaccagggattacgtatgttccaatggttcctccaaattcagtctcaacattactcttacctcagtttttgtccagttttttaatgaaccaaatctttttctgtttgcctcagaatgactacaccaaatggtcgattcatgacacagaagaaaatttgtttatctatgagtgattgtaaggacaatctgcactttctgttcattatttcgtatcaattaacttgtctaatatcgaaataagttgacatggcatttacagttcatccagaaagctggaatccgatgtggtctgtatcaaggtatagattctttctttacttttggaagatgacaatcgatatacccgttgataaccaactttttttcatgaatgcagcatacttacaggacttctctcatttatggtaagctcactgtaggttctacatatttatggacatcttgtttgaaaattcttcttatattgtaatggtttattagcttagatatgaatattcaaaaaggaagtctattttttcttttctgatctcaagctttctctaaacgttttccttgcggcgcagatggataccagtccgacaactggaagtgttaacactactgtaattgagaaacaacggttggctaagtcatctctcgctttcaatgtaaaacgtaagattttcccatcatcaaaaaatttcaaattctggattcatatagaagctaagtttagttatctgtggttaggatagtcataaaagctggttagataacgaatataggaatgaatgcagtcctnnnnnnnnnnnnnnnnnnnnnnnnnnntgaatccaatgttcttacttgtgacagcccagcatttcgaaagctatttccagagtatgtagagaagtacaaccagcagcaactagctgagcaagctaccacacaactgacaacaccagagtctcctcaaaagagcgataccaaagtcgagtcagagaaaaccatcgatccaacaaagggagattcagaaggtggcttgaaggagaggaaaaagaacaataaacagggattgccagcgtggataatactgttgctagtgtcggttttcggtgtggtaatggcgttgcctctgcttcaactgtgatttctatgcaacaaacctcgacctggttttcgtataatctctccttgtgtctctctctcttcagcatcaagagtagtctccttttgtctagtgctcttcgtctgaatttactcatttagcacctcatggtttgtgcttgtaaaagcagataacataagtttggtttcacaattacatacatattgtagcttcgttggaactactttgtatagtatatatgaattgaggataatggtttggatttgaaaaatagaaccgtatggttttcaaattgtacttctcctagagctcacaggttaatttgtcaatttatgtaaatactctggtgtagtaacttgatgaaaacagaagtgacagagagaatacacagacaatagtgaatagaattgttaggtatattggtccaattaagcaattgtccctttaggcccattggtaagaaaagaaaaaatccatccttaatgataaattaaaa

SEQ ID NO: 28553 - DNA, 1618 bp, Arabidopsis thaliana landsberg
  unsure (1)..(1618): unsure at all n locations
agagcaccaaaagtcaaagtcaaagccaaattcgagaaattaccttaatatccttttccactatatatcatgcacacatatatacaacaagacatatcaccataactatttcatttacacagaacccaaaccaagacaatatttgatcaatttatcaaattctttcaacccctagtctaaacacaaaaatgaactccaatagtttcttaatctcagcagccttaatcttctctctactatcatcaaattctccaacatcgattcttgctcaaatcaatacaccatgttcaccatctatgctctctagcgttacaggttgcacgagttttctaacgggaggtggtagttttccgacctcagattgttgtggggctcttaaatcgttaacaggaaccggtatggactgtttgtgtctgatagtaaccgcaggtgttccaatcagtattcctataaaccgaactttagccatctctctccctcgtgcatgtggcattcctggtgtccccgttcaatgcaaaggtatctctctaacttctatattattattctgttttttttttttatataattctgagccctacttttttttttatgtttgatatctatataatgacattaatggacatttttttttagtttttcaattgagatttctttatttcgtatctcattaaaatatttttgtgaaacttttcagcttctgcagcacctctccctgctccaggtacttatgtttttgataattttattgatatacttaagcttgttactttttattgttaccaacaaaagctcatgtatagttcataactcacaggtcctgcgtctttcggtccgaccacttctcctatagattcgcaaacttctgatcctgaaggtactcgcgaactttttactgcaacttctaactcctaaacattttgttcagaatttgtttctacaagtttttcgagtttgttgacgtcacataactcgcagggtctgcttctttccgtccgcccacttctccgacaacttcgcaaactcctaatggtaaaccaaataaattcctaagaatgtatattagtaacataatttgttactaatattttcgagtttattgacaagtagacaaggatctcagcggatcgggcaacggaggagatccaatggggtttgctccacctgcaccctcgtcgtcgccttcctcttcgcactctctcaagctttcgtatcttctatttgctttcgcctttacgattatcaaattcatctaattaaagagcaataccatactataaaagacgttctttacgttcatattttacctgattcttgttaaaataatgttttagagttttgttgtatttgatagccctattaataaaacagtttccttaattttatacacaccaaatcatgcatttaaaaacgagactctgcaaaaaccaaaggttgagagatagaaagaaaatatgaacaaatccaaaatagccttttgtccatccacctacaattaaccctgattactctactttttttttaatttacttccacccatcagaccactcatcttcttccttggctacaaaatcacctntggtttcaaacttaccaccattcttgatctcttcaccac

SEQ ID NO: 28554 - DNA, 698 bp, Arabidopsis thaliana landsberg
aacaaagacccaaaataacacactaaatactacatgacatagcaaaagacttcagtttcggatacaactactttgagagacatcttttgtttgtgaatccaacacaatcatctgtctgcatctccaatcattcctctgctggcggcgaacgagaggggctgcttcagtttcaaaaccacaaaaaaaaactggaagtaagatgatgatattgataccattcaaatgtgatctaaagatagcttgggatgtggtacctctcgcgtaacgggctgtctgctccatcgtatcctcttccagcttctacttccattatttgcccagggctctcaacttgaccattctcagggcttgacttcgaccttgaccttgacctctccctcctcttctcatatggaggaggactcctgctttcccttctcttctcatatggcggaggactcctgctttccctcctcttctcatatggaggaggactcctgctttcaccacgtccttttcttgggcttcggttccttacagctccattctctgggctagccactctctccctcctacggtcatccctcttgtaatctgggctaagcctggctctcttgtaagggctggggctgcgtcttccacgaccataatcaggactagtcctttcccttttgtgagctactggactagcacctcggccatagtcaggacttcccctt

SEQ ID NO: 28555 - DNA, 918 bp, Arabidopsis thaliana landsberg
tatatctcaaatatatgattttctctcttctcacattcagacaacaatagtaaaatcttgataattggttagccattaaaggagatgccttcttggctcggtttaagtgatcaccatgagccatgactattatcttcttcttctctctctgattagttttgttaactctgagttataaacatgagtaatttgagagtcatatgatcttgaactgcaatctctcattactcaagtctcaacatactgtttcgatgtttctcgctccatttttttgaacataaattgtaatgtcattttcctgcattagatgtgattttgagctcagagagcataatgttactagtttcataacttgtaaaggcagagtttttgagtgataacaatgatagaaacagactactaactcaattattagtagtaacgagtaggtactaagatattaaccatgaagaaacaaaactagtctcacatgataacacagaactgacttttatacctgaagaagagtataataactcaaatgaccagaatcaagctcaagtttttgagttttgatctatggaaccattattacaaatagcttagtaggtgtagccttttacaaacataccctccttggcttcctcagactcgccttctccagtgtatttcccgagctgagccagcgaattggctttggctctggccaagagaatgtcctgagccgccttcacgttctcttccttgcctccccatgtcttcaagcaagtgttctgcaaggcacgtgcgtaggagaaggacacgtgccatgggttcggtgcctggttcattgcgttcaagttcaaggtcgcctccaactcggactgtccaccagacaagaactgcatacaatagatagtttaacataaatctcaagcatagtttcttgaactgcaaaag

SEQ ID NO: 28556 - DNA, 2578 bp, Arabidopsis thaliana landsberg
ctctataatatatataattatttaccttacctatcaaactcactagtttaacaaaattgataaaataaagaattaatttaatatcaaaaaatacatatatagacactgttaaaccccattaaaaccttaacacatcatatattaagtcgtttctactttctaatgatttaaaataaatctggacgtataactgtttttcacctattttgtagttgaatgtcaatgtcaaactcaaaacgttttgcacattctggcagtttctcgatgtcgtgtgaataaattttcagttttaataatgaaagaagtacttcaaatggtatgaaagtttatatcatatacattattaattattataacaaaacgggattacaaacaacttattgaatcacatgttctgtcgaacgtgtatatatttgtgcgcacaaatatatctcaaatacaacattggtgcaatatttgttaccccatacatatttgtgaaatccatatattatattattatattttcctttctctcaacataatgtgaataaaattttcagtcgtaataatgaaacaagtactctagtaacaaaataaaaaaccacatatcacttatcagccttaacaaccgagcccattacaatatgaaagatttgtttgtaatttacaaaggaaaagatttccttggtgtttatttgtaaaactattgtgaagccaaattaataattattataagtatttgacactctactcatatcgggttgggaatcatgcatgatatagtggtcatccaaaggatcaaacactagatgataaagaaggatatagggaagcataaaagggttccaataaagtcgtgctatgttcttcctatcccacctaagatagcaaacaggcctcctaagtatatatggtggatagagtatgtgttgaaactgtaaaatcttctaccggacaagagagttgcatgattgaattccccgctagtataagacacatgccaattatcgacgcctctactctgctcatgacgtcttggacgttatatgagatgtaatacataagtatcatcacaaccaagaagaatatataacacccgcccctccagtcctaatcgatatcttgggattggaacatctttgaacaagcacctaattaccaaggtacagagtattcgcagccctcagtgttgttgtgtatctagccatgatgagacataatacaattaaaaatcatccaaataactacatcaaatcaaatctatatacaacaacaatttccttacacgtattcgggcatacaactagggggttcagtttctaaaaagatttgtaatgatactctcaaggcaaataggcaatgagataatataatagacgactataaagacaagtcacttctttaactctcttttcgcctctcattttctgtgattaattacgacgaggcgcacaagactacagagaagaaacaggctaaaatgttatatatgtctaaatgatgaatgcagaatgcgtgtaagtctttttatactaattcaaaggtgataaaaagagatttgattaaatctgtatccaatcagagtttgataaaaaatttaccaatttaacacataattatttaattactattcaactcactattcaacaaatttaataaaaaaaaaccaaggatttagcatcaagtacatacatatatagacattaaaaccttaaaaatcaatatttagttatcttatttatacaaaaaatagtcatttactttcgatttctttcaaataattatttttgtggtgaatgtcgccaatgtcaaactcaaaaacgctttgctcatttagggagtctctcgacgtcctgtgaataaatttccgttttaataataatgaacaagtaattaaaatgggtataaaaattatatcatgcatatacattattttaattataacaaaagagtattacaaacaacttattgaatcacatgtatatcacccatttattattctgtatagtacattacaatgtcgaaacacagctcacagccaacaaatgccaaaaaaggaagaaaaaaaatcattcgaagtgccatagatcacattaaaatgatcaaattaagagggaattcggagatagagagggattggatttttggtaagtggaggtgaatcccatactgaaaatgcactttcagagttcatccatttgtctgtcatatcaggataatgacgatcaatcacatccttgagactctctgtagtattcacccattcaagccccttcttcgtgtaaatcgtttcattgaaatcactcgtgaaaaacctatccgcttctaatcgcctgaaattgtttaaattagtattagattattaaacttttctaatttactgtgatatcttcaagaaaacttggttctatatatatatatcgaaaatatataccttgtggccatgatgaggaaaatgtaaaaagcagtctcactgatagcaaaacctttgattttcttctctgccataagtcccacgagaagataaagctcctccacatcaccatcgtacacgtcatccaacacttcaatagcttcctcatcctccgttagatct

SEQ ID NO: 28557 - DNA, 1252 bp, Arabidopsis thaliana landsberg
  unsure (1)..(1252): unsure at all n locations
caccttggaactgtagcttccaagcttactgatctttttgttcaccaaaattcagacatatcaactggggaagggagagcttcttgtgttagccaggtaactaaactctctcacacacttctctatttatttatcttaccttttctaggcaatctcccttaaggtttgtgtatgttcttttcatcagcaactgcttacatgccggacatatatcgacaaagaaggtcttagacagcaacagctattagcagttatcccattgcatcacaagcattacattcttcccagtaagagtttttcttgtcccttgttaagattctgttagtttactagtgaaatctgatttcttttttctctcgactgttgttagattctgttaacaagcgggtacactttagtcctctcagacgaactgacacaagacagaatcattaccaagctatatcccgtcttcaaccttcaggtgcaatgtcctcatctttgagcttattagttaataatacaagcagtcaaatatcaaacagtttaagtaatatgcttggtttgactcacttagatgcccctgcatcgaaatcactctcctggcatttaggctcagagaccaagtctaccctcaaaggaacatccacagttgcaccaaggtgagttcacaaaaagctttagtactgcttctcacgttcttgataactaatacatatttactgtgcagctccaaagattcaaaagctttctcaaagacatctggagtgttccatctcttaggtacgagaaacagggagttggggaagtatcaaacatagcatttcttcttagacaactcttgccaagagattgatgatatacattgaaactcatgcaggtgatgatgaaaacatagcaaacaagaagcctttggctggttctcaggtctcaggtgttcctgctgcatccactgcccataaggtaaaaaaatttagaacacatgaaactaatctttcatgaatcgggcagttcatgtagaaaaatgcaactggattagtaagctgtgtatttgtaatcatggttttgatgagacaagtttgtgattcaacaggatttggaggttccgaaacttctatctgcacacaggtcacttgataacaacccgcgacgagagatcattcgagctcctgtccgggcacagagtgttctttttgcgttctttgtaaaacaaaaaactccagagctcacagctggctatgtcgcgtgactacgccttctctttgtnctgagc

SEQ ID NO: 28558 - DNA, 2035 bp, Arabidopsis thaliana landsberg
  unsure (1)..(2035): unsure at all n locations
ccctaccttcaggtacctctcctcttgaacattttctgtatctctacttcatgcacatatactttactgtgagaaagaatagttcttagcatatgatgataatacacgtattagtcttgtaaaaaggaagtttcttggtatataatagaaatacaaaagagtttgaaacaaggcaaaatcctaaagcaagaaacagggtcacttggtgtactgaaactaagttttctagcaaatcccaaagatcaaactaagcagaaaccccagcgttcaacaatgtattgatctctcctcttatattcacaggtcttccatcaaacatggaagagagacttgtctcacatagctccttgagttctcttgttttcgaaagtgcagcttcctgtattcaataccaaaatcaataaacagaatttgttagataatagccccttccaattccaaatttctgataatccacagtttagccaaaacaagctttttaagaacatgaggttacctgttttggccatatagcagaaagtgaattctgcagctccatgcgtcttctacccacatctttcaagctctctcttaacttcacttcacggtgcttcttctcctccagctctgaaacaagcctatctaggaatctgttcgacaaacaaatacatatatcagaagctgtggtactcactgtgatcccctgccagagattctttatcctaacgcaccttttggagttgaggatcatgatcagatcccgagatttcttgtttgttagcaatgaaatggccatggagatgtcaaccaccattggctctatggtttcaggagaatactgctgaagaaccatcggggagactgcttgcacgtggtgttgcaaggacagcgtatcttcatttctcagttctatcaaacgctggttcaaaaatgccttgacctgacacaagagaaacgacatcaactcaagaagcatatccaggattaaactgagaattagatagttagtgataagagtacctcatacaaatcatcaaggatcttattcctatattctgtctccaacagctggctcctctctcctccactccctaagacttgagttgtagaatctgtcaactgtgtctggtttgattctagcaaagctgaatcacctatttcttctacctgaggtgtttcaacacttacatcccaagaaatctcagaaacatcaacctcaaggccttggctttcttccgctttaaatggagaattctcaggaatatcgctggcattgacaatttcatatgaacctagatcatttccactatcaacttcttctaccatactaacatcccaatctatctcaggagtctcaagcgtaatatcccaatcaatgctgtctgcagccgcatctgtaccatttgcattctcagatgactgaatattatcagcatcgagaccttcagagtcccccaaaacgcttaatgatggagggttttcacgaatgtatttcaggttttgtagacaatcctcaaggcttctgcagacagatcaaaagcggtcaattcaatctccaggaaacaaggccaannatttagagagaaagagattgaagttaaccagtgatcttacatctttctcagtatgaacatcttgaacataggcagagtagtactccattgcccctgttactgagtcactgttgataacttccagaatcttgctaaaggtactaggaagcgaactcgcagtctccaaaagctcacgcctcacattgtttccctgatatcttaaatgtttaaactttatgtgatccttttaaaaaacatatagatgaaaatcaaccaagtttacaagtaaacctgcaatccaagctctcggcaagcatcctcgtattttgttgctgagagtgcaacgctccttttgatatcagcttctttacgatcaagttctgtcatttgttgctgaaccttttgcacttgctttttcagataagggcttcatgtttaacaaaaagaaaacatattagggagatcagaaatgccaaagtagagagactataggtaaaatcaag

SEQ ID NO: 28559 - DNA, 1584 bp, Arabidopsis thaliana landsberg
tgcaatggactattagcatagatcactgactctggttttcttgtattagtgataggaaagctaccttatctttaggcctgttctaatcatatattttccgtgcatgtgttggtgtatattcctaaattttgtacctattgaaattgaatgagactgaaatggtggtcgtcgtttctgaataaattaaatatcgctagccataaccactgtgtgacctggactgttatttttagtctttaatttcagtttctgttttgcgactgtgtaattttcatttgtctctcacttctgtatgcttatcgtttatatttggtttaatattctctcttctcttcaaagctacaggcggaaattcggctgttgcacataagtcaggatctctaagtactccagcaacttctactggacaagcaggggataataagtctttagtagtgcatagtgttgttccacgggatagtgatattgggaaagactcttctgattcaggaaaggaatctatcactttctcaaaaacaaagccaggcatgctgttgagaccggcttatgtaagaaagacgccaacaaagtttgatgaaacaaagaagcagtcagtggctgttggatatctaaagaaaagtggattggatggtgagaagaaactagatactgagacggcgtttgattcagaaatgagtggtaggaacccatatgatgccgacgattctatcatcaagagtatcaccaacaagtttgaacaagctttattaccagaatcaccgactgatgaagcaaaatgtaggttctcccagatcataccttagtttcattagacttgagcgttcagatgatctaatcctatccttttggaaatcttgcaatctttgacttaggtatgctgctgaaaccgcctcgtgtgcagagatcaccaagtactaagtacaatgaggcaagatgggcgacatctactgattctggagctttagacagtaaaaagaatgggttagagtcctcaagagacatggacttgccaacagggctcaaggatgacagaggtagtaacccatgtgaggaagatatcgagaacaagagcatttcaagtaggtcagaaagagttctgtcaccagaaaaggctggtgatgaactaaaaagtaagttcttgattcaaaagtggcgtagactaattaatggggatttttgcttctaaagccaatgttaaaactagtgaaacgttatgtgtttggcttcctttcaccttttaaaactgttaattaagaagaggtattaaattgtctacaagaaaaatcaatctggaaaaatgagccggcagaaaagtaatagcattagcttgtaggttgctacatctaaatctttagctacttttagggcttccttcacagttttcttgtcagttgtggtcaagattctcagtattcaggcagcaatcattttataaattggttatgaatattttgtcatgcaggccttgaatcccctggaggtagcaaagaatcaaaatctgtgaaggttgttagaggaggttagccattcaaagtttgctgtctttgtttttctttggtaggatatgcgtcctctggttattga

SEQ ID NO: 28560 - DNA, 2097 bp, Arabidopsis thaliana landsberg
tgatcgttggactatctctccattaacaaacagctcagctgcaagtcatcgacaacgattaagaataaatcagaattcgatcgcagtaaatgttcttctgtatagttgagatctaatttgaaaaatgtaaagctggtgtatctctcgtaattgagtccatgcttcctcaatataaagagcacagcacaagaaagagcgaatctggatgtgagtccattaacattcaaaactagaaatggcagaaagctactagctttgccaagaaggacttctggtccatggttctttactaaaacctccaatcatctctataccgggttattatggttacatatatactttttctcaaccaggaaattaatcatgttgctattcaaaatccacacatacaccaagtgaagaaactgatacaagtctattagcattctaaactaaacattgctaaaaaagaattattaactttaccaagatgaactttgaactatcttttacatggctagggagagtgacacacagatactatcagtgcgtatatattttatcttctcaactggtcatgtcattaatttagtgcgcacacagagccaatagattcactaggttcaccaaaatggactaattgaaacaagaagcactcaggagatgcaatgtatgttttatctaaaccggtctgcaggtagatattacactaactatctgcaaaagtcggcttcgataaaaattatttgatgtcagtccattagcattcaaagctaatcatagcccaaagactcattagcttcgccaagatggactgataatcaataacacgtcttcacgttccaagagaaaagcactctagagttgcatgcaatatatgttttcatctaaaccagactgcagttagatatattattaactatctgcacaaatcggttaagagaaaatagacgatgtcagtccattagcattcaaagctaatcatagccaaaagactcattagctttgccaagatggacttataaaaatatttccttcatgtttcaagagaggcacacactaagactcaaaatttgcaatgacaatggcactagcaaagatttcatttggagaaataaagcaaacatataggttaaacttgaatagttggcagaacaattacctacataatctttgttttcaggatccacataggaatctggaagcacaaacagaacacctggtaaacctgttgtaaacaaagtaacactttaagaatactcttctttattatcagttaacacatagtaaacataacaaacaagttctaagtaaaaagaccttcaagcttagtggatgtctcttcatcaatctcacaaccaaaccctaaatacctctcacatgaaacattgtagattcgcttcttcgcctgttcctcactaaccaaaaccaacaacaaacactatacagagtcagatacacaaagtaaacagaattctctgccctagattttttcatacatttttcattatatttcaacagcatcctagacaattaacatatataatctgaagattataccttccaacgactttcgctagggtttgaatgtaacaatcaatcatctgctgcttagtcgggccttccccgccaggtttatccataacaataagccagtgctcataatcgcatcccggaaacaaaggagccatctccgtcggaggccgatcactaaagttagagccagagttaagcggcgagtaagtagaacctgaccggttagctccacatcgaattgagaagaaccgggtcgaacaacctagccgagatccaccgtagtgaacagaggaaggaatccgaggaggagccataagagtgacattagagaggagagcgcgcgtgaggtggcgcgtgccagacaaaggcaaagccattgtagggcgtctgaggaagaaagacgaaggtaatggaggtttagagtaaagtggatagggttttggtttttatcttcgaatttttatcttcttatatactataaaggctttacatgagttgggctccccgcccactaaatctcattcttttcatcataacaagaacttgtttcaatttcttaaacaaataaagactttctatttg

SEQ ID NO: 28561 - DNA, 659 bp, Arabidopsis thaliana landsberg
aagctcgggccttttcttgtaatacatctcagctcgtgccgcaaaagaatcagcatcctcatcaatcactctcagcatttcctttgtcttttcatccaattcttcaataacacaatcaaagttcaccatgtcaaaacctcaatgaagttaaataattgtgtatcattacttagtctcagaaagataagataccaaaagagaatcatctacgactattataacccaattacaacaagtatcttgataaccaaagacctttgagaggaccaaagacccatacaccaatatcaacacttggattaagacattaaaagaaccaaaataaacgtgtcaaaccttgatgaaactaaataccgataagataccaagagaagataccaagagaagagcatcttctccaacaacaacaaagctttgtgactaaaattcatcaagcaaaaacgcaatagcttacctttgaaatcaatagacacacatataccaaaatcaacacttcgaattcgaaagaagaatcaaatcataagtaaatatataaaaattcttggaacccaaaaagagaaatttttaccagagagagtagaatgaagccaaggagagaaattagtagtgttgtgatttcaatccacaccattttgatgagtcatcaccatctttcactc

SEQ ID NO: 28562 - DNA, 1469 bp, Arabidopsis thaliana landsberg
  unsure (1)..(1469): unsure at all n locations
ctttgagttaatttagtgtgttttggattatgtatcattgatttttaagtagactagactttttgtctttctatcttaagtgtttgcttgtgttcactgattgtcttttacatgatcctaaaactatctaggtgttttgattcttagcaaattgttgttctcattgtattttgcaaaacattgaaactgaaactgaaccaatacagtttgaagttgtctaattttgcgagttattttatctataatcacacgaaaccaaatcacgaaatccatagtannnnnnnnnnnnnnnnnnnnnnnnnnnnnnnnnnnnnnngcaaaatcacggattgctttggtaagagctagttcattattcatggccacctcttctgaattagtaacaaatgcaaaactatttgcaacaagatccgtaggattctatcaagattactcaaaatgattttttcctcatgagttataagtccatgcaagacaaatcatatcagttacgaagcttgtttagaatctaaaacgacaaaaaaaatgataaagggaaagcaaaacatatttatcgtggtagcaaacatgttggcataaatgtgactatagtaaaaaagcgaatcaactggaactaaatctctgaactttgtcgtcgggttaattggtgaaccatttaatttaacaaaatgagtgattgcccaacaattcattgcaactttgatcttactccatatttttcaccggatgaatcttgtaacttattttttggattttaattttagtaatatctttgccaaaaaaaaaattttagtaatataatatattttaacatcaaaaataaaataaaaactaaaaatatatatgttggaaaaatcgtctggtgataaaggtcctgattatcctgatttttttttaaaaagttagtacaatgtatcgatatcaataatatgtaaatgcattcgttactataaaactgcattgcactatacggttcactctcctcgttacaatgtattggtaccaataaatttaagactggtttcaacaaagaacggccactgtagcttaatagaacatgtcttaagccatcggtctttgtataaaacgaaaattagttgaagattctacaatttactagtatattcccatcaacaaatactataaaaaaaaagcggagaaggaatcaaaagggtttgtttgttgtcagtcacactataaaaagacgctcctgaaaccacgtgaccactagacgcctctcttcttctgcttcacttcactactgctttctctatttctccatagatggctccttcttcatcacctcttcgtactacaaggtatttatgtttaatgagtaaaaaatggacagatttatagttattagaatccactgatctggggttatctcgtgtttgttcattaaattcattttactcattttctgttttcttttggtgggcatgcattgaaatcaaatcagtgaaaca

SEQ ID NO: 28563 - DNA, 1524 bp, Arabidopsis thaliana landsberg
atgtttacctatggcctcttgttcgggagagtcaagtaaaatctctgaatcagatggcagaaaaggagaaccgggatagtttcctaaagcccctaaatctgtaaagtaaaagatcattgatatgcaacattctatggagtacacctgtacatggagcatctaccaacgtatgttataaagtttttcgagctaaactcgcaatggcatttgataaaaagagcttacctccaagatttgacaaatctgcagtgaggtcagagagactaaagttccaaggtatctgatcaaatggcctgagagggtctctagaatttccagctcctccatctgatccaagttgtaaccctactgaagttccgacatcagatgtgaaagcagagtcaagagctgacgtgtccattcccatccctgacatgtctgaagcagcaaatggaaagtgtccgcttgacgccacagaagctggacttactggcatatccgacataccactatctggtggaatcattggagttggttcagccatggttgtatctattaccatactacaccaagcaccggaaacaacagtaggaattagttcttaagtctaaagcaccaaaaatgcaaaaacaaaactcaatccaagttagttcttactcattccctgagttgatcctcattggttggaaattagcaggtgcagggactccattaaccacatggcagcttgacattccacagctcataggatcaagatggggatgaccttgagcatgcatctgaggatgttgtagtactgggtatcccatgggcatgttgttcactgcgctgcaaacaatttagtgttataataatagtgaaaccacaaacaaatcattgaaccatctacaccaacaagtgatataaggagtcagacttaccagatgccataggatgaataccgttctgcattgggaccagaggaacttttgaatgtacattatacttcgtgaggtgatactgatgctcaagcaaatgattgaatacagctatttgcttcttcagtttcagtctgatgtaatatgccctgaaaaactctgcgttttcttcttccagtttttgccatactaaaattcaaaagaacattttcataaagggtaagttactaacacaatgttactttgatatggaaataaacaaaagtgattgtacctaatgttgtaaaaccagggtcaatccttgcacgggtcaagagtgtctttacgacctcatctctgctcatgtacaactggagacatctttctatcaaattttggacctgcatcagtcatttagaatatgtttttttatcagatgattggaaacttacaagaaagtctataaagataggaaggtggcaaagtgttcttacaagttcaatatcttgtcttgacactttcctaccgtcattacttgaggcagatacggaaccagaatcttgtataggagcttcaaaagaccaccaactttctgttcaccttgggactcatataaaacttgggtagaagactgcaactcctgttatac

SEQ ID NO: 28564 - DNA, 1433 bp, Arabidopsis thaliana landsberg
gagatcatgagtttcttcatttgccaaaggataaagataaaaatgaaagagggttttacaacgtatagatcataaatagatttgataaaagattccataatgtgaagtctccattatccaacggtaagtggtcttgtctcaactatagtttttttaatcattagttaaagacgaaactactgtatctggcttggggagcaaggttagcgggccccacataatctatttattaacaaaattgccactaatcccgatttcccaagctcccaagtgcttcggtgttccgaaccaatttcacagcgaaggtcaataaacacgagtgttcaccgaagctaaggttcgtcaattgtgttccagagaagctttcctcgaagcttagggtcggaacgtacgaccctatggattagctccagtttcccgctcacatagtcttctcggttttgtttttgtcttcacgcgttcactccatttttacttagcctagtgaacaagctcaacaacgctctctctctctctctccccctctctctgttttgggaatcatggcgaggtaagctttgaaccctaattgatataaagccccagactttcgttgattttttcacacaaatcctgaatcggttttcgtaacgcgattcctcttccatttcgttcactgttcctcgaaaagggataaaatttatttttgagtgggttacgattcagcttttcctgggaagcaaaatgtgaaatttcccttacaagtttgagttacaaagattggatttttagagatatttcgtctgatttaggcatttactgtatccgcttgaatctctagtgtgtctctaactcagtagctgcttatgaacggatgatcttatcctcttttgttcttgtcacaaatatacagggcttggattgtcgatggtcgaggaattgcagccaaagttaaaaatgcctctctttcttcagctttgcagatccaagactgtggagctcatataaaatgccccaactgcacttaccgcattgacaatagcaatgtgagtgattatatccacacttctctctcttgtcttaaacttacacacactcacctgtgtttcgttggtttcaggtactgattccatggcctggccttcctaaaggtgtcaagtttgagccaactgatgaggacattatcgaatttttggaagctaaatgtgggattggtggctctgaacctcatgtgcttatcgaagagttcattcgtcctgtcactgaagatgttggaatcaattacactcaccctcaaaaccttcctggtaaatgatcaataaagacctttaaataagctcataattgatgttcttcaactgaaactgtaaatcattgtatcttgaatctctccaggtttattgattcctgctgagctttactgtttcaggtgcaaacaaagatggagtgagtgt

SEQ ID NO: 28565 - DNA, 1024 bp, Arabidopsis thaliana landsberg
  unsure (1)..(1024): unsure at all n locations
acctatgtatctgtcattatatacatggtatttctaaaattacctatttacattttattttttttaaatggtatattaactaatattaagtattgcatttaggaaaaagaccctatgtcatttccaagtaactaataataacctgacaaataatttgtttttacaaaaaacgtaatccacaaaaataatttgaaaaaaatctacacaaaatagttgaaaatagaacactcctatttatttatttttttccttttgttttgagacggataatttcacttgcattactggatttatcatcaattattatatatttagctcagaacatcactacccaaaaccagacgcttcaacttatccccatttctccgaaaaccctaacaaatcctcctcttgttccgccactgccgccgccgctactcaacggtggtgaattttctcatacggtcagttcgatcctcttttcatcgacaatcctatacaaatccataatcatggccgccactgcttcctccgaagcttctgaaggaccagtgatgggtctcatcaacaagcgtctccgtgctctccgtaagaaatacaaccgaatcactcaaatggaagaatctatttctcaaggcaaaaccctaaacaaggagcaagaagaagtcctccgctctaaacctgccgtcgtcatcctaatcgacgagcttgaaaagatccgtgctcctctctccgccgctgtgacagaagaaatcagcctcgnnnnnnnnnnnnnnnnnnnnnnnnnnnnnnnnnccaccgcatctgagcaaaaggaagtcactgatatcccgcaggaagttagcggcggcgatgatggggctaagttggaggatctggtgaatttcctctactttggttcactcttcgacgtcaagtcacagaacgagttcacttcgataatgttgaccaggactcatgagagaagttgctgcttgtcttacgattacgttaccgatgatgccactgatctcctcggcgatcgggatttggattctatttctca

SEQ ID NO: 28566 - DNA, 1559 bp, Arabidopsis thaliana landsberg
aggcgatagagagtatcgccggcgtcagacaatgggccggagggaagtacttccgatgaaagatgactcggattttatatagactgtcgaataagttgatgacaagctttaccctttttctctaaatacaagattattaaaattacacaaaaggccaacgagacttgtcttttgagatttgcgatgccaattatgttccctcttttcgattaaaaagcctttagcaacagaaatgagacttcttgcttagcttttattactagttttgaatcttcaataaataaatctacttccatatatttatgaatccattttacaatttccttaaaactatttatgaatcttttttcataaaaccgattaccgcgaacgatctagataccttatagaatgtttatagccagagattttataaatgcatagaacttaaattaatattggcggtatgctttaataatttcacagtttattatggggtccaatataaataaagcttaataatattcccctatctttggctcaactttttgtctcgagaccacactttttctttttaatacactcacaattttttttttttaattaaggtgtcaaagtggtgcgactaattatggtgcaaagtgggaatatatatatagtacaataaaccattttttcattgcggaaaataaaaatttgggtgaaaaatgacactaatcatggatctatgtttgtttattgaatgtaggtagtgtccacaaaaatatcataatcaatataactttgcgtttattcatttttttcttacaactatataatatgatgtacaagatgttgtaaagactataaacttaagagttacaagttgtatgaaaagttcaactttctatctttaatatatgaaatattagaggcctgccactaatttgcctttggttaaccttcaaaataaaatgtttccctatcataatataataatcattaaaattaattgaacagaaaggggaaaaaaaaaaggtcaatatcttagctcacaaatagaatccaaagctgaaaaaaaaaaaaatgaaaaacaaactgaaaacaaaaggtaacaaatatttgttgacaaacatacgaaatttgattgaaatttattacaaagtcagatgatcacaattgacacatgagagtcttaaattcgctatctgatcgaaccaataaccctagacccggtacggtacggtcagatccggttattgtggagaccaacattagcctcaagaccgcgttttgaaacgctcattctgtgtagaaaatgcgcgagtagtggagctatcatcgccgggagaaatcaggatgatttgcggcagaggctcgtgggtcggattatcgacccggttgaagctttacaggacccgacgtttctgcacaaaaggagagaataaactcgagaagacggaatctagcgttgcgcatcacagcgacactgaatctagtgtttctcgctacgatgagacccataagaaactcgataagctcgatttcgttacaactgcgaagatcttgttcactgaaccacccaagaagaacgaattggg

SEQ ID NO: 28567 - DNA, 1991 bp, Arabidopsis thaliana landsberg
catatatatgatgagatctttatgtgatgaattaatggattaattagctgtctcagtgaaacttcttgtgaatcaatagataagctaacaacaaaaattactactgattaaaaactatagtcgatttcaaaatacaagaaaaagtccttcacgagaaaacaatttttttttgtttgaattgtgatatgcatggacatggtcttgggctcttggcaattgaagaaacacctgcctagggtgttatttgatcaccattaattattacaccaccttataaaaaaaaagtagctcaaaataccaaaaaaaaactttgttctccaaaaaccacacacttcacattaagaaagctttcaaagattgctcaattatatgtcttcaaatttcttatgcaaacttggtttatattgatgcaaaagcctaattattgactaaccgacaaataataatccggtttgatatgcgttttagaacaaaaagaaaacatacatgcgtacaaaccaatgtgtcgtagtcaattcaattatatattgaaccaataaataaaaaactaattgttcttaaaaacattactaattaaattagtctataactggaaataaactaatttttggaaccacgcgtcaatcagtggagaaaagtgagctttaaatatttgaggatagtcttttgcttccagaaagttctccacatttttatttttaaaaaacaaaaaacaaatcgcggtctagatcacgccacgtgttactaagatgacgtggtatccgaggtggcacaacgtaaatccccgtaattgattctctctctctgagtcaactcgttctctcttgtttctctccgtttcgagactcatctgaaaaacacgaatttgcagtgagaggtgaaacgcagatcactatattgttttgggttttgtgtgtgagtggtttatggtgattttggatttggaagaatcgttgccatgaatgggaatattgtaggaaaggttccgattggggaatgtaaagcgactgtagtttacatgtccggttacttaccaggagctgcgtcggagaagtccccgattctctcccctgttcccgtgcgtttatcggcggctgttcacggtggagattcgtggaaagatgtatgtggtggtggttgtggattcgctatggctatttcaggttggatttattgaaaagatcataactttgggattcttggatttacaacaaagatgtgttttttttaggggatttactaattttgtttgttgatgggttttagagaaaggaaagcttataacttggggttctactgatgatgaaggacagagctatgtggcttctgggaagcatggggtatatttctttaagatgattgaattttgtctcttcttattacctttttttttttttttacgaaattgattcgattgttgtcttgtattgaatacgattggttaaggaaactccagagccgtttcctcttcctacggaggctccagtcgttcaggcttcttcaggatgggcacattgtgcggttgtaacaggtaagtttaacttctctactttggcttctattacattacactggtctatgacttgaaacatgaaatggagtaatgatacttgtaactgtcattttttgtccatgacctgtgttttgctgtgtaacagagactggtgaagcatttacttggggttggaaggagtgcattccatcaaaggatcctgttggaaagcagcagagtggctcaagtgagcaaggtgatatcggttgggatatctttggttgtagtgttgttatttttttattgttgatggatatggtaacgttttcaattgtgatagtgagtccagcatcacaaggttcaaatgcggctagtggtacgacactacagaatgagaaccaaaaggtaggggaggaatcagtgaagcggagacgggtttcaactgccaaagatgaaactgaaggccatacatctggaggcgacttctttgctacaacac

SEQ ID NO: 28568 - DNA, 2021 bp, Arabidopsis thaliana landsberg
ctattataaatattgtaatgttacaagttcgctcttattaaattccaactaacaataaatatgtttttgatttattaaagaaagcaatttaatagttgcagatggttacacgcttgtagaggacttcgaaactgtaacccaaaagatctatgcattttagatcattgaatggaatccaagaaaaatcgttttctttttttcttgtttttgtttttattgttgaccaaccaagaatgatatttgcagtgatcgtaacatacggtcccataattattaccacgcgtgtgaatttcatttatcgacatcacataactattctttagtctctagtatagcatacgtgaaaggtatagcatacccatatatggatatgttaacttctcttaagtttgctttttctgtaaggaattatgtatatgttgaccactaattgattaacatatttgtttaccactaaatctatatttacataacaaccggtaattccaaaattttctaaaggatttcaagctatattcagtttgtaactttgtataaatagcttgaacgggtcctttatgctttatgctagtaatctcaactagtgacgctgtaaaatcgtatttaaggttcgagtccagtgtcccgtaatgtttgagaaaaagtttattcaaaatggtcccagacaattgttttgtgatatatcattgttatcatatatccgcgataatatatagttaagagaaacgaaacaaaaagaaagacaaaatatgctttaaacagaagattatgcaaatacctggaacataatattgagatcagctaacaaataaaatatttttcacaatcgttatcgcaaattttaacgaatatccagaaaatccaaatagggtcgatattgattgtgagagaaagctggcagggaccattattccacaaccttttggttgtcatctcttattctctttgataattattcacatactccatgggtcactactctttcccttttcttattttcgtttttttctcaatactcttgttaataatttgctggattagcacaagaatcataatcatgattggagtgatcgataaacggatattcacactcgtatttaatttaataatcaagagatatgaattcgaaattttaattggtaagaaaatcttcatagtaatcaaagaaatgatgcatgtaattatgatcaaataaacctaatccagaaccaaaaactatatcgaaaattgttttgtttgtttgttttttttttttttttgggggtcataacgaaatatgtttacacttcaatcaatactctttttgatttactcatatacatataacaaaagaaacacaaaaacttaactgtgtaatccaaccaaatggaatcgattatttcctttattattataaattccaaactccatattttctcatataccaaagatagatattttgttataacaatacaatgtaaagataattaattacttgtaaatattttaaatgaattttaatatttaattatcttggaatccaaattgagaaccaaactcaaatcatgtgaacagaataaccagaaacacgaaatttatattgtagctcaaaccgaacccaacaatataatacccacatctatgtgactacgtcccgcctaaatcaatctcgtacgatctcaaacaacatggcaaaagtcacaaagctactatcaaaatttttgttgcgttaaaccaagtatttttgtctcccgtttcgtaataagttgcgaatacatgtgttcgtaatttatgcatacgtgttaataaacgcatgtaatctatacgtacatgttcgtaaaaaaaatctatacgtacatgaatgcatggatcatgctgtgttgacttcatcatttcaagccgtattgacttgtaacctttttttttgtcggcgacttgtaacttaattgaggacaattgtaaaataaaaatttgaggaatattaaaagcgacgttgttttatatttgccactacctttcactatttgtggtatacgggtatg

SEQ ID NO: 28569 - DNA, 1185 bp, Arabidopsis thaliana landsberg
agatgggtaaagttctttctataaagacgcggataattaggtttatcacaatttaagacaaagcctaggaaaaagaagaacaatgccgtctagaaacaaatctaataagtggcgaaattgaagaagcttttacctgagagattgagagaaagagagaacgcggcgcagagcgttgcagctgttatattgtctgttttagctcttagcttctgtccaaagcatttttagggtttggcccaaaaagcttaaccattttggaaaatattattaaaaaacattaaacttgattatcttttaatactgagacattttatatcaaatttgtaaaacataaaaaaatgatcaaaaaatcattactcagtgattagtgaaactgtagttacaagtacattatgtcactatcaataagctaagctaaattcacaaattcatttcttcattactatataatgaaaaatctttaaagtatagattttttaatctgatgtatcccaatatattatggataagatagatttttttttgttcttttgtatttaaatcggatcattctaattggtggagagacagactctggactctgaagaagcaaatggctgggatcaccagcaccgttggattcaacgccattctcgccggagccaccaaaacggtgtcgcatcctgttaaatctaagctctttggtcttcgactctgtgtacccgaattctcaattgtttctctttccccttatcatcatcgccgttgtcccgccatcacttgccgttacggaggcggtggtggcggaggctctagatttcccggcgataggagaggtaggcagaaagaatccgaggatgatgattcgcttgatatctcagctattaggtaattgtggaaactattaattgatagaaattgaaatttctgtagctgaagttatgattgattttgatgtatctcaaattgagtaggtcagccactgttaggcttattgatgatcagcagaacatggtaaaatgaagtgccttttaaatgtttaaactttttgatttcagcaaaaattgaaaattttccagtttctttgttgtttagattggtttagtttccaaagaagaagctgttcgaagagctgaagatgctgagcttgatctggtttgtgtttctttggataatttacaacttgggggatcctctagagtcgac

SEQ ID NO: 28570 - DNA, 750 bp, Arabidopsis thaliana landsberg
agatcaaatatatgaaacctaaaacaccgtttaggggtttggatgttatatccaattagtttacacaaaatttaaaaatttaacatttattcagaaaaagaaaaccataaagttttaatagtaatataaaaaaatgtaagtttaacaacattttttaaaaacaaaaaaaaaactagtgttaaaaatctaaataatgtgtaaaccataatgaacctagaacaccatttaggggtttgaatgttgtatccaattagtttacataaaatttaaaaatttaacacttatccaaaaaaacaaaatcttaattttaatagtaatataaaaaatattgtttaagaaagaaaaaaacaagtgttaaaaatctaaataatgtgtaaaccatattgaacctaaggggtttggatattgtatccaattagtttacacaaagtttaaaaatttaacacttattcaaaacaaaaaccttaaagtttttatagtaatataaaaaatatatctttaaaaacttttttttttactaaaagaactagtgtgtatagtaaaaaaaactttgaattaaaatataaaaaatgaatatttaaaaatgaaaattaagatgggatagaaattgacctgactaataatctgatggactatcatgggctgaatttccttttcttattgttgggcttcgtatggttttgaagattgcaatccaaccggtagattctccgccaccgtgactgaaaacaaatcctataatccccgatc

SEQ ID NO: 28571 - DNA, 1450 bp, Arabidopsis thaliana landsberg
aagaatgatttttgatcttctatatttgaaaaatagaggaaagatattaaaaaaggaaaaaaaaaaatgaaaatttacgagtgactgagaatctggatgaagaaacagagctttcttccactttgggatcaccaagaaatccgttttttgttcagcaaatgagttttttctttattctgaaaaccgtaaaaagctagtactttatttctccttctacagacatggatcgtgtacggtacggaccgtgaagatcggtcgttgtgaatgatgccgttacatataaaccgggaagtttttgtcggtggttcaagtgtttaccgggagtcgccagtcacattgtactcgtttactttaggtcagagtaatgatgaccgtattgtcactttcactttagtccttcagatcttatttgccttccccacttgtaaacactaaacagtaactatgatcttgcttctacacaacaaaatgtgaaaggcagaagcaacatttttttgcaatggctatatatgatgttgcgcagtagtaaattagtaataaaactggatagagaagcagaactcttgattttattttgagatggttgttattttatatgtgaacaagctgttgtcgtttatttaaaatgaaattattgagtttacgattgtggacaagggaacagagagtgtgtggccaagctaaggatggtagatcacaagagataatattaaactttattataagatacagctagaaaataatcaaagcaaaagttttgctagtttgatatcttataaacatataatatgaaacgacaagaagcacttaatgtgattttggaacctgtagtatgtagatgcatacgatttaagaaatatcaatgcaggtggcagcaagcaataagtacacccgccagttttaccgttcactattcaaaaacagccaacaaacattcaagtaaaccgagactcactttttcagttgagccaatttggtcaaatcatgcaagtgtggtatggatatcaaatctcggtttcggtttagattttccggttctacaatcgtttttcgttgtttgttcggtttggacatcccaatgtataaaagaagaaaaggattttagaatcatactcttgggagatattgaaacagagtaagaatccaaacaaccaaaatgagatgaaaagatttagggatccaacacagaacctagggttacctagaagattcacaaggcaacaatgaaggctaatgaaaatatcagacaagtaataatcttcaaagtgacagtacctattcctaaatctattcatcagaacctgcagcgacatgaagtatactgttactctaaaacttcatctacctacttgagtgtaattatgtttgcaccttcctctccctcgacatatccaagtacttcatcaaaacctcctccccgaaaaccgatatcaaacactctcatgttctt

SEQ ID NO: 28572 - DNA, 795 bp, Arabidopsis thaliana landsberg
ctgaccttctggacgtgaacggcctcagcatgtgtacgaagacaccgccagatatgtcgcggcacaacgcgtttttccaagattcagccaagttaaactcgtttcgatagtcgcacatttcatcactgcacacaaaatctctccatctccttgaaacacatttcattgccatgtgatattctcttggaactctagctaagcaggattttgagatatcatcaggaactccgcttataagcgcaatttgtgtctcatttgattgacctgcacgttgtggatcctctactatacacgccattgtgaattgattctacaaaatcctgttcatgaccaaaagagagacaaacactggctcagatatggctaatccctatactaacttaaagtagcaattcacataagtggcctttgtgatcaagagcagcattaatcaagatatttgaagataaacaagagcattgccataacaacaaatcaaacattcaaagatgaagaaacagatcgaattccaacaagtacaacagatccaatgttaaaccaaattatttaactctcacagtccactgatcaaacccgtcagcaattacatcaaatccactacacatacaatcagatctacaactccagcaataaataaataaataaaatcagaatcgaaacagatcttaaatcgtctcagaagaaacgagactgaggaaaaagtaagaaatacgatgagaaattgagaggaatctagaagaagttaccttcagggcacgtcgcaaggaacagtagagtatttcccgtttgtgagct

SEQ ID NO: 28573 - DNA, 701 bp, Arabidopsis thaliana landsberg
agctatatgttggtatctcatgtctataccacaccaatagaagtagttttttttttttttgtatttgccaccagactgatgtctatagtagaataatcaaatcaatttatgttaatccaaattaatcaatttagttgaggtatcaaaccatttgtggtggaccaaagtaagtaaaccaatttatgagttatctcatttggagattgtatacaatatttgtacacaatatgtccactaaaatgaaatcgcagataagttgctaatctgatattatcttcataatctatatatacttgctaattatgtccatcgtttttgcatatatatataaaaaagcgcacatgcatgccgaatctatctgttcactatatatcctgtggcaacagtctttgacgaagattaactaggcgtaggaaaccaatccgagctgcaaattcgaagaagggtctatgcatgcatgattattgattgtgggttacagtagtcaatagatataattctttagcttaaggtactacttttgattttacgttagtagttacacacgaagttggtggttgttagatttgagtttaaaggcaagttaattatagataaattatgatgaacatgaatggagttatattattttattagaaaccattaaacatatttttctagcggcacatcacgaagttccggcacctgacacatagtttaag

SEQ ID NO: 28574 - DNA, 1912 bp, Arabidopsis thaliana landsberg
gacttgcgaggctaagaaaaagaaactgcaacaaccagatgaaaacaaactacattttaagcactaatagaaggtaagaaaccatgacataataagatcataagcaaaacgagtaatgtgaacaattcagacaagtttactttctccattgagaaacatcagtttctttgagtccaaacgatatctaaaaccagaaagaaagaacgatagaatgagattcatacgaccaactcactcactctctcaggacatgattttggcagaccggacataaaggctgtcgacgaccttccccatgtttgcaatggtttcgagggtagccgagtagatagcatctgcctttgggtcttcgaagatgatgaggcatccagctccttgatccaaggtacctgcaaatttcttgtcgagtatcatctgagatagcttcttttccacatggtcgagcggcaatccaatgagctcagcaatgtgagctatctcaactcttgagaagggctcgatcaaacgacacagattttgctccagaagcgtgtcatagagagaagagagatgcctgtggacaattgggtcatcttcaagctgtgctttgtagtcacggagtgcgttctcaaacaacttcaaggacctcttcgagtgagcatcagcgactgctttcatggcatccaggtcagggccaacgtactgtagtccagcctttgaggagattattcctgcaacatcatcagcttggctaaccatgatcttgcacagtaacatgtacttcaaactgaaaaccgctctcggatctccgagagcgttgaaggactcaaaggcttcaaagaagtaactgtatccggttttgtagtctttctcttcagcatgaagaatcccactctgcagatctatcgtgccttgttgagctggtgggacatatatagcgttagcagctgtcctagctgcagtgagtgcagcttttgccttgggtaagtttctcaatgagaagtgaagtttgctctccagcaagtctatgtcgaccagaaggagcttatcatctaatctcctaacctcttttaccaaagtactcaacagcgccaaagcttcaacatactccttgttctccatcaaaagagctgcaagcctagcctctactcgctgcctgaggaaagtacgcttctcagcgcgggtccattcgaccatctctttgcagagagtgatctggagatcagttgttccaggaatctttgccacagcatcaatgattcctctgacgattttcgcagttttcgccttggggattaaggaaaagaaaggcctcaacttggtcaacagtttccggagatcctcacctctcttctcttcagtcaatcgatcacaaaggtttgtaatcgcttgctccttgatccgtatagcctcaggagatgaagaagggtcttccaaaacctggtacagtatcgtaatagcctccgagctgttggcttctaaagccagggtaatcgtctctgtggtagcacgatagaaaaccattgtgggtttagtgcaaactcaaatccctgcaacaataaagccatagacctgttaatgcaatgttcaaatatttctcctttcaagattattgatactctttaggtttcacatcactacaaaaacaaatccatcttcgatacattaccaagataatcagataaagacaagccacgatggtaatttatcactgtaatttatcaactcttctgtacctaatgatcaagacaagcctagagatctatcaaagacaaagatacaacgaggctacaataagtaatacaggaactgaattacaaagcctatgaaactataacctaatttttaagtaataagatgaaacacagagacatagttcagtaattactaacttattcagttcgaattctttggtgatttaaatacctttcat

SEQ ID NO: 28575 - DNA, 1239 bp, Arabidopsis thaliana landsberg
ctgatttgtttgtttttgctgcaacacagctggaagatgaggatgaagttgctgattttgtgaatcctaacacaaagaaggaaacattggcacttggtgattcgaatatgaggaatctgaaatgtggagatgtgattcagcttgagaggaaaggctatttcagatgtgatgtgccttttgtcaaatcttcaaagcccattgtcttattctccattccagatggaagagccgctaagtgatcaatgaactatttttgagtttccattttatgaacattgtgttgagaaatttgctctttaggttttaaaacaatgaaaacaaagctttttatcagttctttagtttcatctcataatagttttaaagttgcaaactttatattgattcattcttctttgcttagtgtttacaatataaacaaaaacaaactcatttcttgggtgcgtatctcagtttgatcttcttaacctgtttgtgtttgagctggaatgacttggccagaatgtcgtcgggaagagctccaaagagagaggcgacaagtgattgtgttccgggtaattggctatcgaaggctgcgagtacagatgctggactgttggcaatgttcttctggaaatggatgagtcccttggggaaggtgaaaacgtctcccttgttaaggttcttggcgatgagttttccagcggttgttacaaagccaacatagagctgaccttcaaggacgaaaatgatctcggaggcacgtgggtggacatggggtgggtttaggccgtttggggcgtagtcgatgcgggacatggagaggccgagagtgttgagtcccggtagcttttctacgttggctccggtcacgactgagccggtagaggtgtttgtggcggcaatgttggctaagcctttgaagtagaagtcttctggtgttatttgtgttgagtccttgcaagtgtatccgttgaccttgaccgcttcatttgtgatcaaaagagagcaaaacacaaagttagataaattttgacaagaagaaacaaaagacaaactaacttcaaaactctattattatttggtatgatactattgaaaaagaatgttgtccacctactttatattttaacattttgataaatactatatcatttataaatcctgccaaagttcgaggaaactcttgaataatataatacaaaatcgagaaataaagtataatataaatgagaagatttcgtttcataatatctcaat

SEQ ID NO: 28576 - DNA, 1778 bp, Arabidopsis thaliana landsberg
atttcttcttctccaagtcccgggtcggtttcaacgaattcgactattgcagatactaacgggctttcgaagtcatacatttctctaggaccatctctgtatccatacctaaccacacttctaaacattccatattcttttggccctactctgcttatcacaaacctctcttcttctccaacataaggaacctgaactgatttcacacatacaaacactagaatcttgtgaaacgcaggcagattcgtcacgaaatgtccgaaaacagctggaactcccgtcacaagattcgaatagaccagtcctattcctggaactctaaccattcctatgcttggtcctagagaaactatccggtccatcgagaccttgttctcaacgtcgaattcatgtttctttgtagttccgtagttccatatgtacattaccgccatgaatgtcaaagagaggagaatcggaatccaacctccttcaggtactttgtagacgcatgacgagaaatagagaagctcgatggaaccgaaaaagacaacgaatgcgagaactgtaatgattctttgcttccagacaattgtcatcactaaagtcatcaaacatgtagtcacaagcatcacagaggtcacagcaagtcctgcagaaacaaagagatttaaacataagttttcaattttctaaaaacaactgaagtgatcatgatcatggtctcaccatatgcatgacccatcatattagtgtctcttaacccgatagtgaccgccaggcaaagacacatcagcatccagttaacttcagggatatagatttgtccatgtattttgcttgaagtgtgaatgatcttgacccgaggaaagcaatcaagtgcacaacattgacttatgatcgaaaacgttgcggatatgacagcttggcttcccaccacagctgcaaatgtagccacaatgaacactggccagaacacaggctctgcaaacagacttatctgacttaatcccattcaaaagtctcgagttattcgcgtactatacagattacagttaagaatttaccgggtatcgccttgtagaagctttgctgaatatcttcatggtgtttagagagaaacgcagcctcacccatgtatgcaagtatcaaacacgggtatacaaagaacgagaaagccacctatatttcagttttgttactaaaagaggattcttttcatcagaatcatatcttataaagttaaaggtcttacctttatggacagagaagagaagtgacctaagtcagcaaacatagtctcaacacctaaggaggagaataaacacaatatataagaataaagaacataaactttgataatgttatataacatatagtttcattaactaaagtttttacctgtgattgaaagaacaacacctccaagtgaaacccacccttcaacaccggtgcttctaaggaacttatacatgtaaacaggcgaaagcgcagagactatacgcgggttccattttatagtgttgtaaactccaatgctactgatggagacaagccaagcagtggagattggagcgaaaatgaaggcgactctatgcgtaccataacgctgggctgagaatatcgccaccaagatgatacatgcgatgatgacaacataatctggagttgaggacaagagaatcaaaactaaacatgaaacgtgaattagtatatatttgacaaagtaaataaacaaaatcagacatactctcgtgaaggttgggaatcttgagcttgactccagaaacagctgaaag

SEQ ID NO: 28577 - DNA, 1168 bp, Arabidopsis thaliana landsberg
ttgctttatatttggctttctgtattgagacattcttcttcatcctaattgtgaatggaatatgttggacccaacgaagccatcaaacatggttaaaacacacaaacatgtgatttaatctagtttaatttcgtctattacaatataagtgaattttgacacacatccttggattatatctaaaacgttaagtttgttaaaaacactttggaccggataatgggtattgatcatttattgtttgttgcatgttgggttagaaattagagatcataacaaaaatcatgatttcaggctgtccattttgaaaaatgtgtgtgtttgtgttaatttgaatacaccgattcatccaaaaaccatctgaacagtctcttaattagtttaccgtgaatatatatcatatttatgggatcatatttggttaagtttaactagtagtttcaaatttcgcgttaatagctatttgaaagggtaggagtactttttcgaccggttaacactcccatataaagcccataaattattggaacgctacaaaattaacaaaacatctcttcagaagttcgtccggtttactctactacaaagtacatgtatcaaaaacgacaacacgtgcttccacaaaattaagaaccaggacgtgatgtcgttgttgtaatacttttttctcgccaacttcacgccgtcttagtttaccgaaaccaaagtggctttttctgattttatccaatacaatgacgtggaaagactcaaaagaagctttcgccacgttccaccaatgaatgttcgacacgtatcgtcgagtttctttttctttatgcttacgtcatcgcacacgtctatcttcttttggttaaagtgataaaaaggaaagtcgtaaatggcttcgtcactgagtctttcctactattttaaccccattagtgacactcctttcttctccactacactccatttctctttcttcttgactctaccatcgtttctctaatctccgcaactatggcttcatttacgaaaacggtgtgtggggtttcacgatcccgagatcatacttttttccctcctcgtacgtaacgatttttttttgtgattattaatccgaatgttttttggcgtcttttttaggttttgatccctattgcgcacggtacggagcctctagaag

SEQ ID NO: 28578 - DNA, 2031 bp, Arabidopsis thaliana landsberg
  unsure (1)..(2031): unsure at all n locations
ttttttggtaaagggtggactagcaaataatgatgtctttaatgttgaatggattcataacggtattatacactttggaatgactgtttcctaatatggttttgttagcgatggtaagtgaggaaacctgtgtgctttgtcttgtaatgattttctaatgataaacagtttctcaagtgtagttaggtttgaatctgtattcctagcttctttgtttcattcaccgtgtctgcaactgtttagatctttcatgcattttagaggagagtttttaaatcttccttactgtaatttttcagtttatcttctaaatattttaactggcacagtgtgaacactatgctgactcccaagacacataatttcatagaatattgcagaatgtgcactcttctgatgatgagttagaagcagaaaatcgcctagttattcaaacgtatcatggataaactcaaatacattgaacttgtgcaaaaggctgtaaatctctctccatttctttaacagctccggtgtgtgtttgatgtattagtttgagctattggacgctgtctcgtgtttgacgtcaggattattgcacatataattaccttcatgaatactgtataatgtttgtggcattcacctgctataactaaatttcatggtttttcttgtcattatctatttgcagttttggagctctctgaannnnnnnnnnnnnnnnnnnnnnnnnnnnnnnnnnnnnnnnnnngattcctcaagttcatgtgtttgccgaagtatagctatgaagtggaatatcttccggcacaaaaagaggatgcagaaggcaaaattcgacttgaaaaggaagctgtggatatgcaacatctctacactgatgtaatgaggagatcaagcagagaaggatttcctagagcctccagtttatcaagtattgactccataatgaccccaagcgtaggcgaattagacacttgtagcagcacacatgccagcactgagccgtctgaatatgtccgtggaatagatcctaaaatgaaacgcttgtcctctggaagaagagatgttacggctgagccagaggttattcatcctcaagcacagtcaacaacccctaattggccaaggacaagatcaaagtcaagaatggataaaggatggatggggttaacatccgtgcaggatcctccaactcgatgttcatgggggaataccggtggtcaagacagggaagatatatcatctactgtatctgatccaggtccaatctgggatgcaggacccaaatgggacactgaaccgtctgcttgggatgtagaaaattcgatcgagctgcctggtcctcctgaggatatagagacaggactgaggaaacagagcatcactccaatatttgaggataaatgggtttcgagaaagggacatttcctcggcatcatggtctgtaaccatgcttgtcggactgtgcaaagttcccaagtcgtggctcccaattcagaacatgatgatggtacaatggatatgctcttggttcatgggtgtggaagactgaggttactgaggttttttatacttttgcaaacaggtcgacacctttctcttccgtatgttgagtgtgtaaaggtaaattatctttcctattttcttacattacgaaacctgcaactcgctatgtgctaggaaatgctaatcaaacggtcaaactcaatgcaaatattataagtctagaatagaatgtagttgatcaaatgcatgacaattgcaggtgaaatcagtgaagataaaggcggggaaaaatacgcatgacagttgcgggatagacggggaactgtttgcattgcatggagaagtgatatcgacaatgctacctgaacaatgcagactgatcggtaacgctcctggacgacattcataggtaattaatctcatctaaattgtgaggatggtgagagagttgggatgtttatatatctggaattcatttttattgttttctgttttttgtcggcgtcaagtttacggtaagtaccatctatgtgataagag

SEQ ID NO: 28579 - DNA, 1888 bp, Arabidopsis thaliana landsberg
gagatggtttaatccgttcttgctaatctctgtactacttttaaaaatcaaaaataatataaaatctagttggggccaaaaaaaaaaatcattcataccccatcagtagaatcaaaacaagatagattcaaactttatcaagatagataaataagctatgaaatgaaatacttcctcaaaactaaatttagtgtcaccaagaggcagcatcaatcttttcaaatcagggaaagaagataattgcagcgtgattaattgttgaggtcatagtaaaagtcaaaaatctgtgtgactcataacgcggaaaaacaataatcgtgatgctagtgataactctaaacaaaaagggacaaaaatgatatttgcttaacgttgagatacaaaattgagaagaaaaaaaaatcctcttcactaaaaaaaaaaaaacttccgttatcgatctctatctctctcttcccccacaagggtggcgattcgaggagtttccatggtggaacagaaaccctagagcctttatgctgccactaattatcactcttcactattgaattggggatggactcagagaaaatcctcaatccaagacttgtttcgattaatagcaccagccgcaaaggtatgtccgttgagttgccgcagaaaccgccgccaccgccgtcgttgttagaccggtttaaagctttgcttaatcagcgtgaagatgagttcggtggtggtgaagaggttttgcctccgagtatggatgagattgttcagctttatgaggttgttttgggtgagcttactttcaattctaagcctattatcactgatctcactattatcgctggtgaacaacgggaacatggtgaaggaatcgctaatgctatttgcactcgaatccttgaggtttgctttcttcttagttgtttccactttctagccttattgtatagtatgtaagtgtagaagtgggaaaaaaattaggtttttgattgtcagagattagtgtttggtttgtggtttagtgaaatggctgcttctgagttacctgtgggtgtatatatgcaggctcctgttgagcaaaagttgccatctctgtatcttttagacagcattgttaagaacattgggcgggattatggtcgctatttctcatcccgtctacccgaggtgagcagtctacaagaagatgtttacttaaatgatttgaatagggctgaagcatacccatgagctgttttgatcctattctgctttaggtcttctgccttgcatataggcaagcacatccgagtttacatccgtcaatgcgtcacctgtttgggacttggtcgagtgtttttccaccacctgtactacgcaagattgatatgcaattgcaactttcatctgcagcaaaccaatcttccgtaggggcttctgagcctagtcaaccaacgagaggtatacatgttaatccaaaatatcttcgcaggctggagccctcagccgccgaaaatgtaagcctttctctttgtcattatgaacagagatgacattctttttttaggtgcatctgcaaccttgaagctatggtgtgttaattttatataagtgtactaagaaaaacgggtattagattagtttggcctcatagtggtcttatccattgtatttctttaaagttttgttagttagacgagatagatgtttacattcttcaagtaatcaatcttgactacaagggagttgctgttatggcctctctcagttatacctgatgagtaggtctctgggactctggtacattagcaatgatcttgttagcacatgtagagggtttttttttggttatagcacagtagactctctgtttatgccatcatgtgtcgtttgcaactgttagagtatgttcatgttcaaagag

SEQ ID NO: 28580 - DNA, 1886 bp, Arabidopsis thaliana landsberg
aaaattgtaattgtaccaatccaagagttttcaattttaccaccaaccttattggacttttcggcttggaaaggtagacaatacagtgaataattgaattctttgacttataattttacttgaaaaaaatcgacataaacacagcaacatgcgctttatatacagcgtctgaagagaaagacgttctcatggcaatgtattcccacttacacgattacaccgttctgtagctggaggtttttccctccgacgtctcttcttaatgtgattttactaaaagtcagaccttgacggcaacaaaaacaacgcccctttatgttttctacttcacggtaaaacctgagtccgacatgtgtacgtgcacaagataccgagatttcatcgacgttcctgtgaaaacaaaacctgcattgatgtgtgaaacttgggataattagttttatcagtagaagtaacagcaacattgtacgtttgttgagacttgaggattcatcgatgctaacgcatcaacttgaacagataagtttttgaatcgaaagtttacgaaagtcctaagttcattatcctctaaagcaatgtgatgcaagagagctagaaacagagcgtgtaatcgtctctacctgtgtgaaactgcctatgttctgtagccaagcattaaatgcttgtaataacgacccgggatgattctctgccaccaatattttgttgagctccaataactcatctgcatccgctcttggatgagcctgtaatgcaaatcatgagcgtaagtaaaaaaacagagtttcaaagagcagatccataggagaagggaagaaagtttgctgaccatctaacaaggcatcttttaatgccttgagatattggccggaaaaaagatggatctcgctgagtatacagtatcccaacctgaaacagaattaatcagtttttagtaaaatgggtctcgaaattagtgtctactgatcaagaaaagatagaagtttttacctcaaccaatgccatagctgaagggtcttcaaagatctcaaggctatagtcacccaaataatttacctatagaatcattgatgcttgtacactattagtgatgctataatcattagtttcatgtccgataaggtaaaactgaacactttggctttatttccatcaagggtctagaagagtaggtaccgcgaattctgtattgacaagagcttggacaaaatccatcagctgaattttagcccactcagagttctgtgtaggatcctcagtttgcggaggatgcctccatgaagcaccaaaacgtaatttttcatacggaatgcttccttttcgtacatcagtggcataccgttgaagccgcaacaacgctttgtccattgcaggattaaccacagcaacctaaacaaggaaatagactataaaattaacgatgactttcgtgcgtaatttgaaagcaatcactttaaatgagcttacttgtaaataagccaagtatgcatccacaatatcttcaaatgtacctgctttactccccatcaaactgataagacacaacggcactaggtcacatttgagaaacgaaaaaatagagggttgacacattttgagattagagcaaacgaaagaacaggaaaccattacctctggtaatgattactttgtttaagcgcataaagctcaaatagatgccgagaattcgcaccaagaacatcagcaatgatagtccactacaattccaacatatgttaaacctctagtaatatacagcatctcaattaaaaaaagaatgaccagtaaaattttagcataaaagatcattcaacctttctggtttgatattattaggttttagagttgtcacatattttggtttcattaacaagcagtgccattac

SEQ ID NO: 28581 - DNA, 1866 bp, Arabidopsis thaliana landsberg
cacagaagcagcaattgtaaaaggtaacaatgtatttacaactatatacttccttcacaaaaagagtttttacgtctccaagactataggagaagctggctttgaagcaatattaatggacaaccaatccaacaaagccttgtttacagcttccgggacttcatcatgaggacaatgccctgcttgtaagtgaacgagcgatgagttcgagtaaaatgctttgattttctcggctttagctggaccgacccacggatcaagatctccccaaaccaacagaagcggacaagtcatcttacttagaacgctatctagagtgtatctactctggtttgttaagaaccttgtcatcaatctgtaagatattaacacacgaaacaaacaacagttaggtctctttattatgtatcaaaacagagaaactctttattggggtttagtacctgtagtatacttctccagcatttggatctgttgcaggttttgaaatggattcgacgaggtagtcatcgacattagtagagtctatgtacacctgcaaaaacaagaaaaaactaagtacaaagtaacatacttgagatgaagtctgacagaagttaataagacattacactctttaagacagattcgattcgagaaggttgcttggcttgccagaacaagaacccaagaaccacacgttggaaaatctcttttagcggcttaactataaacttggttatcacagtttcatcagcttcctctcgttttctactctcggctgcaaattgtcccgcagagttcagaagtgcaactcccgtgacttgctcgggtaatccaaccgcaactgacaatgccgtagatcccccaaggctgtaaagaagtggaagaacttgtttcagacttccttgtggaatgtcaaaaagagcttcaaagaagacattcatttacctgtttccaacgacaacagctggttctttcactacctctttcatgaaatcaataacttgatctgtccaaaccatggcatcatactctatgagagctttgtcactccatccgaaaccgagtaagtccaaggcgtaaaccttgtatttcttagccaattcaggaatgttatacctataaaaatctaccgatattagctcgaattcgtatgataaggtaaaaagttgacttaaagcctacactgatcaatagagcatggaggtgagattgaaggtacctccaatgaaagacagaagcaccaaaaccatgaataagaactagaggcgagccttctccttgaacaacataatgaatcttgtgacctctccattcccaaaagttatagccttctggtttaaaagccaacctctcactacctaaagaatcatccaaattctttttaacaaagatgacatttttagaccaagagagaagcaatagttccaaagctagtttttttttaccttgaacagactgagaagaagcagaagaagtatccatgactgaaactccagaagcaacaatccctcccctaattgcaaaatcccttctgctgatttcacatttgtttccttcattgcaaagattaaacagattgttcataattcaggcttaggggcacatctaaatgaaaggttggagttgaatcttacttggtcgacaaattctagcaggaaagattgatcttttagatgatgatgaactgaataactctgtcctaacagacggtgttaaagcacatgaagcagacatcgattattcacagagaacaacctcgtaaaattttcaaggacaagagaaccagatatttcagaactgagagatgcaaaaagagaaaaacaatatgagcaccgagtgtatgtgtgaacttgcgggagagttgtggcgacccggagccag

SEQ ID NO: 28582 - DNA, 1353 bp, Arabidopsis thaliana landsberg
agtggtgaagaaatctgctcagcattatggaccaaagggctgcaagcagcacacagatgggtaaaggcatgtctgcaaagatcaacatagaggttgttgtcgtttgttttaaagtccaaagaaacattgataagtttgatacattcttcgattcaggtttcaatatttattatacttggtcattatcgtgtcttctcatttgcttgaggtataaaaacattgatgggtttggttcatttttcggaaagaaaggtaacctaaatgttcttaggtttcctagattctcttcgtatcttgatttttgattatctcatccactacttgaaccacaagtcttgtccagataggattgagatgtcagcaaccacagagagtgatagagattcaaagcagtagtagtgttgtattatataaactgtcatgtttaccaatatacatcgtatactttagattttattttgactctttaaagttttcgtaagtgatgataacaaacgactcgaaaggtaacaatagcataaaacactagcagaaaaataaataaaaaacgaaacaattatctaattgtggccaggatctattacaattagcaactactacaaaagtccacagttctgtctcattcaagtctttattagcttagaagacatgcaaaaagttggaattggcaagtgtctcggtgacggagcagcacccattgtaaccgaaccaccaaacaattctccttcttgactcggttcttgaatcggcttctcattaaccggtttagaatttgaaggtttcgagttatacagaactttttgtgggtaataaaaacgtttcaagccgaagaaaggaaccaactttacatcatgtaaaccaaagagacaagagaagtaatggaaaccaaatccgtattttgtatgaaacggaacggcataaacgtttctgaccatgtaacggtgtgttatcattatcgacatcttcaaagagagattttgattattcgatctgagaattgtaaactcttcgatgtgtagtagagtaattgtgagaaaataatgggaggttattttataatgttacggtaacacacaaaaaaggaacacttcctgtattttgttgtttccttttcgggtaaagctatttagctctaatttaggaaattacaaagtaaattactaattagatatgcagtattacttttcttcttcttctttttttttaatcacaaatataacctttttttacttcttcttcctagatctttttttttctctctttttattcctcatctccgctcggatctgctgcttaagcaaaagcttattgacttttattaaactcgcattgagacctttccacattattcac

SEQ ID NO: 28583 - DNA, 1319 bp, Arabidopsis thaliana landsberg
atgcccaacaaaacaagtgattgttgtttcccgcctacacaataacaaactccagaatcacctcatgaacctcaaaaacctataattctctgcctttgttaaaaccaaatttttttattttcttacctttgcattgaactggcggcaattaggacataactgaccgcgctgtggaaactgaccgccttgtgcaaacagttgcgcttgaatctgtccaatgacttgtctctcattcatcatctcattccattcttggatcgcctcttgtgggaacagttcacattttccctcactttttcccaaaaaaaagacggagcttacttagttccaagatttatatacatatgtatctgttcttttatatatgtaacatcactaacctgaaatgttcataaccagtgatagcttcgttgcaacggtaacaaaagtattgaccacagttattgcataccattttgttacaacctccggttcttgagatggctattttgcacgacggacattgtttagcgcttttcattatcaccttcacactcataatctcattgatcatttctttctctttccgcctttgttcctctccaagacgagaagaatcttgacgctcctgtatagagatttacatgtaagaaagagtcaacggtttaacaaagagaagatcaaaggcacaataatgatacctgcaagatttgaagcctaagttccgggctcatgcaagccacacccacatgtctcttttccttacaaagtgtacagaaactgaagtagcatttgaagcataaagcaagctgttcctcgccctctatgcaaggggtttcacatctaggacagtaagcaacgtcagtcatggattccagtgttttctgtaacataagagtttcccaccgttcatacgcttcatcgcccaacaatctcttcaatatccctggcggaacagtttctccacatttcgagtccggacacttgagcttgttaactgtgccttcagtgacatgtatgtctgtataggtcttcatacatttcaaacaaaagaaatgctggcatggtaacttaacaaagtcgatacctgtagagggtgtaaaacaactgtaaaccaacccacattactaaagaaaacagctatgaagaagaacaagatatacctgcagattcagagaagcatatgcagcactcatgcaagctctgaaggaagctatcatgacgtttctcatcgtcataactcctaatataaggaatatctgaatccggagaacgacttccaaacacagcacgcttatctctggaacatgtaacaccataaggaccaagaacaatgtcat

SEQ ID NO: 28584 - DNA, 2341 bp, Arabidopsis thaliana landsberg
cagctgtgatattcgttttcgtgactgaccaatcatttgttctaaaccttgatgttgttgacggatcaagccctaggcctgaacaaattcgtttcagtgactgaccaattgttgacggcccagcccaaactaatatatacttagaaattttgattttctttgattgactgaaactgcactaaaaaacattattttcttacataattcattgtttgttttatcccttatgtttgttcgttttgtttgtcggcaagatttttttaaacttattaatactttttagagtatttgatcaaatatattcacaaacaagttatatattaccaaaatttttcacaagtttgtaaattgattatgtacgatttagaaaattttaaattttaaaagattttttttacaaaacgatgttttttcatacattttatcttttctttccacaaaaagactgcttcaacgacattattctccagaaagtgaaaaaatgtgtttgttctttttcggcgttttaaccttgattatgctatacaataacatgatagtatcaaagaattcattgattttgtgaagtgtttgtttaatcggaaaatcaagtcgagtataaagaagctctttttaaagattcatctggatgatgaaaatcctcacctagaccaaactcttgtttgtagctcgatatgcaatgtgcttcaaggtgatgttgttgcggatattgatatgttcatcactttaacaagggattatttccatcttgcaggtttgtctttgttgatcttcaagtgtaagatactagttaagctgagattacaacgcgattaaactgaaactgcataggagagattatttaaatattaaaaaaattatcctcttatataattcattgtttggtttatctcttatatttaatcgttcgttttgtacgtcagcaagattcttgtaaaggatcaaatatcttcacaaattcacagtatggtacttattggtaagttgattgtgtacaatttataattttttcttatatattattaccgatgatttctagtgagtttatatggaattttatcaaccatttcctaacattttattttcaaagtaaatcatgtattgatggaaatgttttaactccaaaatgaattctttttttctcacgtggataaaagaacatatcaatgttctttatttgtgcattcttctcttctctcattgatataaataacatttatttctccattcttattctagatttgtatttttaagtatttaaagttattttatatcaattataactagagagccaaaatacagagaattgtaacaacaataggttttaaaaaaattagaatatcaataataacaaaatatatgaataaaaatatataaaaaagcttgaaccaacaataatgaagtttggatggaatttaagaatcaataaaccaataaaatattaaaaatctacatataccaataatccattttagattttacttagaatagtagatttatgatctatcatttatccaaaccaaaattagtgatagtgataattacactttaaaaaaatgaaacgaaatactgacaaatgtcattcttatagatttgattcatcatgtaaccaatgtagatagtcttagttatgatggttgttgctaataattattacatcaagactctattaaggttttaccatggaggtagtgccgtccatgagaataagcgaacaagtatttggttgcggttttcagaggatattaatcggtctagtttttatgaaacttagctggttttaagtaatcatgcatctcgattcgaatctcaacgtcaatctttcgtgtttttcaatttattctttaaaaagtcggctaaacaaaatatatgggcttgcagtccaaaaatgttcatcttaaactctgcatggaggctataacatgatgttagtatatccgcattgaagaaaattggtaatttgatttgagtaaaatttagatattaaaagtataaattctttttatggattattatcaataattttcatgagtttttttttttttgtgtggcgttcatcacagtggtagtcatgatgcaggcatggtaatcacatcatggtccccccggtggtggtcatcatagtcaaagtggtagttgtcatgatgttgttccttatgtatccaaggtcccataggtctcatatattcatagtttagtgtcacccaatatattataggtctatggttaaagtagttagtttttcttcttctttttttcttgccaaattcatgtgactgaaaacgaaaaatctacctcgaaggtgaaagtagtaatagcacttttaaggtaatctatgttt

SEQ ID NO: 28585 - DNA, 1896 bp, Arabidopsis thaliana landsberg
aaatagtccctcaattgttcagataattaccatgcattgagggagcttgtttcgccagtctcaaacccttagaatctgatagtgttctgcttgagcttccgataccagatgctgaaggactagtttcacttatcatgtcatttgatccaacatcaactgaaacaatgatatgtaagccgcatttagcatatgaaaacttcagaagatagagtgactagactaccaaagcaaaatataaaaactgagtacagatgagaacgcatgccttctgctccacaaagagtatcaagttcatgttgtggtggaataactctgtttagcagcattgaggcatcatcccatgaagcatatcccggcatgtcgccatttcgcgtagtagtaaaagacgtggaaacttgaagtggcatttgagctgcaagaaaatgtgagttaaaaactcaactctataaccaaactaagaagtattataaaatattcgaaccattctttgatgccttttgaggatacggatgagctgctttgcgcttaggtcgaggaggtggcacatgagctaatgtcccgtttttctgaaccttgagaaagtatttttgagcatgactccttatctgcagtacaaagtcaaataagttgaaaacattgccacaaagtaactgcgaccaaaaatgcagagtaagctattttaaaacctgaatcacagtctttgaaccaacaaaatcttcaatcttcttccagtcacgatcaaacctaaggaacatagaggagtagtagtatcagcagaatcaggtcctagttacatcaataacactttcaaaaagtcaacacaagtataaatttattacagttgaagtgctccaagaagcagatctttttagctaagcagattttttatagctaagttactactagacctaagctaagtaacataaactttcctctgtttgttcagtctataactaactaaactcagaaatcagcagcaaactaagaaatttgaagtctctaaaaacagagaaacagagataaattattacagttgaagtgcttcaagaaacttatcgtgctcttcctctgtccagctctctcttgacttggtgatggtatatggtttcctcactttcttagacgaaccctctgccacagcatccgtcgatgttggtggtggcggaggtgcttcggcgttcgttggatttcttgacggcgacgagctcatcggttatttttcagataaagacaggtgtaagagagaatgcagagagagaaagtaggaaaaagaaaagtccacatggcggggaagaagttgggatgtgtatgtggagtaggtttcactttgatctcagaccatccatttttctgactttttttattattatttcattctttcctaccacttcatttagagcctcaagcttgaagcacgtgtagacttgtagtcttttgatttcatgaaaatgaatccaaaaaaacgaaagagttttatactttaattaaaacaagtggcctaacatttatctttaacttgcgagtttgtggccatcaagccatacaagctttggaaaaacctggcggacaaaagagctgaactcttcacctgcaaatattaggtcgttgtctctaatatctaactgcttcagtttcatcaaatctctaagcaccaaatacgcatcctagtatataccaagcacctctcttccaatttcacccgaattagagggcggccaagaacaaaggtaccttgttgtgtccactgggtgcttgccgcccatgtcgttatgtgaaacatccaacactttagctgcttcagatgtcttagagagtcaagggatgaaaagctccgatttaggcaacagagaattcggttttgtattcaaatcttacgaaacaaatacaacatgtcga

SEQ ID NO: 28586 - DNA, 407 bp, Arabidopsis thaliana landsberg
gttataatacttgcttgtttgagttttctttcaaactactgtcaagttttttcgcatcttcattgcgtttttcgtataatattagcttgaaaagatgcttaatctgtgtgttcatttgaataacatgcaagtggacccgatagtagcgtcgttttctggaggagcggttgaggggattcctgctgtgatggtagcagaagttaacaatgtaaagcagcaagagcgcaagggaggcaaatactgtctaggaactggtattgaggctgactttttctccattttcctttcaaacatggttttgaaataatgagtctggtggttctacagtatgtataaacatatattcttatagaacacagggtatgtagcatgtgctagttgctctagcacaggatgctcatgatgtt

SEQ ID NO: 28587 - DNA, 5600 bp, Arabidopsis thaliana landsberg
cggtccgtaaccattcaaataagttctacgacttgttagaaggtgcaaataatcctttgtacgatggttgtcgtgaagggcaatcacagttatccttagcatctcgactcatgcacaacaaggcggagtataatatgagtgaaaagttggtggactccgtttgcgaaatgtttacagattttttaccaaaaggaaaccaggctaccacttcacattaccagaccgataagtcgatgcgcaatttaggacttccatatcatacgattgatgtttgtcagaacaattgtatgcttttttggaaagaagatgaaaaagaagatcaatgtcaattttgtggggcacaaagatggaagcctaaggacgaccatcgaagaaccaaagtaccatatagtcgtatgtggtatctacctattggggaccggttgaagagaatgtatcagagccataagacagctgcgtcaatgcgatggcatgctgagcaccaatcaaaggagggagaaatgaatcatccttcagatgcagcagagtagagatatttccaagagttacatccccagtttgccgaagaaccccgtaaagtttatctcgggttgtgtactgatgggttcaatccgtttggcatgtctcgtaatcattcgttgtggcctgtgatcctaactccatttaatttaccctcttgtatgtgcatgaatacagagtacttgttggggtcggatttgacccaagatagcgagccgacctatgagtcaccgcctcgggagccatcggagaattatcccgaaccagactaaaacacctcggagttctcgtcaagaacccataccgaggtgatgtcgagaacgcttcggggcagtctcataaagtgatccccgacccgacctcggacgcctcggggataagacttggaaaatcatcccgaggcgggctccaaaacacctcgggagcttgccttcaagtaccgcagaccaagcatcccgatcatgacccgaggccagcttaatcacggctcggaaagatctcgttttagacagaaaaacttcgaaagacttagccgataatcttcaaagatatcaccggatacaaaaatcccagaatcttcggaggataaagacaaatctctctcaacgagataaagataaagagggattttccgagaatatcgcgagaggggatattctcggaccctataaaaagcacctcggagaacaaacaaggggcaggcacaaaaacgctctcaacttcaagctatcaaaaacgctctgactttgaaggcaaaaacacctatttctcatattctatcacacttgtacgataaaatcattactttctcattaataaaatcaagaacaccgtccgcggtaattgagaattctgttgttctttgagaatctcacaaagatccgttctttgaagaaacccttaaaacaaattctattgtgcgagtttcgactctcacaatttggcgctagaaggaggggatagagatttctctaacacccggaacacggaaccaatcacccaattcacaatggtcaacaatcaagtctccagtaacgtagttgatacagaggggaacccaatccctccaatccagacggatgctcctgaagccgccgctcccgcgaccctagcagaactgaggagtatgatggctcaacttcaacagaaggtaaacgatcaagaacaagcaaatcggtccttagcacagcaactcgaagcagcaacctctcaaggacaaatcaggactacccgtttcggcgcgaggcacattcacgatcgacgggcggcagcggatctcaatcccacacggctcgtattccaaacacctggcaataccacaagacccgtccgcagaacggcaccggaaatcggacgggaccgaaccgagccggcaatttcgggaaatcgggaagcagatcgaaacgaaccacaactccctcctctccgagcagagattaccgaagccgatcatatcgacgcttcggataatgaagattccgaggagaacgttagatgggctgaagaatacgccagagagcaggaaataagctccatcaaactatccctagccaaggcggaaaacgagatgaagctcgtaagatcccaaatgcataacgcagtttcctcggcaccgaacatcgaccacattcaggaagaatcccacaacacgccgttcacacacaagatctccaatgcgataatctcagatccagggaaactaagaatcgagtatttcaacgggtcttccgatccgaaagggcatttaaagtcgtttatcatctctgtggcccgagccaaattcagaccagaagaaagagacgctggtctctgtcacctgttcgtcgagcacttgaaagggccagccctggactggttctcgagactcgaaggaaattctgtggatagttttcaggagctatcgactcttttcctaaagcaatattcggtgctaatcgatcccggcacatcagacgccgatctatggtcactatctcagcagcctaatgagccacttcgagatttcctcgcaaaattccgatccaccctagccaaagtagaaggaatcaacgatgtggcggctctttcggctctgaagaaagcactgtggtataaatccgaatttcgaaaggaactaaacttgtccaaaccaccgacaatccgagacgcccagcatcgagcctcggattacgtatcccatgaagaagagatggagctactagctagaagacacgaaccgaccaagcaaacgcctcgcagcgataaacctcagaccggcgctccgaaccacaagaaaggcgcccaaggtggtacgttcgttcaccatgaaggacgaaatttctctggagcccataattaccaggtcgatacaccccaaggcaagccacccgaggccgagggcgaggccgcggacgaggacgcggtcgagaatcttacacgtggacgaaggatcaaccctcagggaacgagcaagaatattgcgaattacacaagagttacggccatcacacgtccagatgtcgtagcctcagagcgagattggcagcaaaattcctggccggagaaattggtggaggcttaaccatcaaggatttagaggcagaaaaaggtaaaaccgagcaggtcaacgctgtggccaatcccgagcagaccgcccccgcggcgaaccccgaaggacctaaaagaagccggggtaatcgcgaaacagacgacgatgaaacagaagctgctcggggaaggatcttcacaattttaggggattcggctttctgtcaagacacggtagcatcaatcaaggcataccaaaggaaagccgacgcaaatcgcaattggacgcggccatttaatggatcaaatgacgaagtaacctttcacgaaagcgataccaacggtttagaccgtccacacaacgatcccttagtcattacattgaccatcggtgatttcaacgtcgaacgagtcctagtcgacacgggaagcacactggacatcatcttccttacaactctgcgagaaatgaagatcgatatgacgcaaatcgtgccaactccccgacctgtgctcgggttctcaggtgaaaccactatgactctcggaaccatcaaactaccagtccgagccaaaggggtaacaaaaatcgtcgatttttctgttaccgaccaaccgaccgtgtataacacgattatcggcacctcatggctaaatcagttccgagctgttgcctcgacatatcacctatgcctgaaatttcccacaaacaacggcgtgaaaaccatccggggaaaccagaaaaatgctcgaatctgcttcatggcagcgcacaagctcaggaaccccgtcactgaatcgacggccgacgcgaatcataagaaggccaagcttggccgcgctgaatagaagtcaatttccgagcagttatagcagctaaggatcgcggaggctcgggaatctacaacaccaactcccgatccggtagtcttaatctgccttgacgacgaaaagcctcgagcgatgcgtagaaatcggaggagatctaggagaagaactaacagctgaactcactgccttcctcaaagaaaacgtcaatacattcgcctggtccccagaagatttacccggagtaagtgttgacatcgtatcgcacgagctcaacatcgatccgactttcaaacccatcaagcagaagaggaaaaaattgggtcgggagcgagcagaagccgtgaaagccgaggtagagaaattattgaggatcggatccatcaccgaggcgaaatatctcgattggatcgcaaacccagtcgtagtaaaaaagaaaaacggcaaatggagagtctgcgtagatttcacagaccttaacaaagcttgcccaaaagacagcttcccattaccacacatcgatcgcctcgtggaatcaacttctagaaacaagctactgtcattcatggacgctttcgccggttacaaccagatcacgatgaaccccgaagatcaagaaaaaaccgctttttacacagaacaaggcattttttgttaccgagtgatgccctttggactcaagaacgtttggcaacctatcaagcttcgtcaacaaaatcttcgcattacagatcgggaagacaatggaagtctacatcgacgacatgttagtgaaatctatggcagagaaagattacataccccatttaagcgaatgtttcaagcagcttaacctctacaacgtcaagctcaatcctgcaaagtgtcgctttggagtaagatccgacgaattcctcaggtacctagtcacgcaccacggcatcgaggcaaatccgaagcaaatcgaggcattgttgggaatgacgtcacctcagaacaagcgagaagtgcaggggatgaagtaagaatcaataccaacattgatcttactagaactgacaaacttgctgatggattcgctgaaggaccaactgaaggtttcgctgaaggactccctgaaggacttgcagaagtacttttcgtacaagattattcgatgccaaataaggaaagggacattacccttattaatgatccgtctaagggaatcaagaagacactccaaactttctataaggttccccacccgagttatgctacacctcacctcacccaagatccgttgagtcacttctttcctattttggattcgcatgagatcacacatcaacgactctttccttttctaaaagcttgcgtgtttaagagcctccaagtgatgctaaagcttccaagaaaccgcaccttcctccccaagttgtctagatataaatttaggctccacttgccttatttggccgatcacaccatcaagcctctaacggctctattcctttattgtttgcgatttgtttcctttgttttggcatatagccgttgtactagagcctctatataagctctctttcgatttcatttgtattcaccaattattttagaaattatctcaataaactttaagtttgttttacaaagaattgtctttgtgttttgtcatttcaagttgagtgtggatcacttctcttgtgtgatttgcgggctgaataacttgtggatccaagtttgttatattgtatgttgattgtgga

SEQ ID NO: 28588 - DNA, 2375 bp, Arabidopsis thaliana landsberg
aaacttcttctttgttataaaatgcctagcttcggcttttttaatgtagtaacatcatggcgcgcatttgagaaggtttgtctttgagcgccgcaagagagatggcgaaagaagaagtgaattgcatacgcggccattatcctgatggaaagaaggactgtaactgcttgcctcttatagcaccaacaatggacatatatgaaaccaatgagtcttgccgcacgaattccgaatgcatcaagtactgtcctaagggctgcaagattgttgactgtaattttggaacctgtttgtgtgagtactgttaaagaaattagaaaccatcataacttataagacatagaaaatattctccttgtagaaaatatctctgcatcactctattcaactggaattgggtcaacttgagacacataccagttttggctttcgttaaaggaaatatatcttcaattctaaaatgtctttggattctcttggcaatagcattgaatcttgtatttatctcaaacaatgcatgtatgtggtttattaattccctctatagatacaaattcaacaaactatcaaatgatttcctaaaatggagaaatttcacaagttggattaaaacaatgtgtaatcaaacttggtatataaaagaagacaatctgacttctctcttcctaacttgtacattcaaaataaacaagaaaagacttttgagattacattaacgaagcaatggagaaaacgtctctcaagcttatcttcttgttctccctccaagtcatagcattttgtaagcttcttctacatgataagttcttctttgttatataatgttttgttttggtcttgtttgacgtttatggtgtgtatttgttgatataggttcatctttaggtgatgctagagagatggtgaaagcagaagtgaattgcatcggcggcaaatgtcctgaaggaaagaagaactgtaattgcatgccaccgatagcacatgtgatggatgatatcaggccttgcaatacagatggtgactgctacaagttctgtcctagggaatgcgagcttggaacttgttactgtcggtgtgattatggttgtacatgtacctgttgactgttaaactagtatttgaatcaattaattattattcttgaaaacatatctctgaagaagctagtattcaatacaattgaaatttgaaacaattcagtactaaaggcctgaaacaggtccaatcatatgatcataaccatgtcttcaagttccaaatctgttttacatttcttttagtgctaacaagagcttctgagaaagctctgtctctgtagaactgttgtgaactcttgttaagaattttctgagggcgagaatcacgcgaagagggctctcgagatgtacagcgtgaccagcctctggaatttcaactatctcgatgatattgtttacgctcttcttgcttttactcatctcgcggtacattctagtagcgatttgcttgtatttgacatctttctccccgaatacgagcgagatatttgtatcacaatcctccaactcttcccacaatgacctatttttcaaaggggacaatatcattatagtcatcagacattatcccatttgaatcaaattcatgatatataaatagttgcaaggaccatgaacttacggttgtctcccactgcttagatcagacaggagctttgcaacactaggaacatcaccatgtagcaagcggcttgcagcaattttactaaaatggggatgatttctcaagctagttattgcaaagatcgctcatgtgagtaatcagtttaagtccggggaaccgaaaaaaaagaaaagtaacaaaaagttgtaatgtactgagaaagtcacctgttccacaagcctccattgtaccaattctcgataaagatatatagtccattgtcacccgtcattggtgctttggattcatctgtagcacttggaatatttccgtgaaactggatccttgagtcccgggctccctgataccgcgacagctccttcgatctatagaatagcttccaaattccattataaacttcattaaacaatgttaaatttccagactaagggaaccgaccttgttgttaagcctcaaagccatgtacagggctatccttgctcccatggaatatccaacaatggttactttcccaggagtaatttgctcaatcaacttatacaatgcctccgctatcatctccattgagaaagttgggaacgtctgggtctcactagcatgactttgtacccttgaccttccgtggcctggaatatcgaaagacaagaatactcgcagatcgtgagatacccgtcatgatggggatcccttcttcaccagtttcaagaaatcca

SEQ ID NO: 28589 - DNA, 1870 bp, Arabidopsis thaliana landsberg
agttgaatcttgcactctagttcaattattcgattggaggagttatgatccatggtccaaagatatttatagatcactttggtctaaaacttcttggttaaaaaaaaaaacgttgaaacatatatatcatagacgtatactacatagactagagtataaaaaaaaatacacatggtcacctatgatgaaaacttaaactacatgcatcactgatcacttgtaaacattttctcaaaagacttcacaacaaataatttggggaagatttggggagggaggggtgaaacttctagacctaagttcgattctctataaaaacaaaaagcacattttcttgggaagtctgtcagttggattttggtccaattggtttacatagtagttagaaatgcaggcggcctgactaccccctggcatcagtcggaaagcattccaaactcgagacagacaatatgatggtccttcgggaaattatccactctgaagtatttcggtgtatttctaccgggattaacctgatcagccgatagagtttataaaaaaaaaaaaaaagaactctctactaagaaaaagccactcttttagatacgatgactaagaaaagttcaaaatcattcttttaaatgtagaagataaaagagctcttgcattaaatacttgtgaggacattgtaaggaagttcttcaaattggtactctttccatacaggtagagctagcgttctgcttatctttggcattggcacaagcatgttgaaggacataactcaagctcttccttcatagagctcaccaagtccagccctaacttcacatcactaggctctgtttccgctattgacctaaacacctgatttcaaaaataagatgccaagagttaaaaaaataatacgtaccagaagtttttccaagatttcgtcgagtctacatatgagaaaattctataataatatcattaacaaaaataaaagtaaaaagatcagtactgatgtcatcaattatgaaaagcttagttacaaggacaacttacatgagaaaacatatatttcaaggcactaacaaaaagttattgcgttaaacacataacacctctcatggtcagtagcagctcaaaaaggaaccgtgtaaataagagaagttaagaacatgaaacatcacaagaaaatacatggctgttctaatataaaattatctcattctgcacacttgtctagcaacaccatgttgatctcacactatccaaatcagctatttatatattagtcaccagacttattgttgaagctttcgacaagagttttggtccctgaacttgatgacggcgctgcaaggatcatttccccagcgttaggctgcacaaacatacaagtagagtccagtttcaatactttgatggcattataaagtataaactgttttgacctacaaggaacttggttaagctgggcctttggagagactaaccccaacttccatgacgtggtggtggaagtcaactggtttgagcatcttggattctcgaggatctgcggagtagatactacttatcagaacaacccataaaatggtgaaactaagaaaagaaacaagtctaaacagtttttctcttatatactcaaagagttcaactttctgcaagacaaggatgcttggtttacacactgcaagtagtatatgatagtcactatttgagcaatgaccattgtagaagcagacaaatatataggtgttttttttttttttggggtaaaacagtctaaaaagtatgagaaagagctgtaaaacaattaccattcaagttatcctcaaaatcaaaatcatctatagctcctgtgtagacttcaaggtcaagcatcaacgagggaattggg

SEQ ID NO: 28590 - DNA, 1500 bp, Arabidopsis thaliana landsberg
gggcgttttggtttgtttaggtgattcagggaagtcaatggcatggcgttttgcagccatgacacatagttttcgggatcctagccttgcagcttcactaaagagtaagaggagtgggagaggaaggttccatgatccgaacttggagtccatatggtttgcttgttcaaggaagaaagtattaccaagagagaagacaatccccgaaatgagagatgtcgcaaacaaaggaaccgtgcgtatgacgcttttcgtttgctccacttctgtcacccgacaaagcttccatctgtttttcctctgttgttccaaagactctgtttggagtatcattgcagctctatctagatacctgtgtttgaaaaaatcaagagttaggagtgttatacagtagtgtgggttaacaactcttaatgaagtgaatttttattgaaccttaagctgcttgtgtggggcttaatatcttgatcacactcagctttttcatagagctggcttgagttgttcgagtatgcacaagacattttggaagcagaagccataacgacccggaaaaccgttgtcaaagggctcccacctggtttaacccgtttgtatgaacacgcaccggaaataaaaatcagcattgctaatacctcacagcccgaggggatcgtgaacctaacaaaccacggacttatctgaggcattgcaatagcagcaagtaacaagaacacaaaattccccacatttccaatgacaaagctaacgagcttggcggggtttcccttgttcctaccgtcttctagttggtcttctgtaaatactcccaaagagatagaccgtccaaatataccaacggatataaccgttagcgctacgtagaacaggcccttttgtccattgcctgaaagtattggtgacgctgatattgccaagaacccgaaaccctgaacagaagagagcgtaaatttcacttctagacaaagaatataagttagaaccatactacataatcaaagttaaagaggaggtcaaggtcttacgaaactgaatgctaaagtagagagacagagcatccaaaagtgaccaataaatgcatcaacaagaaattgcatgccaagatgaccaatagctgatacaccagcaaacacatttacaatcgcagctgcgtctgtgaactttagcttcatctcgttcgtcaagtatagcatcaacatccagagggtaaaccacgcaacggtaaaagcccatgacagaactgacatacaagaaaagaaaaaaacatgatgatcaagaaaccaataaaacaaaaccctagtgattacaagtattgaccaatgtggcatcgtggtgaaaatgttgaactatcaaacaagatcaaaaagcagaaaccacatctcaactcaccgatgactcggggaaaagacgccatatattacttctcatgtggaaacaaaatcaatgactaacaatgctatcaacaaacagaacaccttcagctctacagataaatctaat

SEQ ID NO: 28591 - DNA, 3733 bp, Arabidopsis thaliana landsberg
  unsure (1)..(3733): unsure at all n locations
tcccaaaaaaaaggcaattgaattgttgtagatgttatttaaagtttagtaaaaaaatcatagaaaaaagggttcagtaaaataagattatagtgcactttttttatataccaaatcaagcttgtgtccacttaaagtgtaggccattaaataggcataataagttagttaatccaacattaaagtgtagtattaaatggctatccttctttgtccaaaaaaaataaaatggtatccttcaaagttctagataaagccattaagaaaataaatgtgtagagaagcaaagagccgtacctagcactagaagggaatgcacatcctgtatagcctgtgccaaaaaatcacacatcagagaaaaaatatctcacgcctagtctctacttgaatctttagtactctaaccaaaagaccttgaacttgaactttctgagactcaaaattttgtagggttctaaagatcacaagagtgttaacattctgaaaacttactgggatcggtggtggtaagagtggcagtaccagtgaagttacaagactcagaagcttgacctttcttttggaagaagctattgactgcatagttgcaatgagccctaacattgtcaggattgaagcatgagccttttgggtgagttgggttacagtcagctccatttccacaagcgtagtctattgccttttgaagcacttgctcgttcccctctttgcaaagacaatacgctgcgtctgaaaaatttaccaaacaaacaaaaacagattcagattcattacagagctcaagctagaactaaacccacaagaaaaagttgagatttttgaggaatttaacagagatctcatactaaaattctgaatctttatagacccacttgttagaactgagaacatataacataaacaagaaacattttgctgataaaagatgtagaaaaacagaggaaacagggcttacttgaataggtgaacatggagataatcagacagagaggaagtaaaaccgacatgacagagtgattcagagagatctgttattggagagaatctaaaggtaaaggcttttagatcgaacttgttttgagacggtggtgagagatgagtttttgggagagcaagagagagttctagacaataacggcaagtgtgtgtgtgactatgtttgataaataattatagacgaccatggtccaacactctctcttttttgaggcatttttatattgatttattactttaaaaacctgattagtcgtaattaacatcatgtaactaaaaaaaaaaacttgtcgacaaaactaaaatttaaaaagtgtgagttaggtaactatcaatatctaaaaatttgtattaatggaaataacaatcggaaaagttgatacagaaacagccctattgattgaaatttaagtgaaagttatttgtatattgacactttcataaatagctatatgaatattatttaaaaaataaagaaattcaactaacaaaaaacaagcagaagtgttttgagttttagtcaagggacacaacaaaactttaaatatcggtctcttttttaccctaggaaccccacctattcaaaaaacaaatcagtacgttttggtagtgacaacaaaaaagaatcaaagaaatgttccttttatgtataacaaatttgtaagaataaattgagtaaaatacaagagatagaaaaaaaagtttacacgaagcaatgttgcagaaaagaattagaagcattgttgtcttctagtatctgtttgtgagagacttattcggcgcaccgaaagattatagtaaaagtggactaaagtgcttctttatttacaaattttgccacctcctcgatttacgtatttcagatgagttctctcttccttttaaacacctgtcctaaaataataaactcttttttatcaacggtcaaaaaattacgcccaaaactatggtttagtgagaatgcaatgcataacttagaactgacaatgtactttttatgtatttttaataccaagtaagctaaaatatagttttttcaacttttttatacaaacttggtttatactttttcatctacaaaacaacacgtacaaattcaattcatccactctttttagactggattcttgaagaacacatttcaatataaaaatagctatttaggttttcgaatttgtgtaagaagagctaacggtaacaacaaaaaaaaggatgggttggggattttgttagggagcgaaccgagccatgtgcacaagacaacctttgccgtcatgctacgacacgtgtgatgtgccacacacaacacacatttgcacactaaaaaattgtacagtttcttttttttttttcttgttttttaaataatatttttctgtttatttgtgtggacattcttgaaagttgagctgttgttagtcggtgcctcagcttttcagtgaaacatatttatcagatttttatttctttttcaatttcaaacattttcgaacgttacttgtttatgggttgttttgttacttccaagcccatggaaaatattttgggccgtaacgttagtaatatctcatccagatatcatacctgcattgtggatcatacatatttcatatatgatcttttaccacccccaaatcattgatcataggtagtaaccaatttcaagaccggtatgtaaaacagtttctatacgaaagaccatggactaaatagtttttagtcatagagataattcgtaatccttcttcttctttttatctccggtaatgactcggaatcataagacatagtgttgtctcaacagaaacatgaaataaacattgaccttgttgttgattgtggttgtcttggttcaaaacctgaattttatcttttaatgtgaacataatttaccaaaacggaacggtttttagacatttgcttggcgtagctagaagttgatatgacacttcgatacattcattaactttgaacggttcattgaaaagcaagactttgaatgtctttggaaagatttgttcggatcaaaacaattttttttagcataaataggattgtaattttttaaatatgtaaactgagtaattctgatcattacactggtttgtcttctgatttaatgatcgtttacgtctctttaatattttggccttttgggagacaacgaggcaccacaatggttatcgttttcatcacgtaaacgaaattccgtcccaaacaataaagaacgatgataaaaccataatatatagtctagatcaaaattggtaaaagtcaacaatgattgatgattaccacaaatttcgtcttttttaccaacgtaacaaacatgttagttacatgaatagatatccnctacattcacaatggcatgtcatataagtcgatgttgttcggattatccatgccttgaccacgttataagatattttcaccaaagcatttgataatctctttttataaattacgcatcgcgaattctgttctccaatatgaattggggatattcttgcaatctgtaaagttcatatagatatatatcgccctaaagttataaagataaaagtataaaataattgtataattgatgaaaagaataataaaaaataacgttatttcctccacgttctttttcgtaagtgcacatacatgcatcaaatgtgggatggatccacgattaagattaatgttgtgttacatcaaagttatatctggataaataactacatatatacca

SEQ ID NO: 28592 - DNA, 1218 bp, Arabidopsis thaliana landsberg
gcgttcaaactgtaatccaataaagcatttgattttgattattgatatgaccaaaagtttggttaaagaaataaagaaaattgagtacttttaggttcacgttgaacacttacaattaacagtgtcttaaaataagactgttcacaacagagtcaaaaaatttcattacttactctatttcctttagtctatttaagtaatactaatgatgctgttttctattttaatttaagctgaatgatgatatctctttcacaacaaaagtaaacaagaacaaaaaaagttgtaatttgggacccaaaccaaactttaatctactttttctctttgccacaaacatagaaaacaaattcttggttttggttccataaaatgcaaaacgtttctttcaatttcttgataaggccatttgaatcagaagcatacctggcactagtaggaaaggcacaacctgtataacctgtaaaaaacaaacacagaaaatgttaagccattggttattgtccacaaatttgaaaactagaaatatagtctttattatgcatttggcgtatccattttgtctcagaatcttgaataccaaagtcattcactagtgacaaaaataaaaaccttcaactttctgtaactatcaataattagacaccacatgaatcctaacaagcactccaaaaagagcaagtttctttagcattggcctaatgtaatatcaaagagcagaacaaatgagaatagtttagagagactaactgggatcggagttagtgggagtggcagttccatcgaaattacaagagccaggagattgacccttcttttggaagaagctattgactgcatagttgcaatgagacctaacattgtcagggttgaagcaagattgttttggtttagtaggattacaatctgctccatttccacaagcatagtctagggttgcctgtagcactgtatcactcagccctgtcttacacacacaccatgaggcacctacaaagaccacaagaaagccaaaattagaaaatagatagctgcatcttccttgttctataatgtgagaagccaacaagatttgggtaaatcttggaatcacctttaaaaggcaagatttacaaatattagggtaaaaaaagtaagtaggaagttgagagacaacaagccaatcagaagaagaaaaaaatcagtaaagtttctagaaattgtgactatgccagaaaa

SEQ ID NO: 28593 - DNA, 1521 bp, Arabidopsis thaliana landsberg
cccccccccccagaaagatcgccctccttctctaacctcacaatgattcaagagctgtgagttcacctaattcaagattctgatgacacctataattttgtattttgttaaagagttttttctgacttgaacaagacaactctattatcagagacttatcaaacaatggcttaaccggagacattccggagttcctctcaaaactgaagttcttgaaggttttagaagttctggacatatcttaacaaatgagatcgataattatggactcttaactcttaacaacatctgcagaaatctagaaaataacactcttaccggttcagttccatccgagttattacaaagatcaaacaccggatcattctcgctaaggctaggagaaaatccaggactctgtactgagatttcttgcagaaaaagcaacagcaaaaaactcgttatcccgcttgtcgcatcatttgcagcattgttcatcctcttgttattgtctggtgtgttttggagaatcagaaaccggagaaacaagtccggtacaattacaaatctatctctatatctttccttttacattcatatctatctgttaatcacattaccaattgttaaaactttcttttgcaaagtaaactccgcacctcaaaccagtccaatggcgaaatcggagaacaatttactgtttacctttgcagacgttataaagatgacaaataacttcggtcaagtcctcggcaaaggagggtttggaacagtctaccatggcttctatgacaaccttcaagtagctgttaaacttttatcagaaacatcagctcaaggattcaaagagtttcgctctgaggtattgtagtagaacttcagatatgacaaatgattccaaaaagatatacaaatcataaccacctaaatacatgtaggtcgaagttcttgtgagggttcatcatgttaacctcactgcgctgatcggttatttccatgaaggtgaccaaatgggattgatctatgagttcatggctaacggcaacatggcggatcatctcgcgggaaagtatcagcacacattgagctggagacaaaggcttcagaatgcacttgatgcagcacaggggatgatgaaacaaagtgtctatcttttatatactagggtattaattaatccaaaagtttaaatctttaacgaaaaatctatgaagggcttgagtatcttcactgtggatgcaaacctgcaatagtccacagagatgtgaagacttcaaacatattgttgaacgagaaaaacagagcaaagcttgcagatttcggactctcacggagttttcatacagagagtcgttctcacgtatccaccctagtcgctggaactcccggatatctcgatccgctgtcagttttctctcttatgtctgccatatttgccaaacatggaatctttttttagtgattgtatgctccgttttgcagatgctttgagacaaatgggctaaacgagaagagtgacatttacagctttggagttgttct

SEQ ID NO: 28594 - DNA, 5918 bp, Arabidopsis thaliana landsberg
attttcttggttgacataggttttagtttcgttacttccaacctctttatcctcttcttttgaaagtttgttttcgtcatcttccttaactaccacatctttatgctctttgttctgttctcctaaaagggaattgtacgctttctcaccttcaggttctgcctcctcaacaatatttggcatagcactgggttttgcctttgtgtcttttgaaagagtggacaacatggaaagcttggattccgagctactatcagaagatacaatagcgagtatttcgggtttaggatcgatatcaacccagctatctcccacccagtctctggaaatccgaatatcctttctgagcactgttaagcataagttctcccctaacaccgtgaaaacaaaacacatgttagtcgtaaggcagagatggagaaagtggaggcaactagagagtaaaagatgaatataggaacacactaaatcataccagggatatatattttcaagtcctcagtatccggtttgccagtggcaattacaacaccttcccaccaaccatcattccaccatgcatcaacagcttcaccaattgtaagatcaaagtatgctgttttaacatctcgaggagcaaggtcgattggttggcgggttggacaaccttataccaagcctggccaggcatagcagaattaaaagcccgcacccaattcttacacaaaacattgaggaaaaaaaacacaattaggtgcccaaacataggattaaaatagcttccatttccagaaactaaaattaaacagccaatggctgtggaagcaaatatatacctcaaggtttccatatccatcttcgtcctctatatcatcatactggagttttacctgtttccttgatacgtccaggacagtgcatctaaaccaacagcttctaataccgctatcttgacacagaaactctatttttgcatcagtcttaaccactccgttgtaacaaggatgtttctgaacattggttggtgaaggaaatcttttgcccgaggcattaagttttagtctcttacatgaagattcgtaagttgttaacagatgatcagacataattcttgctcgttttttcatgcttctctcagcaccaaccattacattctcaccctcactccattcttcatcttcctctatattcatcgcacagtctacaggaccagcctccatagaacttaagcaagacataatcggttggtccaaatatccacgcaatttactcaaatcaaaaggtttaactttgctgttcctgagttgccgatagcacatgtgtacccttgccaataaagaattcggaaaggaagccacacactcctcataatgctcacgggtcaagacagtggcaggaccatcaacacattctgcactgatgacctgtgaatgaggggtgataaaaacctcttttgggtttgggttcttgagagcaactgcacccttcacttcttttgtgtagtgaaaccacctcactttgaccttttttaggccacgcttatcctcatacatatcttccagatatgcaacgtaccgatcctcccctttgctcaagacaaagacaaaagattgaacctgaaaatccaaaagaagaattacgcctccaagtgagtagtctcatccaagatctttacagatacaaatcacaagaacagtcaacatatatcgaactatgcatgcactgatgccaagtcttcaacttacccctattgttgtcccatttctgcaaaatgatgggtaatgtttgagctgtttaccacacatccaaggagctcctgaccacataatctcccaactgtgaataatcaagtttatgggaagacggacctgtaagagagattttcccatcagtataacaggaaagtaaaatgcagtgacaattatatgagagcaacaagcagctaaacatcacctcttcacttgcttgagctcgctgagcagtaaatccattgcttggaaattcgggagatccattagattcccctgactcacattttggtgactctgtaaatgacaatataacaagtgctttagaataatcagttataaagttagaagagaccaacataaaggaagaattcattccttctccactcaacagacaatttgtcacatatggtaaaagataaagataaatgcgtactcgaccagtttccttgtgtactctgcttagacagcattgaagtgagccaatccacaacttcccttctcgacctccatttgaagccagaatgaattgaattctcaggaccatgaatgcgcacaaactcctcagagacaacatagaacatgtgcctaacacttctctcagtaccaatgacagctaggatagattcaccggcagaatccttgaggaagtaatgaacaacacggttccctcgctcttgtgagacaaaatgctccttccactcgacaaaatgatgatcattctcacacatttttcaaaataaaattgattcggcaagcatcaaacgctccaaaccctcctttacatcagataaaaacactaactactgccagttcaaagtcaaagtcttttgtcctaaatcaagttctaaagcaaccccaacgcaacaatctctatataccaatgacagtggaaacccttaaaaacctttaatctaatgaccaaacaatacccctaaaatcaatcccctgtgccgtggaaatcctaaagcaaatcactctaatgcataactctgatcaacatctttcccagcttcctacaacacagctaaatcgtcgaagtctctgtaaatttccagcttttaagaaatcaaataatccggacgaagaagaagttaggattagagaaagcagataagaacccagtgagcggagagttatgaagatctgtagaaagatcagagactaagccatggaaacactgatctaagctcgagagcgccgccaaacaccaagatacgactttgactgcggtaatcagcttaagcatgacgaagacgaaatgggcatctcaaaattttcagcttagaatagatttataccgattcctctaaggtttgtacagaacaaacaaatgattcaggaaaaaaaaaaagtgaactttagaagcttagaatagcggcgagaagacaaaatcgacgatcgatttcggagatggagaagaagaagaaaatgagttctgattaaggtaaacttggagaaaataaggtattcccatggatgatgatctctcttctctctctctctctctctcaaagtcacaggggtttggcaaaagcagctgctttggtgaaggaagaagagagagagaagaagaaattgtgcaattactacgaaatgacgagaatatcaggaagttattgggccttaaatgggtctttaatgggccttaaatgaccgtggccgactaaaaaaaaaagtcaacgaaaagtcaaatagatctctgtcttttatttttttgttctctctcgtctctctggctaccgagaaaacagagaacgttaagaatcattgcttttctcgagaaaataatatttttaattgaatcgagaaactcttcaaagttgaattaagaagaatattacctcaattgagatttgagagacacgcatagagagattgattattgcatcgaatcaagcttggtttgttagtaatggcgggaatagctttagttttagatctactgaagaaatctcaatctaagaacactctccactcatcttccttctattccgcctccgccgccgctgtttctgctgccgcctctgctccttttgcgtctaggtttctcttcgggtatgtattctctctctctgtagtggatttggatttgttttgactttcactggatcgtggtggattgagttattggattgattactaggtttctgattttgtttctgattagggtttagaaattcagaattgatcatcttctattgctcaattgaataagaaaggttgcagatttatatcagttactagtaaagatcatattttgcaatccaatttgaagtatagtttaattgtggtgagattacaattatcgatgaatagttttagatatggtttttgatgttcagggcgttttgagttttacaagctctgtttctattctatatagatctcttgataggtttctgcattcatgtgtctttttgatactctcggtgattaccacttcatagagaactaattggcatgattggttgtgctacgacattgactcagattatttatgtttacagttcttttgagcctagagttgcgtattgtgatgctgctgctgcaatagatgatgattaccttggtgctatacggaaaatttctgcggatgttttgcagcgtcaaccccttgcgtatatttctaggtccaaggaatacaatatccagccaaaaccagttctctcggcctttgagttcagggcacttgcaatgactacagtgagatcccttttgatgttttatttgcctcttttggagcctaaaacggcttcagaggatgatgatgatttcctaaacaatgctgcagaagaaaaccgccacacagacttgattgttcctcttaaaaagtcagcaaagcaaattgcccgtgaggttagtatgcatttaaggttcttaccatctgtagttgcttcatgatgtcatggtttaaactgctaatttcggtgttatgatccagaccacagttgtgaccactcggagagtccttgaaaggctggctctgagttatgtctcacagcgtatggcatggaaacttctaaagggtaacatcatcttccattacttttgcttccacaacaaacttgcgttgtaaaaaaagttagtagacatatttagctcgatgaactaatagagcggagaacataaatatattatgcagatgtgcctcagtcggctttacgcaaggctcagagagggttgccgacacatgtatatatctttaaagtcagccaaacaactcttagaggtataataaaacattttggtttctctactcttcgtgaccctcccatcaaatgctccttctttttccagatcagacattgtttagttctcctgaagcctatatgcatgttctgtctttggctgtgtttatgcaggtcacttcctgggaatcgcagcatcatgggtagttcaagtaggcattgaaatctacagatgtgtgttcccgaatgttaaacccgaggaagaagaagaagaggagaaagtcgagatatcacagcaagctaaggatctcggaaacaaagttgtgggtatcacagtacgatgtggcgcgtccttagtatttgctgccattggagccgggatatgttcttgcctgatccgtccctccacgggccaatggatcggtaagctcacctcacccattattggaactttacagatagaactcgatagaattttaactttttggaccattgattgatgtgtattgtttgttctctatgtaggttgcgcgctgggagacttggctggtccgatggttgtttcggtttgcctgcagaagactcttcaagctgattattaagttcttgtgtggaaattgaattcttctacttgaatcttgatgatccaaatgaaatcatagagcttgttttttgtttctgaaatttcttattgtcttcactgaaccttaaaaacaatgatcaatagatttctcaaaatgtacctacttttgacaacagcacaataagtcaggtatttattttcctcggattttagttttgtatctgcgatttttcttctctttttacttttgtaagtagggattttgtgaactatcctcttatgcaaacgtgaaaaagaatgcttggaagaaaaattagtatttgaagtatggttcagctaaaccaaaagcctagctaaggattcgagatgattgggaatggagaactatttgtttggtttagggttcggggcaactaa

SEQ ID NO: 28595 - DNA, 2724 bp, Arabidopsis thaliana landsberg
  unsure (1)..(2724): unsure at all n locations
aagtccatgcttttcgatcattgatcagagagcttccaaaaaatatttgcaagaaaatggcaatggctccagtaataaagctggtcttaggttcagttgcttttgccattttctggatattagcagtgtttccctctgtaccattcctaccaattggtcgaaccgccggttctctgttcggtgcaatgctaatggttatcttccaagtgataaccccggaacaannnnnnnnnnnnnnnnnnnnnccgatactcggtcttctctttggaacgatggttgttagtatataccttgagagagctgatatgttcaagtacttaggcacattgctttcgtggaaaagcagaggtccgaaagacttgctatgtagagtctgtcttgtttccgctgtttcaagcgctctgtttactaacgatacatcttgtgtggttttaaccgagtttgtgttgaagatcgctaggcaaaagaatctcccgcctcacccgtttttgctcgctttagccacgagtgcgaatattggttcttctgctactcccattgggaatccgcagaatctgttaatgcggttcaaagcaagatcccgttttgggagtttcttctcggtgtttttcctgccatgattgttggtattaccgttaacgctatgcttcttctcggtatgtattggcggttattgtcagatcataaagaggatgaagaagaagtacaaaatgctgattctgaagttgttgcccaagaagatgtccaatctcataggttctcgccagctacattttcgccagtctcatccgaagattcgaacttgagaatggatgccgccgagactctcagaaacagagcgggttcagcgggtgagagcgagttaataagctgcaattcaaatgcgtcgagagaacaacacaacgacgcagagtctcaaggagagagcaataataccaacaatatgttccagaccaagagatggagaagagttttatggaaatcaagtgnnnnnnnnnnnnnnnnnnnnnnnnnnnnatctctgcttatgggtttaaacatgtcgtggaccgcaattaccgcggctctagcactcgtggttcttgatttcaaagacgcaaggccgtctctcgagaaggtgaaaaccaaattttcttaaactctttagagatacaattcaaagatcttatcaaagttgtaacttttgcaggtatcgtattcgcttttgatctttttctgcgggatgttcataaccgttgatggattcaacaaaactggtatccctaccgctctatgggacctaatggagccatatgccaaaattgatcaagccaaaggaatcgcggttctagcagttgtgattcttgtcctctccaatgtagcctctaatgtaccaaccggtaatgtcattagttttacagccatacatgtatggttggctccacgaacaatttcttgattcaaaaggaaccacaagaccatgcgaatgattattttttcttttttttttaatcgtttgtagtgcttttgttgggagcaagagtggcggcatcagcgatggggagggaggaggagaagaaggcgtggttgttgctggcgtgggtgagcacagtggctggaaacttgacgttgcttggttcagcagcaaacctgatagtgtgtgagcaagctcgtagagcagtgagccatggatacactctcactttcactaaacatttcaaattcggtttgccttcaacactcatcgtcactgcgattggtctcttccttatcaagtaaatcatagctcactctgcatatatgctttcttttttcaagaaccagtgtttatagctaggttttatttccacacttatgtaatttaataatagttataatatccatatttgcatcattgaaaaacaaacagtatcacaactatgggtctgactggtagtcttctatagaagaaaaatagtgagaagaaaaagatttcttctgtgttgtacttaaatgtaaccagtcagataaaaagtaattggttttgtttcttcccaattcttcaaaaagcaacgtgaaaaggaagaattcatcccacttcaaatacatgagagagaaaattcttctgctttttgcttttcttttcttcacttttctactccgcagatgtgtgtatgtagagctgaggaatttatgaatgtatatgtaagcgcccctcttttttttgtcttttgtaatttaatattcacattgtattgtatgctatgttccatactcggcaaatccttatatttgtggctggttctttttatttacgacttctacgaagtttcctatatacaaatttcaatgtggtttactttttgtgatcttatataagcttcaagataaattaaccattgacgttaacgttaggagtaactgtcacatcacatgactaagcgcactttgacttaagtgggtagggtatcaagaagatgatctggtaggaaagaaattatgtgacccaacatctgcattatggggtccaaaacctgtccgtaaaatagttgacgaaatctaccaaggatctcaatttttttttttttattttttatttaggagctcctttattgtgccttatataagcgcacaaacccatcttgcctgcttagagcatgaccagcggtagttttttaaatttggttctcaacagttaagatatgctttaaatccctttgttggacttgctcttatgatataaacttgtagacgagcgggcgaagc

SEQ ID NO: 28596 - DNA, 855 bp, Arabidopsis thaliana landsberg
ggttgctacagagaacacagatcaactgccgccagtctgaaggatccaccttccaattccattgctcgaccgtgtaagaaaccgagtgtctctgaagatttctggtcaacaagcacagttgatatggacaacatcaccttcccttcacaggggagcttatcatcatccaatcagacttttgattctcaatctgctgctagaaactctaatgctcctcctgaatatgtaaatcaaggtactttcttttttggatttcacggaaggggagcgttgtggtctagtgttttgtgatggttatatatgaagtgggtttgtgtgtttgcaggtcttcttctttggaatcagacacgggagcgttgggtgggaaaggataaacccaacaacccggtggatcacaatcaaggagccaagttaaagtgagtggttctgttacacactattgtttgctgaaagctaagggctaaagtctggcaatgttacattttatatgtctatcatttgcagttggaacacagcaacgtatgatagcttgctggggagcaacaagttatttccccaacccattcctctcaccgtaagtaatcaaactcctccgagtgcaggaaaaaaaaccagtcaactaactgtgttactgcttgaaaacaggaaatggtggattttctagtggacatttgggaacaagaaggtctatatgactgaacaagacttggaagacacacacacatactggttcgggcatttctgatttattttttcttttcggttttcttttcttttctcaaagcccttgttgttaccacttatcatcttccatttggagttgatcgagaatactgggaaatgtggcttatacgt

SEQ ID NO: 28597 - DNA, 2424 bp, Arabidopsis thaliana landsberg
gtgttgtaaattgcctggtcaaaattcttgtcaacagaaaggaccgtgaagctatctcctattatgaaagagcacttacactatcaactaaaagcttaagcactaattccggcttggcttacacttaccatttgcaggtatttgaatgtattaaacaccagtcatttcttcgaaacaatactaactttgattatcacaaaacctgtaatttttccatttcaatctcattctattccaggggaatttctcagctgccatctcatattatcacaaggtatcatattatacacactactatatctgagagaactaaaattatttccttcataattaacatataaacacttctcttctctatcagatgatgagctatacatttttcatttcctctgagtcttttattctgtttcttttctctattttcaggccttgtggttgaaacctgatgatcaattttgtacggaaatgttgaacgtggctctcatggatgaatgtcagaacggggttgattcaaaggttgagctctgctaggaattggtcagttaaaattaaccgccttattctagttcttgttgtaatttatctgtactatcatcattgtgacgcctaacataacttataatttattccatgcatcaataaccaagagactgttacaatatattctttaaagggtcaaatacacttctgcttttcttattatcttagtgtgtgaatgggcagctttgtttctctgcagtgttgtctccactgtctgtggttttggtctctgatataggaggtcccttgagtagtcccccgaacagctctcctggatcatagtaaatctcaatctcctctgctctaagtgattcgtcaacctgtatagagaacctctagaagtaagtaaatcctgatgctagagttttaaccattaaaagattataagaagggacccattcatgtttccgacatacctttagaactcctagacccaggaattgaaccatttccccagtaggagcatgacctttgaaagttccttcaaagtatccccagtgtctaaatttgaaggctataacaggcggccccgagtacacagagagtatttcccacgcaaacccgcgtggtaaagcagatctaaaggcgtcatgtgatgactcaaagctctcttcctcgggcttatagtactgaaactcttcaggcaaagagttcttgagcaaagcattgtaactcccaagcctaagcgtctcttcagctgataaaccttctctccctaataaataagagacttaaatctttgtttggtaattatccagtttaagatcatagtgatcgagtgctagctgtaactaccattgacaaagagcttaaacttctcagggtttatagtcttgaagtcctgtaaacggatcttatgtgagaactccatctcccatgacttgatcgcgttttgcactgtctcttctaacgaaccttctggccacacctgcgctcaaaatcaaaaacgatcaacgaatcagattcacaaaatataaacatagcacataccttaagtgaaacatatattaaccgaaggaccttagtctggccttcttcaaagagctggttcacactattgaagtctggagggttatcatacctccattgaacctgtcctgcatcttcaaggactgatctatacttatctctctcttccctagtagccatattagctttttaatggagaatgagttatgattgcttgtatcttttataatctcacaatacatgttgattgatatttagaaattagtttaaaatggattagtggtgaatcccgttttcttatccgcgtaaagttgacattttgaagttgttaattgtctcaatcatattttctaaagagttgcaaccaataacccacaattacttctttgtctgtccaaattggcttcttttctatccgattacataatgatagtttctaagactaggaaatagaatgtaaaccaaggaatttttcaagaaaatcttgtgcaactttttaaagtatatgtttgctatatgtcacatcgaatatcatatggtaatcaaagatttttgaactttttggaaattattacagcaactagtgaaccatttaattactatataggtctctacttaaattttatgatgttttcgtacatctagtctaacagcgtggtgatttgtgttagtaatctaagcatagtgttgaaagaaaataaagataggcaagagaaaggagttggttttagttacatgggttctttcttcttcgaaaagcttgttcacggtgtcgaaaatcggaggaccaccgtatctccaccgtatgtttcccgttttttcatcgttcaagattgatcggtacttgtcggcggccaatttaagaaacgaaagaacaccctccagagcatccgcagaaaaagacatttttgtagt

SEQ ID NO: 28598 - DNA, 4912 bp, Arabidopsis thaliana landsberg
  unsure (1)..(4912): unsure at all n locations
gaaatatgctgagagggtattttttattgggcttgtctactaggatttatgtgagatagaaaaaggtagcaaaaatccaaaagaggtgtcaaatacaatagtagccttgtgttttaaaaacacacattccggctgggttcgacgaaacaaattggattgggttttaaaactcattttaggcccgttaactccaattcgtattaagtgagcccaaatatttgagcccgatagtttcattacgttttttatccaaataacttctgagcccgtgtttattctgagattgagttactttactcttcttggtttttcacgaaccctagccacagtcggtgtacaacaaatcgagggtgaacgagttcgagaagagagacgtttgagagaaacccagtacaccaaatgggtacactataatagtacaccaagtgagaacactagaacagtacaccactagtacactagccaagatagaatataatagtagactagaatagtacaccaaatgggtacaccaattagtaaccaagtgaattaaaaacagtacaccactttggtgcactagacagtctactattatactaaaaacatttaggaaatgcaatggaattaaaaactataccctaaaactatacactaaaagacattattgaaatgtagtgaaattcaaaactatacactaaaagacaaagagagaagactaaacccaaggaaaaccatatatcatatggaatgaagtttaaaactataccctaaagccttagattactagaatttagaattccaagtaaataaataaattcctaattcaaaatcataaccctagattattattatgcttcataacacttgaattgaaatatattgtattataatttggattgatactttgacattctagaagtagactagaatagtacaccaaatgggtacactataatagtacaccaagtgagaacactagaacagtacaccagtagtacacaagactagtacactagactagtacaccaaatgcgtacactatgatagtacacaaagtgagaacactagaacagtacaccacttcggtacactagactagtacactagccaagatagaatactaaaaacatttaggaaatgcaatggaattaaaaactataccctaaaatccaagatagattactaaaccccaaggaaatgaagaggtcggagaacatgatgcgatatcggatgaagaggtcgagtgactggctctcccggggatcgacgttgtcgttttgcttccagagcctgacgagtcggtatcgaatgctccatgtagtccgtttgttgtcactttggttcgtcgcgggttcgtagttttgagagatatcttcgagctatccccctacctggcgcgccaactgttgatgcacgaatcacacaagtacgaaaatgggatctctagggaaggaagaagaatctttctattaatgacgagcccgcgacttaggcgaattggacggattacaaaggatgatttcttcaacgagcataaatggagtaagaacgagccgattgtagatgaaagacgagcttgaggccggaagacgatcttgatgtccgaggaagaatagagtttattcgttttatagctgaaccttgtaaaaggttgcctacgtacccttagaaagggatcaagccacacgtagttcatattagaataagtgagctaggccatcgttggaggtaggtcggcaggtaggtgacgagccggcagatgtgcgatgagctggatgaaccgtggtagagagacgagttggacaaaccgagttgtttgctgaaggtctagacgagctggacgacgagataggtggactatgcagtcaatggacgaactgccgctaggcgaggaggtagatgagtttcgcagtcgagggatgagctgatagctagacgaggagatggtcgcggtgatgggaagagcttgaagacgagctgaggagcttgaagacgagctgaggagcttgaagacgggctgaggagcttgaagacgagctgaggagcttgaggacgagctgagtagcttgaagagcttaaaggcgagcggaagagcttcaagacgagttggagagcttgaagacgagctggagagcttgatgacgagctggagagcttgaagacgagctgagggacttggtgaagagaacgagttgagaagcttgacgaagaggagcgagctaacgagtttcttaagaagggagagctgatgagcttcttgagaagggcgagctgatgagctacttgagacggacgagctgacgagcttcgtgagacaaagtgagaacacgagaacagtacaccacttcggtaccctacactagtacactagccaagatagaatactaaaaacatataggaaatgcaatggaattaaaaactataccctaaaagccaagatagattactaaacccaagggaaaaacccttattgaaatgcaatgaaattcaaaactaagatacatgatacatgactaaactctttgaaattccaagtcaatgagtaagtttctatatcaacatcataaccgttgattgttttttatggttcaaaacacctgaattgaaacggattgtattcgaattttcatggttttactatgaatttataataggttaggtacaccacattcgtgtctgtagactttcaaggtagacagtatgtccaccataatactttttgtacaacttgtctatgtaagatacatatatctgtacttgtagaaaaaataaagttataaattcatgagagaaaaatgcctatatatttgacttccttatttgcaataaacaaaacagatctaaaaaaaatcctgttatggccaagccggagctgcctgatgagatattggtagatatcgtgagaagagtgggcaaggcgtcgtgtttacacatgggggcatttttaagagcaggaagtagaggtctggtgcaagtatacagtaaggaagtgttgatggaagctaatctagatgagttgtgcgttgagcctcctcaaattttcagcaaatcgataaacccaatcaatgggtttatcttcaaagcgggactgggtagatgtttcttcgagaagtgtttacattacaaaaaccctacggcagtctactttgaatcgcttagattagttacaagagaacaagatctagatggggctttggcaatggtcgcttctcttgtgccttattattcagtcccaacatttgcatatgcaatgttcttgctttgcgcagggaagtttgaaattgcagatgagattttcaagaccttctttgttgtacatgctcgtgaacgtacgaaggaaattcgagaaattggggagaaattatttgaagacctcaaaggattctaccctccttcacaaaacacgttcagagataagtgggtttatctaaacaccgacacacttagcttccccgagtgcgctcagtggcactattatcgaatcagttgtgacgactactacctattctggtgttacttcgcataagagaattgttgtagttgtgtacacataagttgtgtacacctaatttgtcttgtttatgtttgttgaacgagaccccttgttgaattgattgcttgttnttaaaaataataaaaaagttgttatcctactgcaatattttattccggattgtattggcccttgtattgattttattataccgtacatgttagtggtgagaagacatatgttgatttaattaacctaaaagaactagtctagtaaaaagctgacaccgtcctcatattaaagtgttaaaatattaaaatatgagataggttggacagcgatatgtaagattgcaaacaaaatagaacttaatttgtcttgttactatttttttgatggcctagaagtttgttttgggaaagtattggcccttgattttttaatcgtaccatacatgttagtgaggagactagtttagtgaaagggggacacctatatttaaacaaatatacacgcaatgacacctagtttggcacctagtttgacaactttatttaaacatctagtttgtactcttatgctttttgtgtaaacaaaaatacacgcaatgttttcaaaaacatttacaaagatctagaatagttaggataagccaaacacaaatagtgaggacaaaaggaatgagggaaacatttcaatccgacattacaatcacatttcaaatttttttaaatagttaggataaaaaggaaggagggaaacatttcattctcagtttcaaataatttacctttttgataacagcaaattatggatacatatgtaacttaattcgcaaaaaaataaccaaaaataattgcaaaaatagatattcaaacacagaatgtatcacaacatctcataataaatccgttgaattaactacgacgggtgtacactacatagcaaaacaagtgtacacctttaatgaagagtatcaaataaggggtatgtcaatccaaaaagtggattgagctatagttcttcagcccttaaagtatcaaaaatcacatccccttcttaaagccgaaaaaaataaaaacgagtttacaaactaccagtgaagactctctggttgtacaccattcctcaaacgcatgcacttcatttcagcggaactgggcaccgaaccctgttgtgtcctaaaccattgcaccttccgcatttgttcttccttgtaccagtattatgtttcttcatgcataaataatcatactttgttgtgagtatgaattagttacatcataatataaatgaagagcaagaatgttaacctcaaactcttcggttgatgggatactaactttagggggcctcctggaaggacgtttagtcttaggtggaagaatgaagcggatacttgatgccttcaggtactcccacctctgatgggtcttg

SEQ ID NO: 28599 - DNA, 2169 bp, Arabidopsis thaliana landsberg
gtgagacgcttttcgtctcctacaaagagaataccctagaacaagcagcacactgatcaccaaggtgagaacaacagtgattccaacgataattcctgcacaagcccgaatagcaggcgaccgttgacacaaagaaacataaatcatctaatgtttgaatatgtttcaaggcttctttaaatcatttcataacagtagacaacttacctctcttgttcgtgtttgtcctgtggcgtaacgaaggtgtgagagatgttcagggtggagctggatgtgccaaagtattgttaaaagcttgagaaaaaggataaatttcccacctgaaaaagcagctgggacgattaacattgccacctttcttcccatagcaacatgatttatagtctctaacactttgacttaaacaagtgttgcaatcccgcaaagatatgaacggagtgcattgcacgaataagtagatattctggaaagatgtcaaagacactgcttcagctgcatagtacttgcgttgagatgacgatgaagtagcttcagctatcatatgactagtcaagtcctcccacgatctatcaaactcggtcaagtttacttgtatatctccattaacgatcaaattataactaggttccatttccagtgaaccagaaaacaaacggttggagaaacgtatcatacaaagaatcatgtcgtcagaccagataagaccttctgtctggttacgacatctctcaatcacgctattagaagaatagttgaaacagtttgagcaatcttttggttcagcacctgggatgcacaacccttcagcgtatatctgctcggatccttgtccaactgaagcactgtaaaagccgccttgatctgaggcattagaagcgagagaagagaggagaagacgacggtttttatcaaacgtatcatcaagtagagaaaaaccagttttcccgcatctttgtgcagacaaaacaggaaagcttaaaaggaaaaaacacaagactggcaagatattctttagtttcatttttcttaatatcatgcagattttgtttgagttatagtataaatatatgcatatatttacgtcgattaacacatatgtgacgactaaatcttcattgcaagtggtccataaaccaatctctattataatgaatgactcatgtggtgaccagaagaacacgttaaataatcacaattcgaacccaaaaaaaaaaacgaaggattttgcgatgagaaaagccaaagaaaattcagacgaggttacataaagaaagtgaaaggaaaatgctacgtgaatgaaatttcgtcagttgattggaaaaatcagaagcattaactatcaaagacgaagttgagacaaattacaaagacttattagctacttcacagttattatctctttggtattatttattttgatcatcgcattgcctcgaaattttatacatatgacaataacataaatgaggaaaatgattgctacaaattgagtaatttacttacatacatgaaaccaattttttattgagagcaatctaccttgtaacagagtttcaaaagcagcaatcaatggatccctaaacagagtgagcgaaatcagaggattcgcaaaagctgactcggaacgagagaaaatgaaccatcaatttccggtttacaaacatatcaaatttcagccaaagattttgtgtttagtcgcataaattattcaagtggcctaatagataggaccggttaagtcagtaaaaccggtttggatattattatacatcaatgatcagaagtctattgtgtgtgttgctgacagacaaatcggaagatttcacagcagagatcagctgacatcatatcacatatcatacatagccatttcaatggaaccactataactgaaacgtggtttaggtcaaacaggtccaatgtctccaatgaaacatcaacttcaacgaggttcaagatctgtaatggtcacatcattgatagtttgggaaatggacctgttcgtatactggctagactcgaggccatctcgttctttgttgcttttatttggaaagaagaatccacgttgtgaggatcaggaaaacatacgaatggctagggcatcatttgattgccccaagctgggcaatctggggactttttgacacatagcagtgcaatgggatg

SEQ ID NO: 28600 - DNA, 2010 bp, Arabidopsis thaliana landsberg
aaaatttgttcaatgtttcaattatttatactgtatgaaagaattcaaatgggtttgtacttggcaaattactttttgtatttttcaatgagttttttctcaaaaaaaattagtagtaatactcaatatatctacatcgaattagtgacacaaacaaaaatcaactcaattcttctctagattatggccggactatcagacttaggatcataataagagaatgtacactttttccttttttataaaaccagaaaacagtacattggagatttactttagatctatcttcctgagtgatttattattggaacatatgattaagacactgaaaagttccttgtcagaaatataaatgtaaagaactctgaccagggccctacacgggatagattatcgaattttattttaaccctttcctataatggaacccaaaaaagtatcaaataatactaaaatcgactttaaagtaatactaatccaagtgttattatgaaactactgaaataccgaaaattatggtatagccacacactaatagaacctcttaaacatgtcatcttatcatccatctaaccatcttaataagttatttattctgttggaaaactaaaatatagtttgtatgttactcttaagacaatcacggacaacatttccactcggaaattattataatttctaacaatataatattattgaattaacaaaatgaatctatatggcaccgagtcattcataacaacataatatatgcccccaactattgactacaataaatcgacaaccaatttgcaagttttttttttactaaattttatgccaacacgacgtaatccatgatgggttagtccaaggaggtaaaactttcgtgagatggtaaatttctctaataatcttaaagtagtcataatgtcaaacccaactttgcacacacatgtattatgtatatgaatataatataataatgtactaagtaaataattaggaagaaagctgaaaagtatggtcctgctttaatcgagaattaaacaaatccggtatttaaggattggtgtccccatccaattaatatctccacattctcgtcttttcgtccaaaactcaaaaaaaataacaatatccttaatctccttcaccaccgtccataatttttggcgcgagagcaacaaaaaaaaaaaaacacgacaaacagaagaaacttgtttgaaaataattagaccacgtgttagtcaacggtaattccacgtgtaacattgaggctgacgtggaacatgtgactaaccacatcacatgtttcctattagccacttacggacgggacaaaagcctccgagcgccgttcagatcgggacttaagacaccaaaaatggcttagctgttttcttaaattattttaatttaaagatactttaatttattattaatagttttgattattgtgtgtactattaccactagttgctaattttttagtatttaatttattgatatagaaatgggattgatttcagacaactaattttgtgccaatacagttgttgtccgctccattgaattgtgaggattgggtcttattcattttttctattagcttttctcgtgtttttttatgcgcaaggtgttcaaattattgatcatactagtttgcaactgaaattgaagcgtagaatatagtttaagatttgggtgattaatacaaatattatactactagttacgatacatttgtttgtggtactacatgtgctttctgctattcatgaaacaatgaatgtcccgacccaattcgaatatttgtgtactttcgtcaacattgacattctatagactatatattagaaccacatgattatacattttaaaaaaaaatcttcttttttcgtaatgagtagtagtacaaaaggcaaaagaaataaatcatgcattcgttacttattgacaactagaaataactataattatgtttagttattttcattatcggatcatcaaatcatctaatatattttt

SEQ ID NO: 28601 - DNA, 1410 bp, Arabidopsis thaliana landsberg
  unsure (1)..(1410): unsure at all n locations
actcggctccaaaaccttctcctttgagccaatgatctcactcttatattttagaagccttggccaacatggtagctctttcacagcttgaatcaaggttttggctctatacatatctctcttcacatctcgcaaaatccaacctatataccacattgagtcgtatccttgttttatttaagattcaaaagacataaaagaaaaagttcttatcaaacactatttttttccatcgacatctaagaaatgagtatcatctatcttttaattcacgaattgggaaatagttttacaaatatacgattatataagattttcaagtaaacagagtaatatcgaacatctttggtcttcaaattagctacaaactcactagtaacgttagtgaaatcaaaagactacgaaggtgaactatcctcttcatcgtctgaatcatccgaactatccattcttcgttcagcaatcgctggaaacaaacgttgtcggatgtccggagacggttgattactgtccgaagtcgtcatttcgctttccttcttaccggaatggttcgtcgtctttgtagtttccttaacttctctgcaaactttctccaacattatcaagaaatcgcgcactatagcgaacaaacgtaatccttcgtttttcgcagacttcccatggaaataatcagcagagcttttcaccaacaccatgattctnnnctggcgtgcttaaccatttaatatcagcatctgcacgttctataaatccagctaatgctcgttcgaaatcgctctcttcatccattgttttcaaaaactccctcgcattcgtaagtgaaccgcttatattcgccaatgttgcagccaaaccatcagcgtctatgatggctgctctcttgacatcttcaagctctgtcgttaaccccgtaaccacttgaagacctgtgctgcggtaacgctccacagattgtggactagaatccgcgtttgaatcatcggttttaacgcttgagaagcttcggctctgaaggcgaagagcacgaacgccttcggaacgaatgatctcaagaacaacaaaatgtaaaagtgtagttttgccatcagttcctttcacgtcagagagcttcaaaagagtatcgagcttgaaagcctgcgcatcaccgcggaaagttccaacattcattcgattccctgtcttgagaactgcctctagtagttttaaaaacagtctgctgtttctaagtttcttgcaagccacctgacataaacaaagacacagtgatattagaatagtgatggtagattcttgttttcaagtatgtttggtcagtgacttacctcgagagttccgagagcttctttgaggccagagacttcttcttgaagtgagatcataaatagaagtgactctatacgtttaaatgca

SEQ ID NO: 28602 - DNA, 1634 bp, Arabidopsis thaliana landsberg
  unsure (1)..(1634): unsure at all n locations
tgcactctatagacgtggttcgacatataacactacatagcaaaacgtttctcgtagtttagaaggttttttctatgtatatgtttttgagcataagaaatcttttgtggtggtgacgtggtgttgagtactagatctaagatatgttacaagaataacccaatttagaaaaacttagataggcaagaacttataggaagtctaagtgccagtctgaagacatattcacaccacacacttgtctaatactaataataaggcagtgcataatactttacatgagacattaatttttctaacagcttaacgcaacgaaaagataccgttttaaagattctcctcctaacgaaaaactactcactgttctgagaaataacttgtccaaaccgaagaaacagttgagcatcagaagcactcatggaagagcaattgacagaatgaggagtcttgagatttgcatactcatcgacgtagcacgaaccagccagcgtcgctgacgtgtcagtcgcagcaggtggttgttccgatagcataaaactgccgagaacacgagtcacctggtgcattgtgggtcgatcattcggctgtcttttggtgcataggagtgccagttggaaaactttcttcaccacacctgagatctttacacgtcgatgtgatgtctggatctgccatttccatcacttcattgttccccgtctttgacattatctgatgtaagtgaatcaatgaaaannnnnnnnnnnnnnnnnnntaaacagagcagctgagagagataggcaagaaagaacaaaccagatggtggagattggattcgtcatcaacggctttccttcgggttaacaactcaagaaggactattccataactgtagacatcggatttctcagtgagccgtgaagtgcgagcatactcggggtctatgtaacctatcgtgcccatcacgtaagttgaagtatgtgactttgacacacacaagcttttcgctattccaaaatctgtcaaacgagcctctaagtctttgtccaagagaatgttggacgacttcacgtctctgtgaatgatccttggactacagtcatggtgtagataagctaaaccttgtgctgcaccatatgctttcttaagccgtgtgtcccaatcaagagtctttttcttcgtagggcctttacaaaacacacaagcaagttgttatgtcacagaagattcaaataattttctatgtttggcgatgagacttaccatgaagaagatcccagaggctaccattttccaaatagtcatagaacagaagactccccaagtgagagagggaataagcttgtaggctcacaagatttctgtgcttgatgctacttagcatctcgagttctgtttcaaactgtttcattgactgtgggttgtgagagtaaagccgcttaatcgcaaccggtttacaattcttcaaaacacatttgtatacagtgcttgatgctccgtgcccaatgatatacttctcacttagattctctgtcattctcatgatatcctcgtaaacgtggagtgccatgttcatatgaaggatgacgagcttcggtgtcgaataagttactgatgtcaccaggaaatttaaggattaactattggattacatt

SEQ ID NO: 28603 - DNA, 889 bp, Arabidopsis thaliana landsberg
ttttgagtgttgttagagaaactaccagaaagaacaggctgaatgttgttgatgacgatggtgagagccagcaacggagtcagctgcttcacgagtactctcacttcttcatcatctgagaacattgctggatacttgtctcgcaacacaatgagagtcactgatatcacaattccgatcgatacagaagttatcatagccactatcaataagaactttgctcttcttgggtgttcagctcctagctcattcgacactcttacactgcacatataacacatcattttttccaatcattaagcttttttttttcttttctgttaagagactttgtgatatacctcacagccgcattgaagccaaaggccaccatgatcggccatcccaatatgttcatgctataaccaaaccgttaattccgttcctaaccaaaacagaagctttcacagggacttagaactcaccatatcgaaagagcagctacagagacttgagggttcttgaggtaacccgcaaacagaatcaacgccatgaaataccaaacctctaggctgaaaccaataaacagcaagtcactaggtgtacccatcaatgaaccatttatgtatcgatctgactccaaagtgttccgatatctcaccaaaccatgactgcagaggcaagagacaatcttgcaaagcctctgagattcttgaacgccatccaagagagccctgaccaagctctgccagaagaaccaccacaaatataaactatttgagtaacatctattaaccaccacgacatattcaatacaacggctcctccggccattccccatctaagttttagcattcagcaaccaactcaacagagtgtgctgaaacagatcatgcgaatgatataaccg

SEQ ID NO: 28604 - DNA, 1430 bp, Arabidopsis thaliana landsberg
gattcatgggaaatgtcttttgatttcaagatttgcaaaatttaacacttataaagcatacatatataaacgagatgcgtgtgcatgtaaagtatatgcagcgtcatatctctacatcacctatatgcatttggtggagaccagatcatacacattaaaatgcaaaattgtaaggttcttcagttttgaataagtcttagattgacgaggtcaattttttctgtttaccattagtactatataaggttataggatttttgtaatggactggcctggttgcttttgaatccggcctgttttaaggcccatctctttttcggtgaagaagctaaaaaaagagttttaatttcgtttgaaaatttccgggagcataaagaactatcgaagcaacacgtatccaccttaaaccacatgtatactctagaacacaacacgtgttaaagtgaaagatgagaataatacggaccgaccctacgtacttgataaaaacaattaagaagaagaatttaaaaagagagtgaaatgattcgcttgagtctctatataaacatcacaatccaactctccatcatcttccacttcttgttctactcatattccatacatcatatccctataacatcaacaaacatttcatcggcttgatcagtttttaaccaacgatgattccgatatgcgtgcagtgcggaacgggcggaaacccttgtagatgcaaagtggtaggaccgacgttagggcttgtggcgtttgtagcagccggaatagttgaatggccggtcggagcattggtttatatctttaagcacgccaaaggtcgccgcattatgggtcatccggccacccatgtttatcccaaggtctctcgttccattcccatatgattatgatgacttattgacttcatgatcactcacttctaagttatattgtatcttatctttcttccttttctgtatttctctaagaactttaatattttgattactaaagtaataatgtacgtgaaaaagttaataaatatccgctttcaatcttaaaaagtcgttatcaaaggtccttgtttgtaatcgagacaagtagataaattcctaactgaaataactggtctagtttaagtataacaaattctgaattccaatatagaaaactacaaaatcatataatttctaattacttccacgattgtaatcaaggtaaatagatagttcgagaatctattcgcgcggttgtttcgttcgatgatagtgcatacacgcttctcagatgtggtaaaaacataaaccacatcttgtttcttccaagtctttagtttgtggtaaaagaaaaagatgtgaaattttctgaaactcatctaacatacttgagtaacatacatgtagacagaaaaaagtttcggtgatagatcctaaaaccatttgtaacttgtaaac

SEQ ID NO: 28605 - DNA, 1988 bp, Arabidopsis thaliana landsberg
  unsure (1)..(1988): unsure at all n locations
aagctgttgcagatagattctcatggacaggaaaacgccacacacatgatgtttggtgttgcctagatagagctatggcaaactctgaatggatggccaagttcccttcagcacagacagaattcctccctttcgaaggttctgaccacagaccactggtgacaagcatttccccaactatcactcaacgtaaaggatgtttcagatatgataagcgacttattgacagagatggtttcagagaaagagtcattcacagttggaattcaggaggcccaaacacaccattaacaacacgaattcagacctgccgaaaggctatggcgacatggaaacgcaggaataaaactaatgcagcagagaggattggtctattgaaacaaaatctcgatcatgccttatcaaaccctggattcacaactcgagaaatcaaccaaattcgatatgatctatcccaagcttatcgtgaagaggaagagttttggagattgaagagtcgaaaaacatgggttgacttgggtgatagcatcacaaaaactttggcgataggctctattctatgctgcaactaaagccagagtagccaggaaccgtatcatagtcatcgaagatgaacaaggaaatatatattatggagatgatgacatcgggaaagtggcttactcatatttcacaaatctctttactacaacccggcaggatcatatcaactatgagagtgttttcgaaggtttccaacaacgagtttcggcttcggttaacaatgacttgactaggccagttacaaaagatgaaattaagaatgcagtttttgcgattggaggagacccagcaccaggaccagatggacttactggagctttctaccagcatttttggtcagacattaaagaatcagtggtcatggaggttcagagattcttcttggagaagacttttcaaggagaaacaaatcatactaacttgtgtctcatcccaaaggtttctacatcaaagagcatgagtgattntagacctatagcactatgcaatgtcaattacaagataatctctaanatcctagtgggaagactacagaagcatctttcatcaatagtctcagagaatcaggctgccttcatacctggccggaacataatggatatcgttatcatggctcacgaaatgctgcattctctcaaagcaaggaaaaggtgggcgaattcttacatggctgtcaaaacagatatatcagaggcgtaagatcggcttgaatggaattttttaagggatgtgatgagccatatgggatttgatacaacgtggattggctggataatgaaatgccttgaatccgtctctttcttcgttttagtcaatggcacaccaactggatacattcaaccaagccggggcattagacaaggcgatccactttcgctgtacttgtttatattatgttctgtagtcctctctcacttgctcactaatgcatcaacagttaatcgacttcgtggaatgaagataagcaacactggtccgactataaatcaccttctatttgctgatgatgctctgttcttttgcaatgctcatcaaatatcgtgttccacaatcatgaggatcttaaaggagtatgaacatgtctctggtcaagcggtcaacctacataaatcagcgatcacttttggatcaagagtcaaacctgaggtgaaaacaagactacgaataattctcaatatccacaacgatggtggttatgggaggtatctaggacttccacagcaaattggacgcattaaaatagaagtttttgacttcattgtcaaacaagtccaacaacgaacgtaagcgttggacaacaaaattcttatctcaatcagggaaagagatttttaatcaaaacagtagcccctgcttctccagtctacactatgaactgcctttaactcccgaaggaccttgtgacgacatcaacagactacttgcacaatactggtggagtaatg

SEQ ID NO: 28606 - DNA, 1434 bp, Arabidopsis thaliana landsberg
aacgctctaaagatctcgcttgtagtaacagcaccaagaatgttgactttgggaggaagaagattgctggagctgtttcaggtaatcaaatagcagaggataagactattgagtccgaataggagtctgaagagggactcttctacatagatagtcagagctacggaagtttggacaaccatagggtaacttcagtgggaacgggtttacagggaaccagagttcatcaaactacactccaaatcttgccttccagaagacatttcctcaaaggaacttccagaggacctatggtaattcagcaagcccccccccctccctctaccctcattagagacaagaatggaatccatgcttgagtagattcttgagagccaaacaaagcttgttatggagtttaatggtagatcgacaatgatagctctcacttgaagaagctagatgtacaggtagctcaaactgcacagtccattcagagacaagagggctttcttcctggaaaaccctaatgctaacccaaggaagagttgtaatgtaacacccgccccgcaatatagattaagacggcatgttattcatctgatcttgccaaaaaagttttccttagaacttcatactcgaacaaaatattgcacacaactcctcacgcttactaacctgaggaaaaaggaagaaaagggggtgagtaaagaatactcagggagaggaatcaactctgtccactgaaacatagaacactttctaaagctatacaaccatcatcataacatataaacttagacacaagcaatcaatctaacatgctttaacttctaataacaaattcataacaatcatcttatttatattaatataaacatacacatcgttaggtccagtcatcctcgtgacgactagaacctcataggtggaggctggccctcgtggctcagacactcccattccgggctcgtcagccgttcttgactagctgttaacccgtcggtccatcactgtccacatcactagggagaccatggcccatagctcgattctccccagtcatacattcatcatacatacatactcataatcatacttaacatacatttacttataatatcatacataacatcatattatcaaacatcatactcaacaatcataaagtcatatcatcatgtaatctaatcctatacaatcatatctaagcttacatatcatgcgtcaagaagcataacaaaagaaaatgataccatgtttcgcacataccaccctcactttggcttaatgaagatgaagattcacttctcctttcttttaacttaggcaacctttacctcaactacattctcataagctttagcttggttctccctcaactaagacctgaatccgtgagtcctaaaggttcctacaaattcacagctcaaaccgaacccgtttcccaaccaa

SEQ ID NO: 28607 - DNA, 1281 bp, Arabidopsis thaliana landsberg
aaacgcggagtattttggttgtggctgcatcatgcttcttttatagcaaaagccaggcacatacatattcaaagaaagtgaagagtattatcaataacagagtttgttacagagtcggttacaagttactcactctattattgattgcagaatatggtaaaacttactcggtaagcaagccttgcgagttaacgccatccccgattgtgatgtatttaggagctgactcatccgatattggcttacacaatccattgacaatgttgtaagcaatattagaaacacgttgctgcgtcaatattttaggatcaattgggggacaaggaaggtttagataaatatcaatattattcgggacaagtaaattgaatataccgatctctcataggcatgaacatgacctgcaaacacaacatcaaccttgtatttgacaaaccattgttcgtacatgactctcaatgtttcaccttccatgtaatgatgcacatagctactgtaaaacgggctatgcactaagactataagccatggcgtctctgttcgattcactccttgtaactccttttccagccatttgtattgaggtgtgtatatccctaatcataatatgcaaaactaatcaacaagctactaaatagttattgtttcttcaaaattaattccttaccataagatgagtaacatgacataacaataatataagctgacgcccttttgatggaataccacaatggagagatacttcctgatgccttatgtggcgtatgataccgattcataaaaggctgaatggttctatttcaccctcaaaacagacttctcatgttaagtttaagtaattaccctaaaagtgataaaagaaaggaagaaatttaaatattacaatgtcaggaacgaagtcgatttcgtggttgccagcagtccatatccaaggttgataagcaacacttcgctcaacgaaccttccccaagtatcccatctattgttgtcgtggttagggtagcgatccgcgtaagacaagtctcctacaaacagaaccgcttgtccttttcccggattcatctcataatggcttaacgtactatttgagtcataagtttgtcctagatcccctggaacgtaacaaaaagtcacacataggaaagttgtttgaggttttattcaaatgtgtaaggtttgatatgaaacttaaagacaacatttaacataccaattaatccaaatgtgtaaggtacgtcagggcctgatttaggcggggtaaagaaccagaaccgtctgga

SEQ ID NO: 28608 - DNA, 3657 bp, Arabidopsis thaliana landsberg
cgaccaagatctgcttattaaaatcctaagcaaccctaagttggtcgagaatcttgttgcaaatcgtggcagtgcaggttcagtctcctccaacacaagtagcctctactcatcttcaacacatgaagccaacggagtagtaaccacggcacctatttcctcaaatggacaattttacgctcagccacccataactcatattcctcccatggcgtatactcctcacgctcctcaagaccaaccgaactatggagcaccgccagcaagagatgctagttattacaagaacctgattcagcaacatggcggggatagacaagagacgctgccagttcaacatctcggttatcgatacaacctccaacctggaggaggacctaacccggagatggtaaatagcagtaataataaccagaggccaagggattcaaaacccaagataatgaaggcttgcatgtacttcaacagcgcaaggggttgtcgccatggagctaattgtatgtaccagcacgatgctacaccctaccagccgaggaatctaaacaatggtaatatcaacacttctgatatgcagaatgcaaaaagaatgagatttgacagagactgatgcagaattagcataccacacatgctctctgcctcttgctgttagcagcagagcaatttttctattttctcttgcctggctttactgctatataagttttatatacatttgaaattatttcttggttttatgccacaaatgtagaattaattagcgagtattatttggctcaccatcacagtagtacttatactatccctagtgtttttaagatgattttctacacttttatttttaacattgtgcagaaaaaagagtaaaataatcacaagatttctaagactgtctcaactactgattcattcatcactctactacataatatgaatatagtttcaggtctcaaatcggaacaacacatcaaatgcttacaacaagatggtttctcctctaccagttggagaaaagaacatttcttactctcttttttttcttacaaatcagcatgagatcatttttatattgttacatttatgaaacagaagtcttaagatcgttaatgcctgcgctgttcaaaagcttcatcccttcttcactcatctgctggacctcagttggcgacaatatccttatgcaccttacgcatcccacaaactctctgcaccagtttatgtagttatgtaaggaaaactattgtaagactgatagtcagatgaagttaatggattcacagaacagtgagagagagacttactcccatggatcatctcctacaagcagaacatcactctcataatcaacatatacaagcttccaacccgagctttgtgggtgagttagtagtccttccaatccaaacatgcattcgatagcagattttagctcctcgtagtctttaaagcttgtgacatcaattgatctcccgactgacccggttttttgaacctgccaagtcaaaacattacccaaaccccaaagtttcatgtcagattgtgacacaagaaatttgtggaatgaatgagagataatctttttaccttagtgtaggttcggacgcggggtgtcgcaattttctgccatgatgagcctttactattttgccgcagactacaatcatcaaaatcaacattgcttgaagatgtaccagtgcctccagaattatctggaaaatcttggcgagagaaggcctgtgagtctgcaaagctagctgatgtgatctgcgactggacatcttgagcaaagctagtgttgttgtttccaaccaaacaaccagaagggtggttctggaaatcagtgtctttgatggcacagaagtcatcaaggactgtgtttgagagtggaggatctagaatgttactggttgtgctattactcatacagatattctgactagcataaaggtcctgctgcatcaagggactgaactggtcaaacttgagaccgttcaactgagtgtcccacacatcatgaaacagcggtgagtttgtggaatccggtaacacaacagctgaagaatcctgggaggatagaatgaatggttgcttgtatgatccggcaagagactggaaggaagagacttgtgatgtcagctcatcagtttccaggaaagagaatccatttattggatcagactgtggttggtaaatctgatgagtaatgtcaagacattgatcagcttgtacaggcgacgaagcacccggtttctgaagtagctgattaaccttttcctcattacacactgtggatgtagtaacctggcttgcctgttccattgactgctcaagtccatgttggactctaccagagctgcaaccagagagtgtagagttctcaggtttagcaggagcactcatactctgtgaaagattctgttcttggccactcgtattagaagcagatgggttcactgttagcttgttttgtggctgcaccatctcagatttctggttcatcatcaggggttgctgcatcttcatatctcctagcaaacctccattccccattacaatattctgctgcatctcagacatgaaagatggtacattttggttgttgtgaggcctcatcatcattttcataagctgctccgaagccatactagggaaagatgcatatggcataatcccattcgcggaatcaggaacacgtataagtggccgttttatcaagctaccccattcagtttcaccagctgcatatttcataacaaaagtttaaggcagcaaatctcatgtaaagttcacaacaaggcacacttatattttactcaccaaagtaagatggatggagctgacgtttgagtcctgaggtcagagaaggaaaaatgaagagactttcaggtgtttcgatatcccatggactgacccgagtaggtttatcattacatccaggctcatcccattctacctgaaggttacgccacttagaaccaggccatctcaacggatccaaatcgctgattccaacaatagttcccatgtacctaaatacacaaccaaaacgtgtataagtgaacaaccaaatttgataaacaaaaacagaaagattgcagtttacggataacttaccttcgtttcccggaatcttcagtttcaaacatcattccaaatctcataccaactgagagctgagacccgcatatcgccttacggtacttagctagagggatcacgaactctgctggacaagctctgagaacaaacaccataagttacgttacaactaagaaaatagttttatatcattgaggattgaagaagcttttgagctaaccttggattatagaatatcaaaaaaggagtacggttggcggttgcgtgagcagcagcagcaagaacaccgatgtgcatactatccgctgagagaactgatgaaggaagtgctgtttgttggcgattggcacgcctaacaccgaccataagttgtgacttctcatcccttttggcacattttcaaaggacaaatgacagtcagaagataagcaacaccaaaatgagtcagagccaaaatatctcaatagccaaggtttttcacttgatgaacgtcacagtatccccagctctcaatctcttcgatccgtcgaactgtctccatcaatagcgaaggggttt

SEQ ID NO: 28609 - DNA, 4873 bp, Arabidopsis thaliana landsberg
tatttccactaaattttgaagagagggagagatcaaatgtaccgttaatccaatgctttggaggttgaaagtgaaaactaggtctgtgaagatgattcactgactcgactgattcagattgcaattcttcgtaaatctgatgaaatgcatcaattcctttgatattttgattgcttaaattgattagtacaagcaataataataagacagaaataacatttgaaatagccattgatccaaagactcaggatctgagtggcgtttgttaaatgtttttggccgtgtagtatttaagttgaataaggagagaatgtgataagtggaagtagtttgttgtaatgtttatataggcgaaatatgaggaggaagataacagaaacatagataatttttaggataatgttaatccgatccgaagatttttactctcactataattagagaaatatacatccggttgaaattaaatatgtttggtcggcggtttgattccttatatctagggttttctcatgtgtaatcaaacatatcttaatggatgttttaattaaagtgtgttactggaatatgtgtatatagattaggtttcataacttctttgacgattccgttgctcaaatgaagtcatggcttgaatattttttttttaaaaaaaaaaatctaacaagaattatatattatagtttattttttttcttcttctaatttaacgtggttagtttagcaaatttcaaactatatttttgtcacaactaatcattaatttctattaaaaaaatccacacgatatcaactgatggaattatagtggaaacggaaatccaaaatataaggatttaataaccaaatatttaattagtatctcatttttgattcatttttaagaagtgatgcaagtatctttctttgtggatagcaaattatgtaattatagtttcggtaattatcttttcttataaattgaccgtagaagtaggagataattatccactatgtaactaattggtttatcttggattaattggcagaatcgtatgagttcaaatattcagacccaaatatactccaattaggtgggttatatagtaaaactctgaaagtgactcttaaaaatcttggtgtatggcttgagctctaaagtgtttcagaaggcaccacaatagtgcctaacatttttttcaaattttgcatagtggttaattctgataatgatcagcctaattaatgcttcctatcaattttgtttatgtcagtagaacaaccaaaacaaaattgataagcagcattagtttaaaaaattattttaaaattcagttgtatcgcttccaatataatcggtctaatcaagaacgggttcaaaggtgaactctcagagacaatgcttgaggcataacgaatcttatgttatatgtccggttatatttgagcaatttgccatcacatcatcataacgccaaaaagtgaatcaaagagtcttcccgcagtttacgttcacattttcagcaatatatgcacttacttcccccaataaacccaattctccggtttgcttcaaattcagaatattgttttcttcaaaattccggttgtgcctaaaaactagaaatactgccacaactttttggctagtgatgttgattccatttctataattgtgaaacatcacctacaactacaacactttgcttgcatcttttgtgtatatgaacctgcagtgactaacaccatgcttaactaatcgttaccatacatatatttgaatgaaagaaatttctcttggtggatgtataattccactatattgatgttccactttctaaaatgaaagacctaacattaaaagcttgatatagaaaccatacttgacattaccagtatcattacatgtcaccttgagctttatatatacacaaatgcgatttgtaataaaaatcccaagtgaatagtagttgctgagttgtaaaagttttggaaattgatcacgaactaaaagagttttcatgattgttctttttttaaaatggtaaaagatgattctatgagaatctctcatgctcatggtttttagaaattctcatgggaagtgagaaagatgaattttctgagtggcacagtgactctgatttcacaaaattctacttgatttcccacttaaaatgttcattgttgggattttaaagcatcttcatggttgagtcatatatagaaagtgatcaagtggtatatgcatgcacatatcacaaaccatcataaccaaaaagggtccaagattcgcattatgtaatagtagaacaaaccgtctttgagaacttcgattactgtaagagaatttcaactactcgaataagaaatcatagattacgatgatgaatatttcaaatgtgtcagaagcatctgactcttcattgattgatcccacactttcacaaaagtatacatagattcatagtgatgatacagacacagacactgattttgagggttttaaaaacaaaatatcatataatggaacagaggtggttccttagttgacttgtgagagaggcgaccgtgttagctgatgcggttttgtttccttggtcgcaaaggattcataagagttgttttcacggaactcttcaactaatgtctcaattggcatggctcgtagtgattcaatggcggctttggttgggatctctggttcattcttcggtggagtagcacctgtgggctcatacttcatgaatggctgttgaacagtatcttgagctttatcctctatgcgtctggcttggcaacactgatcctgttggaaactttcaagagttttttcatgcgacctgacattttccaggatttttgatacagacgctttttcatcctctgacatgcctgaaagattacaaggatatcggtttatgattgggagattaatgatcatgccaagaaactcttttatctaagaaacagtcatgtgcaagaaagaaagctcacgttcaatttgctggattatatcatcgctgttctttgttacatctttttcagcagcagtccttgcagaatctacttcggcatcgtgctgctcgttactatcacaagcagacctaaaccaaacttgaagttaatgtatggtagcataacatgaagagaaccataaaattaaatatagccagcgttaagaagcgaatacatgtagatgaaatgaattcagaacaaaacttaaaccacttacctaacaagtgaagagacatctgtgacttgcttactggtcatctcctttagagattcatgagttatcttgcagtgtttgaaagctgattccgcatgacccacactaacgcataaaaagataaagagaggttaaaatgcataactgaagatttgtatctcaaaggaattgcaaaacatagtaaggaacttacgattgctgaagcagtaactccattcgacaatgttttgcagccgagaaatcagcaccttctctggcttcattctcagcttgcatggaaaatgtctcccactttctttttgcgtctttcgtcagattattaacagcagagacatgttcgtccaagaaagttttgttggaagagacggcatctttaaagttatggagtcttgaatcaacctgccgagcaaaacatacagtttatgtgacacaaaacgggagagagaaagaaacaaatgaaggaggaagcaacgaaccaattcgtgttggcgacgaatgtgacttgagactaggttagttaaatctgcaataagtttatctgtatcagattttgactgagcctgcacaacacacatcagttatagatgggatcaagcaaagatgtttagtgtgaaacttgaagagatgtagtatcatcacctcgtaagtcttctgaaaatcaataatgctgtttatttgactatcatttgcctctgcagcacgagtctcagcatttttagactcttccataagcttctgaaagaacgtacttgtgtattcagacatctcctgagtttgctccatcgttgtgtggaacctctgcatagtaggaataaaagagaaagcaatagttatcaactcttgtaaatctccaaggccaatatatcaaatagctacaaaatgttatatctcatgcactgacttgtctcagttccctcgcaaagagagccatttctccctgatgggacgagagagcactctgaagttcatcaaataacgacgatgttgtttcatctcctgaagcaagaaactgaaatcaaggagacaactactttaaaacacacactataagtcactaaaagaaaaggaagaaagttaacaaggcgtacttcatcaatggaacatgcacttgaagtcgtcaatgctgaaacttcctcaagacaagcattcgcgttggccttgtgtaaccgaactacattctgcactgcctccaagtgagaactatataaatcccttgaagctttaaccttctttttcatttctaggatcgcctagacaaacatatttgcaaatagtgttacaaagttagacaactgttagaacactaacagcttccagcataattttatgctacagacaacacataactcattgattgctgtaaaaccaaaagaacaaaacagtatgataccttgttgtgtgcctctaaacgagattgggacagtttgttaacaccctgaaggtgtacattttgctgggagagacaagaagcaaccctattgaacagatttgaaatttgttcagaaagttctacttgataattgtccaccacttttctgttatccgcactaagcttgtcctctcttcctgcaaagcagcaaatcgagatcacatttaacaattcttatgaaattcctaatataaaagacagctaataaatagtaaatacatataccaatcttt

SEQ ID NO: 28610 - DNA, 1532 bp, Arabidopsis thaliana landsberg
  unsure (1)..(1532): unsure at all n locations
taagactggatcagatggggagattcgtcgggtttgttccgccatcaactaatattttttaaaacacaaatgtgagctttgtttttaatttatgaattcgttaattaataatcacttgttttaaataaaagcttgctacagcattttgtggtcgatggttacgttttgattttcaagtgtaagattgtacttgtaaacaaaaaatgtattatataaaagtgttatttgtttcttcactcgtgtacggaatatgtttaaatgaacgaacttttcaaggaaaaagtgttgaatatgtttgattaatggaagcttatctattatcggagttgatatttgattatctgaaaagattaaatatacatatgatgttgtttggtcaattcatggattagagaagttaggacctcttgtggattccagcgaagttacaatcgctaatcattatcctaagtttgtatttatcgaaaatgcctaattaggaaacgactttttttgtttgggacaaagaaaacaaatttctaaatatgtttttttttcttctaaataatcattaattcattatgtatcacaaattcacaatgatgttttaacttactactaatacaagatttgtgtgttttattttgaattgcgattacgctatcatattcaatgctatcatccccacttaaaaaatcgaaaagaatcacttatcgctatccaatttgtgtgaatgatttcatagtcaaaatagccaggctgatgctttcgcaaagcaggctctcctcctcccctgtttggaaccctaactttttcgaatgannnnnnnnnnnnnnnnnnnnaaaaaaaaaaatcaacaataaaaccaagaatatgcatcatcaaagttttctggaatatattagatcgattgagaatgatgtatactgatctttggttcgcttttgtgccaaaataagttagtcaaaagaggtcaacatgatcataaattaacgaacgaatgatcgtagtttcttccttccaaattaaaaattcgggcttttagggtttcattagcaattgggccatttctagatttgggctcactttttgttttgtttttagcagttttggtatcacacaagagtttgcagatcaaagacaactcaacccacaaaggactaagtaacgatttagagaaacataacaagattcttttgatacaaacaatctcaaatgcaaaacaagaataaaagaatacaagactattgccacaaccgcaaattaagatagtacaacacaaannnnnnnnnnnnnnnnnnctcacaaacttctctaacccaaaccaagttaatcctcaagcatcacaacaatgtaaaaccacaacaaagattctacatcaatctgcaaatttttctcacatgtttcaaactcaactatacatcataacctacacaaaccaaaacaatatcagattaacagaaacactactacacactcactttgatgccagaagaatctcangttttttcgccttgcttgggagtgtcacattcgatgagccattaacagtc

SEQ ID NO: 28611 - DNA, 1485 bp, Arabidopsis thaliana landsberg
  unsure (1)..(1485): unsure at all n locations
tacagaaccaatagagtaaacaaaactttcacttacggacagggactgaacaagcaaacgaacaaacaaactgaagtggtttaacatacccagctaacaacagttgcttgtgccggtgtaggccgcaagcctgcagcaaacaacagtgactgcaaaggaatgatacaaaaaaaagttatgtgtccatgtgaaaacctccattacaacagctcaagtaaacaaatgcaattttcccaaaatcaataatcaaagctgaatcatgaagaagacctgagtcgataacactgataatgctgcactagagaaatgctgaagtgctcgaaactgtgtgtacctaagatatccttcgttgacactatagagaagaagtaaagaaagaaacttggttaaaacacatgctttaaggctaaagcctagagactctctaaaaacaaaagttccaaactttgagttcacctgtatggataaccagaaggaaagaacttgttaaggaaagattcaaccatcttctgaggaacaggtcttgcatcatcaacaactttcatctaaaacgtgataattcacataatgattctacaagttgagagcaatggcataagagagacaagaacgagggagagggagatttacagagaggtggccgtcggattggaactgataacggtgagagacagaatcagaggtttcgaaccagtaaaccggaaagtcttcagggctcttcaacattactgggtcttccttctttatcaacttcaccttctcctgcttcgttccccaagttacaaagtcattcactatagtttggagaatcataaaagagattaaaaatacaatagaataaagaattgtgaaatcctacaagaaactgcatctctgagacacgatggcacagtcaggttccgaacgttaagagtcgccggagttggagtgaaccaccacaacagtaatcgcctagagccgtctaaaaacaaaatcaaagagattatcttaacaacgacgtcgtttcttcgttccttttctacttctgaggcccaaatgatttttgttactattcactaatgggcttaattaaggcccaatattgatagatacgcggcgactagttaaggggcaacaaatatggcccacttaaaaagaaacacgacttttcttatcgcgttgttctaacgccaccgaccgaacacttctttttcttctgcaataaaccaaaaaaagttaaaaattcaaaaacttaattactaagcaaaagtgtgcacgaagaacaaagcgacgcatccgattttatttgtttgataagttcgtgtcgtcttcgtctctctaacccaattctgtggtgtctgaagaaagcagaatcaaatccatgtctttcagaggacttagcagggtaaaattacaaaaaaaaacttttctcttcttgctaaaatcgatgtactcttgtctatgtcgccagcatcttcaatgttaaaaatttgattntttatgaag

SEQ ID NO: 28612 - DNA, 1032 bp, Arabidopsis thaliana landsberg
caaacaatcctatcgcatcttaattattgacgttctagtaacaatgaatgcgacctctctcaaaagtttacgaaggttttatgtccttccatattgtattatactgattttgtaataaggcctcacaaacttcaatattcgcctctctaatcaagaaaacaaattaagagagataattcgcatcatcgacaagatcatcttacatggcaggaacaacaggacctgcttacaagaaaaatatccacctggatggacagctctcaacaccaagaagatgcaacatcttcactcccacgacttcaatgaagatgaggatttgtcactcatgtcactcccacgatttaattttgtttggatctcgaatcacttgaatgagtcgggttatttaccctgttgtatggtgctcggatcctaaataacaataattgttgaaaaaggcaccatcttctaccaaaaatgttattaagaacgaaattaattattaaatttaatacatataacatctctaaactatgttatttaccttaactaatttcctaaaacctctctacctaatttaaacataaatatatgagtcttcttataattttatttgattttaattttatattattttgaatttatacaaaatacatatagttaataaaatatttgagtttttctgtatatgaagtggttcgaattttttagaacggatatatattagtcaatcgatgaaaaaataatatgtgtacaatgtctcacattacttaaaagaattgggccataattcagagtcatactatcaaaaggactaaaatgattctgaatacaaatgaacaagaaacttgagttctcagacgttcaaaactaaaagtgctcgatttattctggttctttgtttttcaaagaatggtaaatttttaaaagtttcaaaatattataaatagttaacccttattaaagtaaaatattatatttgtttcaaatattaaattgttttatgaagtttcaaatattataaatatttgaaatttataataattgaataag

SEQ ID NO: 28613 - DNA, 1353 bp, Arabidopsis thaliana landsberg
catcttaggatctcgttctccaaggcacacccatgtattgctgaatatacatatacccatactcgtgtatatattatatcctatacaaacatagtatagagttatacatataaacaaattatctaaatccaacaaaaacaaaacactattttacaaaccgaaagtgctgtaacaacttgcaaaacaccagtttggatacacagacgtcctcatcctaaactggctggaggcctgctaaaccttgatatgtggctggaaaagtgaatatttctaagaaaaaacataacacattaaccattgagaaagtcgcattaagcagaatactggacctgtgaccatcccctccactaacagtgttgcggatcaaaccattagcgtgcaactgcataatagaaagttcatttaattatctaccgcgcaaattataagcctttaaattcttttttatgatgcagacttatcttataatcacaatattccatttgaaggatattatagatgttttttttttttttaatccagttgtgcgtaagtgatcaaattatggttagttataacttttgatggtcacttgatgacttaattaattatttgttcctcaggggttactacaggtgcgcttacaagttcacgcatggttgtaaagctacaaaacaagtccaacggagcgacaccgattcaaacatgttagctattacttacctatctgagcataaccatccacggcccactaaacgcaaggctctcgctgactccactcgttccacttcctcctccatctgctcagccataactacctctgcctcatctagagtcttccaaaacaaagacgaaccaaatcaaccccacttgccttcctcctccactcctcctggaaacgcggctgtcttgtttaaaatgacggacatggaggagtttcaggacaatatgggggtggatattgacgtcctagataaaataatttcaattttggactggtaattgaaattaatttcaatttacataaatcatcgaatatggactggcattgtttccagagtttcaacatcagccggaggaagaagacctatggtcaacattcttcgatgattataatttttgtttttattgagctcactctcatcactgcaagacaagaaaaaataaccagtgagatccaaggatttatgtacacccaaggatttagtttttgcagtgtcaatgattttcagccaataataaatcattaatttcaattaccagtcctccccaacctgtaaacccgtcatgcctccaacatatggtgatctcgacaaattaaaaaacctaataccaaggatacatgtatcacagtaggatttctgaatgctgatg

SEQ ID NO: 28614 - DNA, 582 bp, Arabidopsis thaliana landsberg
cataagcatcctcgaggtgagagtatgggcgagatgttggtttgcgaggtgaaggcagcatcgaagtcaggattactcgaattggagaaaccgaatgggccgagaggtgaggtccagaaggcccggagtggactcggtttaaacgttcaaatagttaattcaaagactaaaaacggatatatttaaagtagaatgattgtgagtaaataggtattaaatgtattctttgggtataaattgtgggtcaaagaccatgtaaagacacacacatttcttggtgcaaattagctatacacattcttttacaatactcatagttttctctatgatcatttatctattttctagtatatttgtcctcaagaataatccttcccactaaataaataaatacttgagtgtgtgaatccgacattcacattttggcgccgtctgtggggacggatgatttttgagtcattagattttttatgtgtgttacatacccgaagtgatcgcaatgtcaggagaggatactccaacgcttcgatagccgaaaccctaaagacccaagcgacaacaatggccgatatgggcagaagt

SEQ ID NO: 28615 - DNA, 1872 bp, Arabidopsis thaliana landsberg
aaggttaaggcaatggagacgcgaaaagattaattattctcacaaagataaagatctgagttaacatagaaaaagataaagtctatactcacaaagacaacatgagtttgcggtattctccaagagcccaaatggggaatatgtttctataagctgagtaactgatcatacaattccgattaaagactcctagtatctcctgaacaaaaagtaagaagcaaatataatcaatgaggttagtgaaaacaaaacctgtctatgaatataaaacattttactcacttgttgtgggtaatctccatcttccatctgcgagttgatcagcgattttgccccgcgatgcaatggcatcggatctctactaatccttcaaacccaaaatatggattaagtaacgccttgcacctaagcaataagacattctatagagaaggatgaaactcacttgtcccgcttcaatgagagccaagagtgcccatgatgtgttcacaatatgcgatttattcccaggaagattggtgtatactttgttttggcaagaaaggtagctctctccccatccaccacaacaaagttggttggagagcaagaaaccacaagcttttttaatacaaagactggtctcatatgttttgcctgaagccaacatgcctttaataccaaaccatgttgcataggtgaaacacactccccacgagccatacctaaagatttatcagcataccgatagaaaaatcgcaacatatatatattaaagtaaaaaccaacttagtagcactgaccatgaaccatcaggaagttgtgttttttcaataaactcaactgctttgttgatgcttcctactatctccttcctcttgtagctcgaatttaacgttgtgaataacacaagaccttggatggcagctgacgtgcattctacgtatctgtggatttttaatccttcatcaacaagaaattgttgtttgaaatggaatttaggtaatactagttcgcatcttactgataatctatgatgatatccccaaaagtctctgatgggttgataacctgttatgtatatgcgcatacaacaaatgatatgagagtccactaatcttgtcttgaatataagcataacaaagaagaaatggtttaacctctagctcgggatatgatctagttagctcatatgacgcaaatcccccattcttgttctggaagaagtaagcttttagaaaatgtatgttacaaaatatatccgaaaatgcagaaagtatacctgtaatgataagataaagtttacagcatcaactaaatgctcttcaggcatgggttctccaactaaattaaccggcatttgtgacaatagcaacgccgcctataacaagaaatttcaacatctttagcttgttgagaaaaaaaaaacatatgaggagattaacaaaaaaacatgtaagagttgcatatttagttaagtaaccttcaaggcttcagcagtacaatcagagacaggccatggattgtctccagtggagaaaccccatcctcccttgcacgggtgtcggtaccacaaccccggatctccacttgtgtctttccttatctatttcaggttacgaaacaagagatcaatgaaataaatcagatcacaagagaatatatagtctatatgattaagtgaacaaagtacttgagtgttcttgatgtagttatgggctttcttaagcatcaaaccatagtcatcaaccaaattcgtcgccaagattgcttggaccgctaaagtcacgtcccacagctgagatccggtgtatccctatatggacattatatacttgtgaaatatggttcatatggaccaaaaaaaagacgaagaagaatgataatgtacct

SEQ ID NO: 28616 - DNA, 1570 bp, Arabidopsis thaliana landsberg
aagcaaggtttaaagtaacttatagggtaccattagcactggatggttggggtttctatttcaagtctcaaaacattggaagcaaagaaacccatagacaaaaacttaaactttatgtgaaagaaacgttcactaacctttgacactactgtgaacatccacagtaaaccaagtgcagttttgcggtccaacgaagaagaagacaagatgactgacatgattccaccacatctgaggaaactttgggacaaatggaacatacgtggagtcataatactcagtcttttcctccaaacaatccttattttctttgcacctagccgaagacgcaccgcaaagaagctcttccttgtcctcatatggtcagcttatcttcttgctgattgggcagctgattacgcggttgggcaaatctcagacagccaagaagaagaagctgaatcaaacaaaccatccaagaaccgtgagctgctagcattttggtcaccgtttcttctcttgcaccttggaggtccagataccattacagcacttgccttggaggataatgagctttgggacagacacttgtttagtcttgtctgtcaagcggtagccactgtgtatgtgatcttgttgtctataccaaataggcttctgactccaacattaatcatgtttgtgggaggagtgatcaagtatgtcgagagaacagctgcgttgttctcagcgagtcttgacaagttcaaggactctatgctcgacgatcctgaccctggtgctaattacgcgaagctcatggaggaatatgaagctaggaagaagatgaatatgccaactgatgtaatagtggtgaaggatccagagaaaggacgggaaggcaatactccagttaggcccgacaatgaattgaccgcactacaagttattcagtatgcttacaaatactttaacatcttcaaaggtcttattgttgatctaatcttcacaaatcaagagcgcgacgagagcaggaaattctttgacaagctgactgcagaagaagctttacgtatcatcgaagtcgagctcggactcatctatgattgtctgttcaccaaagcagagattctgcataactggactggagctgtgttccggtttatagctttggggtgccttgttgcatctctctgcctcttcaagatgaataagaaagatcaatatgatggattcgatgtcgtccttacttacgcattgctcatatgtggaatagctcttgattccattgctcttctcatgttctgtgtatctgactggaccatcgctagactgaggaaactaaaggaagacctggaagagaaagacaccttgacagacagagttctcaactggatcctcgatttcaagacgctgaggtggaaaagatccaaatgttcccaggatggacatgaagtgctcaacagaaactttatgtttcgcagatggtctgagtatgttcatgcttacaacttgattggcttctgtctgggaatacgtcccaagagaatccattataccaagggtaagatacacagtttctttcaccagaccattcgcatttttttcataa

SEQ ID NO: 28617 - DNA, 4690 bp, Arabidopsis thaliana landsberg
gtgtaagagattgactttgcatctaagagatcatgggatcactgagaccaaaggatgtggagcgaatggtcacacaaaggatgcggatggcctttgatttacctttgatctagctgaaaaaagtttaagattaaaaagatagatgagtttacaatgagtaaatacaagagtttaaatagagaagaagagaagaggaagagttagtcttggaacaagctccaagacaactcggaaaagaagaaatcataaatgaaaatttgaacaaaaaatagacccatggccttccaaattcgtggccctcttagtgggcttgggccggattgataaggggggatttggaagtgttacttaggcctcattaaaaacctactaaggaaaacccaatgggacaaaaccttagcagggaaaaagagcacccaaagcaacacttagcccattaccaatcgtcttggaaagatatcgcaaccatcatggttcgtgtccaagtgtttgggtagtccgaaatagcttggttgagaagtttggtcttcgaacgagtcatttgtcttcttggttcggccaaagcttgctcctccgctacaagctgctccgctggttcaagttccgggtggtgctcgggaatagtcatatcaggtaagaatgtttcccatgaccccattgttatacattattaggaatgatcaattacaaaggttggatatatttcgagggtgtcaatccagtaggcgagttcccctttatttactctttaaaaagaataagttttgggggagagaaagaataccaaaataaaataaaatataaagaatggtcaatttatcatagtatagtacaggaataagtctagaaggttcttgaatattagcttgattgatgagacccagcgatgaaagcatggtggatatagttgagtgctttggtatggaatctagaatgttgtgtgggctagcggagaattacatggtgatcaggatttgattagaactgttcaatacatggatttggtttgtatgatcaaggtaataaactagagagattgggagtttctatgtttttcaaacctctttcatagattcaaccttttgttttgcttgagggcaagcaaaagctaagtacgggggagttgatatgtcctggtttttactgatttctaacatagtttcagaattgtttttagagtctttctagtctttttcgtatgttttgagtcatttcaggtacacttacacatctgggaactatggagcacaataaggaattgtggaagcttttcagcaatgaagatcttgaaggacgtttttcaaaagatggtgtcgatcgacaccacacctgtgtcgatcgacactcttattgctgtcaagggaattctcatttactgccaagtctttgagaacccctgaagcattccttattggcaaagtgatccatgcacgtttatagactctaatctacctaattgtttggtcattggagacctaagttttgttttagagattgttacacattttgagagaagaatccaatccttttagagaggattctgaactcctttacatctattcttaattcatcaatgcaaactattcagattatgatttgtttttctattatcatgtctaagtaattaccttgttgggtttaaagagtctcaatagggatttagatggattagtagatcgaaaacccattaggattattcttagagttcttcatcttgattattcttattgctagttttagattgatcacctagaacttgatattagataataggtatgcccgccatgggtagttgttattagaactatcatagatgagcctaggaatttaagaaagaacatgtaggctcatagaagggctctggtttagatactaggtgaactaatcaagcttaataacaatgcatgctttagcacaagatttctcggcttctctggttatcttagctctaagtatagaaactttcgcgaaacgccaccggttactctagaatcatagtttgagttagagaactgtgctataacaatcctaatattagctagatctacaatttatctatctcccgagacaattccttagacccgatgctttaatcacttgaatctacaactcgtttacttgtttatttgtcatttacattcaattacttcattcaataacatcataagtctattgtttgaacagcgagagctcagtggaattcgaccctgaagtgtgataagtgtgtattttgcatgttttgagcatccatttgtcatcattttagcatcatatcatcacggattataccatttcacatcatttgtcataactttgcatgtttaggatagttttgcatgcatgttgcatatttgcgttgatttcaggtgatttggagctgttgacgagctatctagaagaagcggacctgatcatgacaaaccactcgacccagaggtcgagtaggagcttcaagatctcaagagaccactcgacccccaggtcgagtagaggacatcaccacttcacttcaccactcgaccacgaggtcgagtgccctcatctccatcactcgatcacatcactcgaccatgaggtcgagtgtcttcacctccatcatcagacaaccactcgacctcgtcaatcaacctggaagtcgagtatctcctgacaaacactcgatcacttcactcgaccacgaggtcgagtgtcttcaccttcattgccagaccactactcgacctcattgctctacttggaagtcgagtatcaccatcacaccactcgactacatactcgatgataagcttcagagccttcttcattccgcactcaaccagacactcgagcacaggaaaggaaagaagactccagctactcactcgacctcccactcgaccacatgggtcgagtacagttctttatccgtcccagtacttcgtcgttttgagtattagggtttcgggatatttggctataagtagcatgtactgcacatggtcgaagaagaagttttttatctagttttattccgcagaccttgtgttctagaccttttgtaatctggatttctctttatctattcagtattcagtatttagcttttgttcttgattttgtttactgttgttcattctgttatcatccttctgttacactgctgttatcatgttttcaacctgttcaacgtttatgctttctgttatgatgtcagagtagtgaataggtttctgaggatggatgagagtagtgtagaattctcagtatgctaggtgattgagtattgattgatagatcccttctggattagttggtcttaatgcctattgctttttgatcaacaggaattttagcccagacattttcgtgcccaaaaggtgttcgtttaattatctgaaccactaattccaaagttgggtggggctgtaccaaggtattggttgtagggagcgttttagctttaacttgttgatttgtaatgcctattaggttagctctcatcaatggtgattgagtctgggactaggttaacttgagggtctctgttacggtggcacttacatttggttaatgaacttgttgtcaagggataatttattgagcatgtcaatcagctgtaaactgaggaaacgaaactactcaattacccccatcctcgggaattctttatctgattgattttattgtttactctactgttgtttactatatcttgttacctgttgcttagtttttgcatttctctcctgttactcgacctgatactcgaccacccagttgtttggcaacagactgtgcaatcgagtatcctgttttgtttactgcctgttacttgaccaagtcactcgaccacacccagtgctctgcaacgagctgtgttggtcgagtgttttaatgtttctgtttgattttctgttttctgcatgttcacttaggactgatagaacacaccaaaactagttattgcttggttgacttagtgacttctggtcacatcttgattgttagcatcacacccatttggattgacaacctaaaatactacaacgacatgattggtgttttaggataattgactaaaaatctattatcaatttggtaccgttaccaattgggtgtttgtttgttacatttgagatttcagacttgcttagatcaagttctttttcaattttcatttcggttactaactgtgttttcttgttgtcttcttgatccaagtacacctctattgtatgcaaactcgatcaacaggcaactagaacctcctttttagcgataacatcgaccgcatcgctctcgaactcagagaaaggagaaacacagtcaaccttttaccccagcaaccacttgaaatggctgacgtacaaaatcaacagaatggccctgcaaacattggtgctggagatgcaccaccagaccatcgtcagaggaaaggaattgcaccctctgctatccagaacagcaactttgagatcaagagtggtctcatctccatgatccaaggaaacaagtttcatggtctacctatggaagatcccctgaaccatcttgacagctttgataggctctgtggccttaccaagatcaatggtgacactgaagatatgtttaagctcagactatttgccttctctttgggagataaaacacaccactggaaaaagactctacccccagacttcatcacttcatgggacgattgtaggaa

SEQ ID NO: 28618 - DNA, 1814 bp, Arabidopsis thaliana landsberg
  unsure (1)..(1814): unsure at all n locations
ccctactcttatatatactactttgttgagcttacacgacatttatatagagctagatagtcaattaagatatgagaagcaatcaagcaacataatattagatagaagatgatttacctccattcctgcttctaaacgagcttcaacaatctcaaactcagcccctttgtaactcagggttcggcatacatacatccccctattacatagaaggggtgttagaatgaattatgagcaatgcaaatggctaaatagtatgacacggcttgtaaaacctcgctttcatatccatggcaaccaattccaacgctcctgtcccacctttatcaagggcacctgcacaaagttgtgttaaagttccattccaagttatgcaatgcataaggtagagtaagagaagcgaagtaattattagaattcagtgaatgcggtcaaacttcatttaatgaaatattttgtatatgctctagacagaagctaaaacctgacacttaaatgaattcatgtttatcgaactataagatagaacgtactaatccaaatgttacacacacacaaaaaaaaaaaaaaatcaattaatcaacaggagtagaaaagaaaaccaacctaggaatttgttaaaatcactaaaacttgttccagctccccagagaccaagcctgaccatataacccatgttttgtggttctgatgccccagtagccgagcaataaataacacgtgcttgggggatcttatcctgcttttccagaattcattatttagagtcaactagatggcactaaccacaaattaagcatgttaaactagaatatacactatattatctgaaaccgagaaaaagtacaacccaaaaagacaagtcgaagtatataatctctcactcttcagagccaagagcaatattaaaagcaacactgataagaacattcagtttcaagtagccagacctgaatgtcaacaactgcctgtccgatgcgtgtcggctgactcccagcttcaggtaccaaatttttcgctttatggcactataaaaaaggaaaacaaattagtacctgcacaatgtactaaagattagaggttggcccaaaattgataaaaccagtgatcaagcaacttacaacgacagggtatactcaaattgttcaattcacaaaaaaagggggatgatgattttaacgcaaataatttaatatacttcattcatagaactgttacctcatcaaagatcaagagaccatcaaattctggtccacaccattgaacaagctgctgtaaacgagaacggcccttctcagaggaagcaatgaggctattgtatgtcaagaataccactccttctttaataccaacatttttcgagtcaagcttagaatagggtagcttgttcaaaggattcactgcacgtcaaacatattgttatttagttgcagacaaaacaaactggacatttgttcacttgaatgaacttatccatcgacatggttcccttgatttgtcgtatttttccatctcctaatattctattaaaattccaagctcaaacctataaaggattaatgagactaagaatcaaatatcctattggactattctaaagttacagtccaacttttatttacctgaaattttcatgaactgcacaaacatcagctacccataacattctctaggcatgaagacaccataaacaaagttcagggacccattacctttatcagtaaagaaaataagttctctataaatacatgtgtactctacatcgtaatattaaagcatgagtcaatntatccattcagcanagtcagaatctc

SEQ ID NO: 28619 - DNA, 1619 bp, Arabidopsis thaliana landsberg
gttcgacgaaacgtctgagttacggaggatgtattcccgctattttagaagctttggatagtattgaagatgttgaagatgcgttgagtccgtgggcagagaggcttagtaacaaggagagaacgattatattaaaggagcagatacattgggagagagcggtggagatattcgaatggtttaagagtaaaggttgctatgaattgaatgtgattcattataatatcatgctcaggatacttgggaaagcttgtaagtggaggtatgtacagagtttatgggatgaaatgattaggaaaggtatcaagccgattaattcgacgtatgggactctcatcgatgtttatagcaaaggcgggcttaaagtacatgcgctttgttggttagggaagatgagtaagattgggatgcagcctgatgaagtaacaacagggattgttcttcaaatgtataagaaggcaagagagtttcaaaaagcagaggagtttttcaagaaatggtcgtgtgacgaaaacaaggcggattcacatgtttgcttgagctcttatacttacaacacgatgattgatacgtatggtaagtccggtcagataaaagaagcttcagagacgtttaagaggatgctagaagaagggattgttcctaccacagtgacttttaataccatgattcatatttatggcaataatggtcagcttggtgaagtcacttctttgatgaaaacaatgaagcttcattgtgcacctgatacaagaacgtataacattctgatttcacttcacacgaagaacaacgatatagaaagggcaggagcctacttcaaggaaatgaaagacgatgggcttaaaccggatcctgtaagttaccgcactctcctatatgcattctcgattagacatatggttgaggaagctgaagggcttatagctgagatggatgatgataatgttgagatagatgagtatacacaatctgctctcactagaatgtatgtagaagcagagatgcttgagaaatcatggtcatggttcaaaaggtttcatgttgcgggtaatatgagttctgaaggctattcagccaacatcgatgcatatggtgagcgtggatatttatcagaagctgagagagtgtttatctgctgccaagaagtgaataagagaacagttattgagtacaatgtaatgatcaaagcgtatggaattagtaaaagctgtgaaaaggcatgtgagttatttgagagcatgatgagttatggggtcacaccggataagtgtacatataatactctcgtccagatacttgcgagcgccgacatgcctcataaaggtagatgctacttggagaaaatgagagagacgggatatgtgagcgattgcataccatactgtgctgtgatatcgagctttgtgaaactcggtcagctcaatatggcagaggaagtgtataaagagatggttgagtacaatatcgaacctgatgttgttgtatatggagtcttgatcaatgcttttgcagatactggaaatgttcagcaagctatgagttacgtagaagcgatgaaagaagctggaatcccgggaaactctgttatatacaattctctgattaagctctacacc

SEQ ID NO: 28620 - DNA, 1103 bp, Arabidopsis thaliana landsberg
atttttccttggaggagttccccaacaaagctaaaatcacattggagaggtttatgtttctccactctatgaaaggatcaaatgttgcatgcgagatatatccaggcttggaaactaaatcattgcactaattctgctatcagaattaaagaactggttcatgccattgatacggctcactcaaatcgtcatacaacaatggaacaaatttatgccctacgtagagaacttctctaggcttaagacgagaaaaccttctggaaatttaaaagtaggaaccaatggctaaatgacagagaccacaatactaggttttccacgcagtgacaaaaaaatagtgttgctcgaaaccgactcatgttgatccttaacagtcacggtcaagaaatacgaggaaacaaggaaatagcaaaggaagccattagatacttcagggatctattctcaagtacaaaccattataatccatctaatgctctgcataatattaaatcgactttaacagaggagatgcataatattaaatcgactctaacagaggagatgaattcagccttattacaagctagcactgaaaacgagatcaaacaagcacttttctcgattggtgccactcgcgtacccgaacctgatggcttcaatgcagctttctaccaacattattgacatattttgagaccagcgctagtagcggaagggcaaaagttatttgctttgggagaaatgctaaaccaatggtaacatccaaactagtttttgatacctaagattgtgattcctcaaacaatgaaagacttccgtcctattagtctctccaatgtcacatacaaaataatctccaaagttttagcaacaaggttaaaatctattctctcggatatcgtatttgaaaaccaaaccgctttcacactaggacgcttcatcatagactatgtgcacattgtccatagtattggattctctatgggtcaggaggcgttggctaattcttattttgccatcaaaaccgatattagtaatgcatgtgacatgatcgagtgtggtttcctttaaggtgatttaagagaaaagggctttgctccatagtggattacatggattat

SEQ ID NO: 28621 - DNA, 1297 bp, Arabidopsis thaliana landsberg
  unsure (1)..(1297): unsure at all n locations
tattctagatatatcttaggtcttatgtagaagatggaaagaagattaaatggtgtccatcacggggatgcggatacgcggttgaattcggtggaagtgaaagtagtagttacgatgtttcttgtttgtgttcgtataggttttgctggaattgcagtgaagatgctcacagtcctgtggattgtgaaactgtgtcaaaatggatattcaanaaccaggatgaatcggagaacaagaattggatgcttgcgaattcaaagccttgtcctgaatgcaagcgtcctatcgagaagaacgatggatgtaaccatatgacatgttcagctccgtgtggacatgagttttgttggatttgtcttaaagcatatcgtcgtcacagcggtgcttgcaataggtttgttgtggagcaggcagaaagtaagagagcattgcttcagagtgaaatcaaaagatacacgcattattatgtaagatgggcagaaaatcaatcgtcgaggctaaaggctatgagagatctggagaagttgcaatcggttcagcttaaggagcttagtgacaatcagtgcacgtctgaaactcagcttcaattcaccgtagatgcatggcttcaggtcagtaaaagtatttaaataactctttgattatactaacattacgaaactgtatatatatagcaagcaccgtagaaattagtaaaaacgatttcatgattcaactaaagttgtaatttatcaaaagtcgaacttagagtttcatcggtaaatcaccatgatgcgaataaccaatgaatttccaattttgacatttgataaattagaacattgttgttgaacatttattgacatgtgattgattttactgtggtcgatcatcgaatgtaggcgagtcttgaaatggactttgcatatggatactacctacctgagcatgaacatgccaaacgacaatttttcgagtatttgcaaggtcagaagtcagaaccctccgtcatttatttgtctatctttttcttcttcagaagcatcttaactttttcctattgttcaggtgaagctgagtcaggtttagagaggctccatcaatgcgtagagaaagacttggttcagtttctcattgcggaaggtccatcaaacattcaatgatttccggacaaaactagctggtttgaccaggtaagcgtttttcttcatacatctatcctgttgtgtgacagagaagaagaagaagaagaagaatgtgcttaaagctttcagatagatgttggaatataattttgtgctgaaacccgtatgggaag

SEQ ID NO: 28622 - DNA, 2103 bp, Arabidopsis thaliana landsberg
acagtccgagtctgacctttaagaatctttgaaaaacccttgtaaatcctttaaaattcttgtaaacccttgaaaatctttttaaaacccttaaataatgtttgaaccattttaaaactattttgaaccctttacaaaaggttttataaagatttacaaaagttttttaagggttttaaaacccttgtaaatcctttaagaatcttttaaaaacccttgtaaatcttttaaaagctttgtaaaccatttaaaaatcttttaaaaccccttgtaaaccctttaataatttttgaaccattttaaaactcttgtgaaccccttacaaaaggttttaaaaatatttacaagagtttgtaaaggcccttgtaaaccatttgaaattcttttaaaaacccttgtaaaccctttaataatttttgaaccatttaaaatgattaaatgcactcaaataatgtttttattgcttttaattactcaaacaacactcataatttcagacttactagaatgactctcttttattttggacaaactcgtgcattcattcacttagataagagagttcatacaggataggagggcatcttttgtcaaggcatcagcctgacaattatgctttcgtgaaataaagaagaaactacaagcatcaaaagaaattgagagggagaggatatcatggagaatcccgtgaagctcttttgcgagaagcttccgattgatagctttgacaagtgttaacgagtccgaagcgaaggagatccgcttaatttccgattcaattgcaactccaattgcgaggagagttgctagagcttcggcttctaagggcgagacaacaggcgacgacgatgcggaagaccgctgaaaaatggtttggtttcgtgaatctttgcagatccaaccaaaacccgcggaaccttcggtcttccaagcagcatctgtacaacgaacaggatcgatagaatgggatcgagttatcagtattggatcagggattctagcgggtaaggattgagtctgattggctgattatcattcctttgctcgaataatcgcaaggagctaagcatcttccgccagaatttgcttcttattgaagatcagttggtttcgggaagaccagattgtccacaaaagccaaggtgagagcggaccaccacctaatcctgatggagggagacagatagccttactcgaagaggcgataccttcagtgactgaaagagttgaagcgcagatcagaggggacttgaagggggccaaactccatctcttttgggcaaaagcacacttgaagagaagatgtagaacagattcatcagcgtcacaaaacgggcattttgctgactcagtgatatgtcggtgggtgaggttgaggccaactggaagggcattctgacatgctttccataagaagagcttagtctttggcgaagtttttaagttccaaatgtgagttttccagttgaaaggatcaggagaaacccggggaccaaagggatccaagtcttcctcaagtttaagggcttcccagtagccagatttagaggtttagtctccagaacttgtagggagccaagcccagtgatcgatggcacctagatagcttgggtgaagactgagaatgcatttctcgtattctggcaggataactctaatgagttttaagttccaaacactagagttaggtaggagcagatcagagaccaccaggagatgagagtctttgtaaggtggccccatttgagcgacaggagatgagagcgatagctagggtgttctccaaacaggagttgtggaaccattaccaataagtttccatagcctcgaagagagaagatctcttcccatacaaatgcttctccagccgtgagaggccgaatttttcactttactatccaagatagaagagttcctgcaatatttaccaaggaggaccttagctagaaggcatgaagggttctgcaggattctccaacagagtttggctagaagagctctattaaaagtggtaatatctctaaaccccaggcctccagttttaaagaacttagtcattctcttccaagaaatccaacttattttcttcttttctgaatatga

SEQ ID NO: 28623 - DNA, 1633 bp, Arabidopsis thaliana landsberg
tatatgtctctctgtttttatgggttggtcacacaaaatgatcgatataatacatcttctgtagtagaagtctcttgctcttgctctctctctctatcgttctagaagatcgtttaccctcgacacgatgaaaatgtatatcggcagaaaagttacaagagatttacacagcttggttagataaaatttctccttaactctctaacaaccaaaaaagtttcaatttgttttctccaagtgtgttaattaatcagttccacaaaaatcaccagcagtttaggtatttttagaaatagagttttgtgcaaaacaaccttcaactttataaacgttttcaaatgattttttatttttatttttttggtaaaagtagacagtgctgtgcccaatgacgtaaatgttgaagttacaaaaatagatgattttgaagatatttttacacaaaacccttagaaatatacattatactttcttttctctaaacagacacctataagatatgaaataccatttatttgtgtttagtcttcttatgtatatggtaagctatatctttcatatagtctaatcagtgcatgtccatcaataataccatgcatgagccttcctccaactattcacaacaggagctgaatattaaactggcaaattgatgttctaccatatatacctattatatcacaaccagcatagtctatagtggttttactatagctaatgtaattagtactaattaaagctagttgttagaaaaacatgagcaaaaaatctaatttgcaaactatatttagtatataagtgattaagttacaataatcaattaatagaaatacttttttcaataatattccaaccacagaaaaaaccaatttctatcattttggcagataaacttggtttcgctagtttgttaaacgaactagcagtatagcttatttgtttttgtttatatatagaagaaactcaagccagttgggttacctatcttgtttatgaattttcgttaatgtttgcaatatttctgattttttgtgaaagactaaattgtagaattgtatccacattttattctttccgttcatgtcgtagatttttagtttatgtttcggtcaacaagtcgtggagttaaaatatactatacaataaactgaaagttcaaatggaatgggggtcaccaactttttaatttacttattcttgtggtcactttctttcaaaatttactaaataattttatatattctcataatgtctaaatataaacaataaatatgaatatgagaataaacataaatatgagaataattttttttttataaaagaattaataaactaacgataagtgattataaaaaatatatgtctttggaaaccaaacaaaatagtttaggcttcaatcccattaaattctcatctaaaattgatgcatgtagcatgtagatatgatcatgacaaaacgatgatttacaaatttttatttttcatttgttcgtcataaatatttgatcgtttatgataatattattattagacatgactgattgttattgcacaaataataaacattgtatatagaatttgcatcgcatttttatttgcgtatcaatggctgacactgagatttataggccac

SEQ ID NO: 28624 - DNA, 2292 bp, Arabidopsis thaliana landsberg
taagcacggcattaaatcagctgctttcatatacattccttgtacaactactcttgtgtctttgctgtgtccatcttcagatgagtggggtatcaacctgttattgaagatcaaaatggttatagtagctaaatcatagaaaacttctgaatttctaatgagaacacagttttttacctgtcctcctcagttggcacactcgaggacacgatggagtcaagagatgatgaattatcttttgtctcattgcctcttgtatcatcaggtgctagtaaagaaatgcctatgaatacacacatcattcctaatatgaacattgttgttcttagcgcatcgaaaacctgtttaaggaagaagaaaattatctaagcgactatccctaaacccacaccattctgtgacaaaatgatcaaactaatcatctagatccgtattaacccgaagataaagaaaagagaggaaaagcatcacaatgtagtcaatagatgaacctgaaactcttgaaagtaaatgcatcctgtacagatggagaagaaagtccaagcaatctgaaacattggaactatgagaattgcatcatatagagacaatccttcattcaatcttgtcatctgcaacagaagcacatgaaagacgtttttacttcagtaactatatagtctcaacggcacaacaaagcaccaaaatatttcagtagcttgaggtttttttttacccaaaatccggctgtactaagaaataaaagaagcatagagtatgtgaaccagctgtgcagttgatagctactagacatggccaatctcagcaagttcgagctacaaaacgaaactcaaatttatcacctgaaactatctgattttcaagtaaagcctgtagatttgccaactcacagtgacttggcaaataaaactgaacatgatcctatagcacccgagaccactgcatatgagaaaggaagcagcattttccaataagagctaatttcttgtccaggtgtagatatcaaaacttctcccttcctgaatatttcgattaaactaatcacaaaagaggtcccgatagttgaaaatagtcaaggaagaatttcaaatgcaagactcacctatagaggaaatggtgcacggctactattaaaatcaaaataccacagtagaccaagaatgttacattgctatatttctctgccaactgttcgggtgtgaaaactgagcacagaagatttttattaggccacgctttgtgaaaaaacgacagaacaatctgttcaagaatagttacctggtgactggtgattaccaaaagctacaaggaaaacgtttccaagaactataaaggctgtagcaacgagtactctgtgaccaaggcatactaaagatattagaagagcagagacttagtaaatcggtgatgcatgttaaagattgcagcgaggtagtttgcatacttgacagtaaccattttgttcaatacaacataagcaaatgctatgttggatacaaattgaatggatccaagagctgctagaagggactgcaaagagagttcgtaacggtaagaaaaccaaagagaaaccataatgaaacctgacaaatcacgcaagtaggcaatgtcgagcagatcattctacctgagcagcataaccaaacgaaatgaaattgaggcaattcccaagaagaaagacaaggatccctgtaagattccaacaacattggagactcagaaaaagcttcatataaacttcaacggggaaaaggtttaagaccaggacataccaactctccaagtctgattatgtataattggcttcaatggcatctttcctccgccatcttgtagggctaacctttctctctgataatacacaaagtaagacaatacgtttcacgtgacgagatcaaatgtaaccaaacagtagtggctgaggcaaatgcagacctcattatgtcccaatttgagaaggtttgtgccaaaattaatagcaacacttccaaaaatgttgatgaaagctccgatgacccactctcccattggtaattaaagaatgaagatagctcagttaaaggatcatctaaagctgcaaacttgaaccaatcaactagctcaggcctccctcatatgaatcttagccttcaagagaagaagcataaaacctaagaagggctattagatggtgattgcaaacacaagcttgtacctttgattgaaacagagatcaaatggacaaaattgaaacaagggttttcgatgattagcatagagaaagagaaaatgagacaaaacctgcgaagggac

SEQ ID NO: 28625 - DNA, 1035 bp, Arabidopsis thaliana landsberg
tagcctttgcttttaagttttaactaaagactaaagagtttcacttgcactaacgccaagttcgtggtattatataagaagtgtgcactaacggtcaaattttgagagcaaaagcagtgtggggtttcccttaattaattttgattacattaataaattaaggctttttttttttgggacaaaataataaattaaggcttaatcttgcattattgggtgatcttttgtatcaaaaaagccagtctctaatattgacgagtctttttgactgatgggtcgattttaaggaccaaagtattcaacaacggacattttgggcccatctaaaaatttgattgaccatttgtttgcactttgcagcaagagattggcaattggcagcgtagttgtttttttttttagtgaaaacatttcaatttaactgtggcaacttttctaattcggatgcaatataattcacagcaagatatgtatgccagaagatatgatctctgtgttattctattttcttataatttgctattctaaattctaattaggaagatataatcataactaggttactactaataccctgacaaaattcagcttggatatgtaagaatcagtctcttgagcataatagaatctttgtcataaaaccgagttcagagaaatatcttcacaacaataaaaccatagaaaaaattcgtgaagataatcaccaaaataacataagttttaacgaaaagaaaaaaagaaaaccatagtcttataacaccgctaataatttagtcgacttttgtgtgataaattagtcgacttcctccatcttgctaccttcggcatcagcatcgtcttcaaggggaggcatctcagcatcggcttcaacagcatcatcgtcatcaatgctcagtccaagcttcagcatcctgtggatcctgcttccgaaagtgtttggctcatcaaggctgaaaccagaagtgagaagagcggtctcaaagaggagaagcacaaggtccttcacagacttgtcgttcttgtctgcgtccgtca

SEQ ID NO: 28626 - DNA, 1517 bp, Arabidopsis thaliana landsberg
ctgatgtactgaccacctagcatttctcttaaacgctggaccaaacaccttgaaaaagtctggctttaagcaatccgatgggacctcgtcatcaaactcatcagtggagtcaaaaattcttctgctagatgggtccatcaatacctcatatgcttcttgaatcgctttgaagcgagattcaatctcatctttttttgcctccttggcttcttctgtttcctctaacagaaggagactagcgagtttatcaggatgatgcttcaacgcagcttcacgataacttttcctaatctgatcttccgtcgcaagatatcttacattgctcaaacccaacaacgcatagtggtcttgttgctgggtaccagacttcttctttcctttgttggcatacgagttgaatgaaggaacatattccttctctttatcatctcccactttcttatcaccaccttcatcgtctgtgggttcttctgcacaaccatgcagtttaagcgcagcagaatggaaggcatgaccagcaggttcacggtttaaagccttcacaggaagacaattggaaaaagcaaagaacggttttccatccacaagctcctcagagtacgtaattagcctaatagcagactcacttctccggctcggcatgatgaacagtttatacgagctgcaccttactccaagtgaatatccaccctgatttctgtcgcaatgattaagcattaaccaagtaaacgagagaacagcacaataaactccagatgttacacaaaggctaatggtttcacaaggcctggtttaaaaacacattgttttcgcaagacactgatcaaagctactaatacaactccgagtatgaaactccataaaaatgacgaaaaagaaaggaacatgatcgcaaaatacatctcataagaaccctagaaaccaatcataatcctaaggttagttattagttattactcagtaccatcaattgtctaatctagattttctactatcagcttatcctccccttatgcacaaacaaaagatgatcttattcaatcttaagatatttcacgaatcaatcagataacattcgaaaaccactcagctaccataagtaataaaacaacagtgattaaaccgattctcttaccagaaactgagctcctagtaaccccgatccgttggtcggaagctgctccggctattacttgccgcgcgagcttccctccaacctacggcggttgagaaagatgatgaagaagagaaggtttaatctggtttattgaggaaatagcggcggcaacgatttccagatggaggaaagtatctgagaagaagaaatggtctatcacagattaatacccgtttggttttacgtataactctattcccccaatttttcggattactttgggctacaggcccatactatttgggccttattctcataaaaattagaactatgcgttttaacccaaacaagtcatattcagcgcgggagaccatgatcgtcgttacaagctttgtacgga

SEQ ID NO: 28627 - DNA, 2166 bp, Arabidopsis thaliana landsberg
attgtgctctgtttgttttttgttattgggtgcaaagcgtattaaatcgtagtatcatataaaggaatgagagaagaaacagagagagattgtagagtcggacaatgaccacgtggcttaatggtttggacacgtgtttgataatctaaatcagaagagtaagaaaaatgtatgaaaacgggataagctttataatctctttacttatatgtggatgtgtgaagagtgaggagatgatgaagcaacatttcgtgctagtacatggttcgtgcctcggcgcgtggtgctggtacaaggtgaagccgctgctcgaggcttcgggccatcgtgtaaccgccttagacctagctgcttgtggtatagacacaaggtcgatcactgacatttccacatgcgaacaatattctgagccgttgattcagctaatgacttcattgccgaatgatgagaaggttgtgctcgtgggtcatagctatggaggtttgactttagccatagccatggataagtttcccgacaaaatctctgtctctgtcttcgtaacttctttcatgcccgacaccaaaaactcaccatcgttcgtcctggaaaaggtatacctcgtttttaagcgaccaaattttgttcaaaaattgatcaacataacaattccttttgatctatacgtccgattagtcagtccaatcgttccattaaatcgagattttattttgtagcctttaatatttgtggtgtatatgctattatcataggtcatgtgttagataatctaaattagtccgtctgtggtggtgtatacaacgagtttggttacatctaaattagtaaagtcaaagtagtgtcactttagtggtaattagagttttaccaccatatcatcctaagattcaactttgttcttagagattaaattgtagtgtttcggacatgtttcatattcatggttgtcactaggaagattactaccgtatggttatctacttgtatatttaactgtattgagcttggaaaataagtatgaatgtgtttttcttttcctaatgtaaaagtttgcaagcaccatgacaccagaagattggatgggctctgagctcgagccgtatgtggtcttcagcgctgagttcacgaagcaccgtatcctccaactttctcctattgaagtaatttatatataatcatcattataacaaaaaaaaaggaagtaatcatcattatgatgatgacatatatatagtactcatgaatatgttaatcttgatttaggatcttgagcttagattgcttctaaagaggcctggttcattatttcttaatgatttatcgaggatgaagaacttttctgaaaaagggtatggatctgttcctcgagcttacattgtgagcaaagatgaccacaccatctcagaagaatatcaacgatggatgatcgataactatccgccgaatttagtgatagagatggaagggacggatcatttgccattgttttgcaaacctcaactactaagtgaccatctattggcaatcgccgacaaattctcttaaataatattttgatgaaaatgtatttggagctgcaatcaatctcttctaaagaggcctggttcattgtctcttaatgatacatcaagtgtgtgttctaaaattgatatttctaaaggttcagaatttattacttactttggttgaaatgagaaatctaacagtcaatgtagtgtttgtttcgagaatgaccagaaactaacagtcaatatagaaagagtatgaggaaagtgaccatcgatatatatatatatatatatatatcaatgcatgaacacgatattgagagtatagaagaaagaaaacaatggagaagaacaacaagaagcggtttgtcctcgtccatgggctgtgccacggcgcttggtgttggtacaaggtgaaaacgcatctggaggctgtaggtcactgtgtgaccgcggtggatctagctgcatccggtataaatatgactagattggaagagattcagactttgaaggattactgcaaacctttgcttgagttactgaactcacttggctcggatgacgataaggtgattcttgttgcgcatagtatgggaggaatacctgtctgtctcgcttctgacatattccctagtaagattgctactattgtttt

SEQ ID NO: 28628 - DNA, 676 bp, Arabidopsis thaliana landsberg
tagaaaaactcttaagattactcacttttgtagcatttccaacatgccatcctcattaaaaatcgaactggttagtatgcttttcatcttgaatctactggttgaaacaactctgtaacaatctgctgaagatattattaacgatctattttactgagatgtttcaggtgccctgcagtaaggacaactatgcttatctgttgcacgatgaagacaccggaacagttggagtcgttgatccttctgaggctgcacctgttatagaagcattgagcaggaagaattggaatttaacttacattttgaatactcatcatcatgatgatcacattggggggaatgctgaattgaaagaaaggtatggcgcaaaggtaagaggatactattttctgtttaaaactgtatgaccttgtttcttgtgttgtttctgctctttgcgcaagttagccctctttttattttgtttccttggagtgtctcttgcctctgatagctgtgaaacattgagctctacaatacaatggtttggttttgagatgttgtaaagtattagtcttaccagaaaaaatggttttttggacctttttgttttgcacctttgtcgagttgttcttttcgtttttgcttaatttataaatactcaagtgtttttatgtgacttatgttgccgagaggt

SEQ ID NO: 28629 - DNA, 1032 bp, Arabidopsis thaliana landsberg
  unsure (1)..(1032): unsure at all n locations
accgaagaattctccttaaaggaagcatcgctctcttattaggcattataaacttcctgtgtcctacataagctctatttccctgagagaaaaacagagtttaagaaagaaactttggaaaatctcaaaagactattcttctgtgttacctgcatagcttttgccatgtttccaccatgggaaggaataaaaacatcgctgctaagtgatacaatgtagtcaatagctgctaaagctgaagatctattggtgtaaggcaagagctcgcctttatgagccaatgtctcctttgtcaccaaattagagaactctttagcgagaggctctaatgctcgtgagccaccaaatggttcacctcctgcaatatatatcgacgcattactaggtgctcccaaagccttcaacaacctttgatccaaaaaaaaaaagactcgagcattaagtttcctcaaaccatgtatacaaatggtcaaagctctgtttcatgtcaattttcttccttttaagttaccttgcaatctcatatacattgagaggacaaaaaccagcaagtctacgctctgtataggtcaagtttagtctaccagtgaggtatcgaggctgagacgttctggtttctgctatgatccgatcgaattctgagcctaatccagtgagacaaccggttcttacccaaacatctttctctagccttaaatggagagcaatatatggaccttctatccacattcttctcgtgagtttgttcccgagattctcaattggtgccgcgaatctcagtgcatggaaagcaacctacaaaccaacaaattaaaccttcctctagagactggaaaacaaagggttgattgaaaaatcttaccttgcatcgaagtttctgcagatccggcggtagattcttggctaactgtgagtccaatcctttcaacaccaaaagtcctttctcattcaactacaacgccggtaacattcaaaattcaagaatcgatcagagaaaacatanaccctaaactagtaaacaatagaatcaaa

SEQ ID NO: 28630 - DNA, 1202 bp, Arabidopsis thaliana landsberg
aatttactgctattaattctcctatttctttgacggtaactaacaatacaatctactctaggatgttccattaagtatagtccctcgtcgatctccacaggttggtttcttgtctctgcttattactgtagactggttcttcaccttagttagttacctgataaattatacataattccaggcgacccccctgagaaaatctgcaagtgtgggtaactggatacttgagcccaaaatggtcagtttgcgatcacaaagtgtccttcaagtcattcatttctgtatcttaatcttagtcttatttctatcttgcagccaacagctcagcctcagacgatcaaggagcatagtagccatcctacgtcttcctcacccatcatgcctcaacttcaacatctattccagcaaaactcaatacaacaggtgaggaacatccattaagacatgagacttatctcttattaattaattagcaggatcttaacttctgcaattgaatgatttcgctgcaggatcttattatgaatttactaaatagcttacaacccgtggaggcaacagaaggtagtatagacaattatacttcaatctgctgtgactttattattgattgaagactattcagtaacggtgccttcatctttcttataggttctcaatctgggaagttaccacctttgcctcgctcagacagtaatggaaacgtaagttgatttttcatatatgttctgaaaactttcataaagatattgctcacagctatgtaactattactatggataacaggttgaacctgtggcttcagagagggagaggttacttcttagcagtatctccgacctccgtgctaggttagtcctcttcttcaagcaaagcttttgtttctaaagaataatgtagttagtctttctaagtggatcttcctgcaagctttaactgccaaaatcttcaggctggacgacttaacggaggaactcgatatagagaaatcaaaatacagccaagtaagttaacacattttcaactcgttaaaacgcaataatctgcttgttgtgtttcgtgtcatcaagcaaatctttcgtttatgtttgtgtgtacagctgcaacagaaattgaaagcattcacgggtaacgaaaactaagtgtaaccagagggaaagcgacactggaaacactgaactgcacagaacctgtaggagaaa

SEQ ID NO: 28631 - DNA, 2373 bp, Arabidopsis thaliana landsberg
  unsure (1)..(2373): unsure at all n locations
actcgctgtaagtttctcctatatattatcaccatgaatacacaaacatcataaaaaatcaaatctcaacgaaaatcccctgtttttttggcggtaacttgtaagtcaagaaacatgtttttaccggatagttcgagcttggtagagtgaagatgcgatgtccaaagtaggaccatttggaacagggccagatacgccttttctcgagttactgtaatggagaatcgaagtcgttgtaaggactttccgcgtgaacctcgaggagatgacgatgtaatagtcttgaggagcttggttagccgtcacaagaacagagtaagactgtcctaaatgaatgtcaagtgaagtgtagatgttttgaacagtgtgagagccttctacttcaacgagcttcatcgtgtgtccttggattctgaagtttaatgaagtcgcgaccccaacgtttgatattctgaatctataggtcttaccgggttgaacggtgaaggtattgcctccccagccgcgaccattaatgagaactccatcaggattcggtagattccttccggcttctagtagacgtctcaaaaccttaaaataacaaaacaatgagattttgccaaaaccccaaaactttcggtccttttcttgcagtacaagtcagtggcattagggcaataaggagtgtacttacatagtgattggttttgtaccaatctccggcgagaannnnnnnnnnnnnnnnnnggggagagaacgggacagggatgcgaggacgactccagacacggatggctccaaatgcaccagcggctttgtggaaggcaagagaagggaaatagtagaagctaccaatttgatctttgacttgaattacataagtgaagtttttgcctggtggaatcggacatgttgtccctacgactccatcttgccatgagttcttcctctgttgcactccgttcctaagaagaaaaagtctttaaagattaggggtatgtttgatcgaattaagagtatggggttaattacggatattcaaatagatccgggacgtaaaagttaatttgaatgactgccttttgtttcccactgacacttaaagctcacatgtgtcatcgcatgtgactagtttggatggatcaagtggaatattttaattttctaatggcatatctatattatgatattatgtattgtatgtttgacagccaatcatgtcgggtgtaagaaaaagcttttatggctctcaatgagaaaaagaaattgacattctcaaatgaaataaaacaagaaaattatttttcatttttttgtaacaaatctattttacttgaaacactagaatgctagattttctgattttaagtcccaaatgacaaaataaaagttacttaatccctacagagtaaaaactatttttgttcgtttgagttgagaccttttcattgttataagtttactatactttttattagctaactacaaacaaaataaaattgttgttaattaatgaagtactttagttgctttaaatcttctattaaacaagcaaatattacgttttgaatagcattaaaatcaacgagaaaagttaacgatctcaatttttgttttattcatgaaaaagtattgttctttggaagagatgtatcatttctttctcttgtagactaatacataaatatgcaagtattgataatgtgtgagatgagatttactcaaagcacatttgtccgaaagctgcattcttttggacaacaaaaaacaaaaacaaaattcacaaaaattaaaagttaagatcttatcctaatcttcaatctttattgctttctatccaagaatattcaacttctcggcaacacattatacggcaaaaaaagtaaagatatgtgaaagaacttaccaagaaatgagaaaaggctctttcaagtaattgaaaacactgataatgatattatcatttgtgattgcgtcaatgtgaggtccaggaaactgcccatttatcaatattccctgcagtactcaaaacccaacccaagataatgttatcacgagatttctcgagagaacaaacagagaaaatgtgacaaacctagaaagaaagaagaagaaacagttgaaatacctgttgtttaacaccaaggggataaatgtcgccataagtaattttccaggtcaagaatctataagggttatctccaagcacaccattgattaaaaccagaagaagaactatagagactttgcaagaacctctcattttttaaactctcttctctggttttcttttctttggggtttggattattgatctcagtatgagactgaggagaggtgtagatccaaataagaggattttggaatggagaatctattaatgatgccctc

SEQ ID NO: 28632 - DNA, 1430 bp, Arabidopsis thaliana landsberg
tccattgctcttggagctgaaaaaaaaacacgagcattattggaaaaacagaaaagagccacttatagaaacgaacagaaaagaaaacttaccaagtccaattgcttcggatcctttcattatgcgcaaacgtttgcatgactcgacaaacatcctgaaatcgggatttgggttggtgactaaatttagaaatctattgaaagtgaaagaatatgtgccagctacaaatgaggtaacatattgatgagttagtatttatatataaacatctctctgagttctgtcccatgccaaccaaaagatggctgtgcgtgtttataacacatggatattgattatcattttgtgtatttttttgataagtaatatcaataataatgctttagagaatattgttttttttgtttagagaataattttggtcataataatgaaagcaagaagaatgaggaaactcacggccaggggacatcaccaacgagcatccagtcaccatctttgtcctcgtagcttggaacatactcagaactgttcaacagatccatcactttactctcgttcatgaaatctatcatcccttgtgctccataactcccttaattaatcaaaatcccaaaacttatcatattaattagtcgtatatggaaaaaactgtatcgttaaaaagaaaaaattgtaagtaaacacaaaaataataatgataattcgacttatatgtctgaaaatgcatacccatggtaaaggagctgaacattttggccaaggcatcagagagatccttgtagctggtgtacatcttgaggtcaaccttccgaagataaggagctccatccatggaaaccttcacaaaggcgacggttcctccaccactactcattgcctcctctgcttcgccgctcttctgattagccataacatttttccggtagttcctcaccggtggccaacccaccacttgtgctctacatagaatataacaacacacacacacattcaataacgttattacttatgcatccttacatctttcatatatatgtattttaagaacttttatatcaactattagtctttttatctcaaaaaaaaaaaaaaaagtcttccctttaaggaaggtcttcttcttaaggaattgtgtaaatagaacttacttagcaggaggcttagaagggtctttaaggaaggtcttctccttgggagctccattagtgttgagatccacatgtccttgtttgttagattgaagattaagtttgagatcaacggtctcggagaagcctctcttgttcccaacacccgacttggccggactttcaacggtttcagtgcctccggggaggccaagacaaagctccgtctcttaaggttcatatctcttcttgctgtctatatatgtcttaaatcagaatatgttttctctctctctcgat

SEQ ID NO: 28633 - DNA, 2340 bp, Arabidopsis thaliana landsberg
gataaccgtttaattggatcaaattgatgaaaacgattagaactttttatcctatcgtattgaaaatgaaactttgtacattaagaaccaatcatgtaaggatttataaaacattatcactttgatcaatgaaataatattcagatttgcataagattatcactttgattaatgagataacattagattttgacccgcggtataccgcggggctaggttattaataaaatttgttatataaaatgtatatgtagatatttgttttattaatattgtttgcttttttagtgtttatatctaggatttcacccgtagtatattgtttcgtattactatcgatccaaacccgtcataccatctaatcctgcacagtgaaattaaacgtatctaatggatttcacttgtagtataccgtctcgtaatactatcggccaaacccgtcctaccactaaccccgttcagtaaaattagacattattttgttatttttgttttaataatactttaatttaaaaaatatttaattcaaatcaatttaaaagttttctttcaaatagttatttaattgttgtaaagttcatatattataatattataaacccattctaccatctaatcatgttcggtaaaattaaacattattgttttttattttttttaataatacttttattcaaagatttataattcaaatcaaagttttctttcaaatgattatttagtttataaagatttcacatattataaatattctaaacgtttttccgttaaatattctaaacgtttaataaactttcaataactaaaatatttatcttttaataaaatataatattaacaatgtcctaagatttctcctttttgtaagtaattagaattgataaaaatatattagataagaaaatgctgataattagaaatattaattaaagtgcatgcaaaattaccctaaaattacgtacccaactttacttgcatggggtatctataaatatccgataaagtcccgactaaccaaagggttaaatggcgagctgattctggcctttctcatggtgcatcagctaatgtaaaccaactatattcataaacatctctctatatatgtatatatatgtcttccgaaatggaaccttatttcataagttttggcaatatgctatctcttatagactgaaccaaatttatgggtgtttttgatttcctaggtgaatttgattggaggatattatgatgctggtgacaacgtaaaatttgtttgactaatgtcatttaccacaaccttgttgagttgggctgcacttgaataccagaatgagattacttccgttaaccagcttggttatctccggtctactatcaaatggggaactaattttatcctccgtgctcatacatcgaccaacatgctatatacacaggtaaactaacttttcccctcggtttacgcgtctaaaccaagccgaactgtcacagtttggtttgttttgaggtatactagtatagagaattattccaaaatatttcatttcatgttaaatgtcccaaatagtatatatctcgtatcttatatactatatacttctacaatattcaacaaattcactatcgaaattcaattaattatttttggttctgttttggtaatggatgtaaataggtaggagatggaaattcagatcatagttgttgggagagaccagaagatatggacacacctagaactctctatagtatctcttcctcttcccccggttccgaagccgcaggtgaagccgcagccgctcttgccgcggcctcacttgttttcaaactggttgattctacatattcatccaaattactaaacaatgctaaatccgtgagtgtaaattcatattaattaattaagtctataaatatcattacattagttcaatcataaggtaacgtataaattatctattttgtggtagctatttgaatttgctgataagtacagaggttcttaccaagcttcttgccccttctactgctcacactcaggctaccaggtaatcaaactgatatacatagatatattttcacgttgacgtaaatgagttacttaacaagacattttatgttttaaaatattttgggataaaaataggatgaacttttgtgggctgcggcttggttatacaaagcaacaggggaaaagagttacttaaattatgttataagaaacaaagattggagcaaagccatcaatgaatttagttgggacaacaaattcgccggcgttcaagctttactcgcatcggttagtatatatagcattataactaaaccaatttcgctaaattccacattagtttt

SEQ ID NO: 28634 - DNA, 2161 bp, Arabidopsis thaliana landsberg
agctcagtgttctcttgatcagtaacaaccaacgaaaatatcttgattgtcgagggaaaaatttaatggtttccagcatgacatgtcattaaatattctcatcagaagccacacttcagctacagatcaactatgtagtacaaccaagtcaagtgataaagcagattactcctcacccaatacaaatttccccgtggtatttctgagacaggaacctatgattccgagacatgtaagcataattaatctattcattgcgtaaatttagcagtctttctggtctaagtctgttttcctcaaattatgtgcaggatttggagacaaatagcgatgattcagatactcaaaaatctcttcctagagaagagagtattcactatagtggattgccacttaggaaggtgggaagtagagaaactacttttatgcacacgcaggggtcagatgatttcttcaaaagcaagctgcttggtccacagttgatagttgaggatgtgacgaacgaagtaatttcagataatctcttatcagctactattgtccctcaagtaaatagggagtccgatgatgatcacaaatcctacacaagggagaaagagattacaaatgcggatcatgaatcagaaatggaggtacgaaatttatgttttcctttagattagaaattctggctgtcttggtgtgtgtcaggttggggtttatctctctggtatttttttcatattgcaggaaaagtacaagaaaagcagaaacaccgatgattcattcagcgaagctgcaatggttgaaatcgaagctggaatatatggcttacagataattaaaaacactgatcttgaagacttacacgagcttggatctggtacatttggaactgtttactatgggaagtggagaggaactgatgttgctatcaagaggataaagaatagttgtttctctggtggatcatccgagcaagcacggcaggtttaactcttctctcgagtctttgtacttttgaagggaatttcagaaccgcagttttcactgatgccttactgaaacagactaaagatttctggagagaagctcggatattggcgaatcttcaccatcctaacgtagtggccttttatggagttgtaccagatggacctggtggaacaatggcaacagtgactgagtatatggtgaacggatctttgaggcatgtcttgcagagaaaagacaggtacacaataatctgtcaaatctttgtatgaccttttgtgatatgacattctgagtttactgatggaaaaactttgggcacagattacttgataggcgcaaaaaactgatgataactcttgattctgcatttggcatggagtatctacatatgaaaaatattgttcattttgatcttaaatgcgataacttgcttgtaaacttgagggatccacaacgacccatttgcaaggtaacacttttccccaaaatcaggtaatttcaagccaagttgtatgagtaaagtgctgtatttattagtctcactgttgaatttgcaggttgaagatttcggattgtcgagaataaaacgaaacacgcttgtctctggtggagtaagaggaacccttccatggatggcaccagagctgctaaacggaagcagcaatcgggtctcagagaaagtatgttgttgagtccaaaatcaaaacattgaaaatgttaagagtctttgttttaatcttaacatgtttttgcaggtcgatgttttctcatttggtatcgtgatgtgggagatcttgacaggctaagaaccctatgcgaatctgcattgcggtgccatcattgtgaagtttctagcatgagcagttcttcagtctttgaacaagatgaacttggattgagctttggtttatgatctaatttttgatctgtttggttttgataaaaaggtggaattgtgaacaatacgttaagacctccggtgcctgaacggtgtgaagctgagtggaggaagttgatggagcaatgctggtcattcgatccaggagtacggccatcgtttacggagattgttgaacgacttcgatcaatgactgttgccttgcaacccaagcgaagaacctaaaagccctctcaaataacgtaagttgtgagatacatgagcctttttttgggttggtttttaaat

SEQ ID NO: 28635 - DNA, 400 bp, Arabidopsis thaliana landsberg
taaaatgagaggacgaagaaaagcaataaaactcaagatataaatcagatagagaaatgtgtcaggtttagggtattctcaggaaatagatgatagtagatcaacaaatagctaggatgtgatcaaatcgttcttaaactcaaaccttaattacagaataaccggtgatgtgccgtgctactcactatgcctaaggctaaagatctgcagcggtggctcgtatgaatccctatattaagacatgcatactaaacaagttcggaagtccacctaagtagatatatcgattcttagtacgtacatataaacatggctcatcaaatagtagctatggtaaaggatacatttttgggcatacctaattattaaagatcaagttctatgttagcttgctcatagt

SEQ ID NO: 28636 - DNA, 1468 bp, Arabidopsis thaliana landsberg
  unsure (1)..(1468): unsure at all n locations
aaatccgcgtgagagtttgatattttgggatgaagctaagctttatacatatgtctagctcgatgttaaggggaagaacaggatcatggtgagaaagtctgagaagaaaccatccaccaaagcccgaaacgcggatctattttttgcaaaagagatgaaagatttatactatgttgtggaggcagattctagggagccctcatatatctaacactcaccccttcgtagttaactggagctattataagatttggatttgtttctattgagttcgacacgtgttgcaggaccttctctccatactcccggaaatcactacaattttcactaattagtgaaatgcaataaaaaaactagtcgagaactgaagcaagtcatcaatcataccttccttcaaggtcagggtgattcttgtcgattttaagcctcagttctaaagccactttgggctcttccagaccttcaacaagatctgttaaaactttgctgccactcccttgaccagcagctcgggccgcagctannnnnnnnnnnnnnnnnnnnnnnnnnnnnnnnacttcgttttcttttttctgttcttcaaacaacgaaaatcatgtaaaaatgagaaaatatgctaaccatgagataggccccatcgtcgagccaatggttttcctttagagctccatgaccactggtttctatagccagatgtgattcttccccaaccgagttctgccatcacatcacaacttctatttcagataagaattatcaatggtccataaggcggagtaagcttttcctgccagaatgtatggtttctctatctaactcaactgcaacttaataatatacccttttctatactcaacacttttagatactgtatcaattctaacacaacttaagatagctaacaacaattggctccgaagcatgagttctcgaaagatacgatcatttattaccaagcgaatagcttcgtcaatgacattcttgtaacctcttttgaacctgtgatgctttccgcctaaaataagtctgggtcagtgaaaaagtcacagagaaaattaacaacatggtggtaaattgttggctaaccaagcttcttctcaataaatgaggtcagaccgtccgaagtgacactatccgtaactatagttgtgccagggtgctggatggacaaggaaaaaacatcagaatacaaaaactgttaatacacaatatatgtgatacccaatcacggtagtggtagaatggttagagcatatctcacttcctctagaacaatggctgatagcaaggcaataagacgattacggttgaattcacggccagatgaatccacagcagcagaccttcacaaaaatctttgtaagaggcaatctaataaattctcctaagtaacagagatagctgcagttactacctatcaacatcagtatcaaagatgatacccaaatcagccttattatcaagaaca

SEQ ID NO: 28637 - DNA, 1889 bp, Arabidopsis thaliana landsberg
agttttgttttttgtccagggctagcgtaaccaatggctacaccataatgtcagaccacttctacattaattttagacccaaatttgatttgactctggcccatacatggcccatttggatttatattgttttaggaccatatgttggatttgtaaagacctagttcacatcttttttcgtatccaaaacttcgtttaatttttgctataaaaattgacgagtctaatctttaatgccgaaccaaaggatataccagaatgccagaccacttccacatataaattttaggcccaaattcgatttgactccggacatggcccatttggatatatattgtttccaatatgctcgaattttaaagacctctttcacatatttttcctatccaaaactttgtttttgctatataaaaattgacgagtctaatcttttagggtctacattgtttttttttcaaaaacccccatctctatatttattgatttaaacatgttacattatctttctttctaacgatatgtgtgagtagttattgaatttggggttcaagaccaagtttttaaaatgaggaatgaaatattatgttaatttaaggatttataatttagtttcttcatctatgttgctgctagaacttgattaccttcatactttgtatattttacagattttaaggcactaaaaagtttgatagaataccaaaataaaatctggaagatttccctaacatttatttttgtagtagtttttagctattgaaaatatgatatacataaagatcgtttcataaagtttttcttacgttgaagtaatcaaaaactacacaacgaaaaaaaaaaaactacaaactatcaaactaagataaaaaataaaataaaaaatgtgcataaatctatcaaagtaagatcaaaagagaaagtaaagataaagtctgctgaagctgcgctatgtgaagctggtgttggtcccatctgatactgtggagcattattaacgggtgaatcaaccaatggggacggtgaaggagacgaagaagagctttgtgatcggaccggtccaggaaccggaacagcgacgtgacccaatgaggccggtaagacatggatttgaagcttttgtcccttcttgcagtgtccaggaactccgcatatgaagtgttggagtcccggtttggttagactgattgagtcagacccggtcttgtatctccttagcggtttagacgattcacacatctcgaaatcattgtgagtgacttccgtgacgtcgtggtaatctttgttgtatgcgaagaccagagtgtctccgacttgaaaaactcttgaagaagcccaagcctcataatcgcctccaatcatcgtccatcctttcgtgttgccgactttgtgaacggttcctccaacggcaactccaaaaagagtcacaaaaatcagcaaagaagtgaaaaagatgttgttcttaatcaaagccatgatcgtgtttttggttcttaactttggaacaggagaaagaagttttgagagagattaattatttatggaagtagtgagatcgtttgtgaaaaatttaaagaggggctacaagtgtttatatagagccgagggtttgtatgagataaaccctttccttttgggatttggagttttggataaatcctagtgtcttttttttttttttttttttgttataatcttagtgtctattaatgtttagtttaagtatttattttttgataaagtcggttgggtactattttttttccttttttcccatatttttgactacgtctaatatgaatttcctattttttcgcaacaaatatttttctttaaattttggtataatttgatggttatgtaacttatgttcaagttatgtcaagtacttc

SEQ ID NO: 28638 - DNA, 1502 bp, Arabidopsis thaliana landsberg
aataagtatgagacgtttatactcccagatttttaatttaagtttcttgcttaaaacatggacttgtgatgtacgggtacaaagacaacaatttacaaagatctgagatacctattagaaacaaattataaatgtataataatgtgtttctttactggtggtggccagtgtccgtgtgatgtacgggtacccccaccactatgaattttcaaaatcagcatttctaaatataatataatattgatatttggacttgactatacctatatcaacatacaattaatttacttgtttcccggtaaatagtatacttcgaaaataaaaccattccacaacgaaatgatgtgaaaactctcacttggacataaattatgatccctttgtaaaaaattaagaaagagtatcttgttagaactgcgacgtatcatagacgcgttttctatttggaatgatatataaaagttgtttttattcgtttgtctctccttacttatcactagcacatttttagataaagttgtaagtaatccacaaggcacaactttctttttccgtgaaatgtttttgtaagtagggccatttcataattacacaagatagagaagtacatgtcaacgaatttattatgttttatttttaacatataaaacaattagaattgtaaagtaaatagcaaccaagccgaatgttgcaaaaaagattgaggagtatatgacactattaaaacggaactgtataaacctaaccgagtgacaaaaattatgtacattacatattatgatatgaagtgaaagaatcaaacccaaaactgaattggacaacgttaccgtggttatttggatgtacagctacgtacgaaccatctctgcattaaataaattggaagaagagttatatatagactagttatgtagaaattatacgtgttataataatttaagaagttgatcgagatttcgaagaagatgtaataatggcgaagaattgtcggtgaccgcaagtggagactcggtcaacgaccatttaactgaacttgccttgcgcgcgatccgacattatcaccggagattctgcgtcttgtgacctttgtctctccgccgttcatattttcattttgaatcaaataaaacaagtacacgacacaccaaaaacaaaactactattacattgggttttcgttttgcaagaaagtcaccgaggttcacagtttctcagtgaatttagtcgagcggttttttttggctattgatgatggtacatggcgtgctgagttattagtatacctacaaaacattttcttttttgaacaaaacaagtttgaaataccattttttaaattgttttgtcttcatatcgttaattgggatgattgaaatcagttaccgtttggtatacctggcaaacattaagccgtacctagcaaacattatgtgtgtccttttcgggtcctaataatcactgcatgaattattattcttatactactctttacataaccaatt

SEQ ID NO: 28639 - DNA, 743 bp, Arabidopsis thaliana landsberg
tatacgtaattaaataaatacaatacttgtttttataaaagttccttcgtgagcaaagagaccccacgtgcaacgatataaaaagagagagagagatctataagtataaactgacggcgttcaagtcaacgttgcagtcaataaaaccgtcaaaagtaaaaagttaacggagatcgttatcacacggatctctctaagctaatccgggactcctcatcgacgaatccacaagcgaagttgcagactccggtgacattgtcaacgaatcttcatcgtcaaccatagacagaggcgattccaccgtagagtccgaagattccatcgaggatgtggatgagagcggaggcggcggcggtggagtggtcagcttccgtttgtttccttcggcggcgactttaacgtctctcgtcaagtaactcctcagacgtttcacgtcggcgagtttcaccggttttagtaaaaaatcctccgcaccttcttcaagacatctacaacagatttattgattaaatttccgatcaccaaaatcggaattaaaaaaaaagattccggcgagagatttgacctgtcgatacgagtcattacattctccgacgacataattacaacaggaacttccttaaaacttgtcgattcctgtttttttagaaaatcaagaattgacaaaaaaaaaaaagtaacagaatttgtttttatggcgggaaaattcagaaaccttaatctttttcaaaagctcgtagggt

SEQ ID NO: 28640 - DNA, 1396 bp, Arabidopsis thaliana landsberg
accaagatagccaccaattaaccaaatattaaggcaatccattcccacgagatactcttccctaccactttctttactctagaaaacaccatagaactctgaatagctctttggcatgtgacttaaagataacaaaaggggatatcattggctggccacaaaatcaatcaccactttgcgagaagggtaaaagaaaagggaaaaaaagcacaaaaggctaaaaacatatcaccagaatctatcaaagttctgagagcatatatcaagcattatcataaatatttcaagaattcttttcaacgagaatcattcagatcaaatgtaagttgtaagttataatatgtttttttttttacgaagctgactactagactagtatcagcttccgggggtttatcaaattgtctccatgtaaaatatgtcagactggttaaagcatcaagactgttttaggtttcgataaatttgatagaggaatatgctcttattgattctcattctccaaaacataagtttttcaaacagtattcacattgatcgactgcaaaacaatgaaatcaccaaccttaaagatgaatacttcagcaaaaggttaatcaactttacacatcaataaatttatgcaaaatccaaaacatcttccaagattcgctccaagtaccaatctattgtatattagattcagacattttagatgtgcttggtttaatttgtttaatcgacttgtaaacaaagaagtcgtgatacgagagagattcataggtaaagagaattagtaacatttgatcaaacaataaagttgcatagatagagttgtacaagcaataaacaagggcaagaaattgcaaaagtactcgcattcatttagcccaaagatccaaaagataggttctatataccgacatggggacatccaatagtttataagatactacggctactaagttgcttcatctttatcataccaagctgctccaatacttgcgaggtttttcatgtttgaagctgcaacatacaagaacacgatatatgaatgccaagttcgatacaccattaaaactaatatatctcacaagctcgccagtcgaatccacacgtaactaactttatcagatattggttcctgcaaagtcatctgaacgcaatacaatagatataacagcaaaagctcctatcaaatacttgaaacggtaattcatgctccatcacaaaaaccaaggatatttgagtcagaagcatacctttataacacttgtcacgcgggataattaaactgttacagctagagctcgttcaatgatgaaagaatctgtcaaagtaagcacatgattagaccacatgaacttcccactaatatatcctccttcttctgccctctctattgcaatctctgtac

SEQ ID NO: 28641 - DNA, 2336 bp, Arabidopsis thaliana landsberg
gtctccaaccgttgctattatccaaagctcgcctttagcagtcatgattgttgtatgttagtgaagtgaccgcgtcagtccactctggcacatccgatctagccagtcctaagttgatctcccagggaacatgtctgttctgaaagtacaaaacattcctccttttccaaagtatccataatggtaaatgatggaactgttgtgtttgagttgtggttgccacttgaaaaatcgctcgtagtttatcatctagagaggaagtagtgtcagtgatgatgtagttgtggacaccggaagcgcgctaaattgacttagcatagtcacaataaaaaaaagaaatgcttcatagtttcttcctcttgacagcaacggtgacaagttgtacgggggcgaatgtgccgatatgtcaacgccgctcctgttgctaagaccccagagcataatctctaaataaaatgtttaatcttcggagctgtgtgcaggcgccatatttccttctttaagttgatatcccctggagtaggtatcacatcagcatgataatttaaatgagtacttagccaataccctcatttgattgtgtaacatccctcttttgtgtagtgctatcccaatgtatcaccatttgcattggctgttagcttaagtttcagaattttagtgatgtcttcaggatgaacattttctcggagttttgcttcattccagtctgttctcgcatcattgattagctcgctgaccaaaaaatcttggatgcgtgcattccttttcctaggggctgatggagggtgttgagggagccatggatctaaccaagcactcgccatggttccatcgccaatgacaaagcgaaccccttgttttattagattccttccgtgtaaaatggacttccagacaaacaaagcttgtgtgctctatgtagcatttagaatattagcgtcaggaaaataccggccttttaaaactctagccattagacaatttggcttttggatgatcctccaactttgtttcccaaggagagcagagttgaagtgttctaggtctctgaaaccaaaccaccttcattcttcgagtagcttaatctattccacgcaaaccaatgcatccctttattgtcttcattcttgctcctccaaaattgagactagtgtttatttctttaaagatttccttcgggatcttgcagatattcatcgagtatataggtattgctagcgctactgatttgaggagaatttctttacccccttgtgataaaaacttcttattccaactttgtgttttttctttgaccttctcaacaatgtacttaaacatctctgtcttctttttatcaaactgttccggcaggcccaaatatttacctccaccaccatcattatgaatcccaaggatatgccgcattttcctctttacgttgtgtcgtactttgcttccaaaggtgattgctgatttccgaagatttactgcttgactagagacatctgcatatctgttcaagatgcttatttgcaagcatgaagaaaagtgagtcgtcagcaaatagcagatgactaattgctgggctcctgttgcttattttgacaccttggatctgtcgttgctctatagcttgagtcatgagatgtgttaaaacttcagcacatataataaacaaatacagggataagggatctccctggcgaattcctcgttgtggttgaatgtagccatgggttgttccattaattaagactgagaaactcactatagtgacaaaaatcataatccatcaaatccatgtctctacaaaccccatttatcgcatagattcctccaagaaattccattcaagcctgtcgtatgcttttgttatatctgtcttcaaagccatataagagttcgcttgccgttttctaacttttagagaatggaacacttcatgagccataataacattatcggttatcattcttccgggaatgaatgctgcttggttttccgagatgatcccagagagatgaggcttcagtctgttaactaaaatctttgagatgattttgtaagctaacattacaaagagttatctgtctaaaatccgccattgttgacgggacaaagatcttcaggatcaaacataagttcgtgtgattatgtgtctgttccaagtagttgtattcaaagaacttttttacctccatgataattgcaagatttatgtcttcccaaaactgatggtaaaaattgcatgtgaagccatctaggccgggggctctgtgaggtccaatagaaaaaacagcttttttttatttcatcaatggtgactggtcttgttaaatcattgttcatat

SEQ ID NO: 28642 - DNA, 2940 bp, Arabidopsis thaliana landsberg
tatcgaggctctggacgatgaattttccgctgaagagtcagagagcagggagaaagcaataggcgaccaaaagattgaaagtgaagggtagtccccgacattgaggtaggcgactcgctggagaaacttgagccttctggtggcgaacatggcattgttcttggagaaaaagatttctacagagcctgtggcccaacggagaacttgatggagacgatcagtgagattgattggagctgtgccacggaaagcatcacgttttgtgatgcagtaaacggaccgccaaccacggttatgcatacgataacctgtcaccacgtcttccgtgaccgacccgtaaatccatccgattctatctccccattcagtattgtcttcatacctgaaaggccaaataaactcaacatttttaactacatatccatttatactaacagagcatatctcttttttcaaaacgttaccagcaagaaatgacagcgatggcttcagccactgttggagcatcaaggggaggtcgtggcaggagcaaagcaccaggtggtcttccgtttttaaccgacatgtgatctgctagaggccgtccttggtactctgcaactggaatagtgtctgtgaacatggtcgaattaccaaactttttgggcagaccaagatctggatcatcattaagaggctgtgtatcagactctaaatcagacgcttgggacgtttgggatgcttgggactgagtccggacatgcatagctggagccttttcctgaccaaacacgcctgagtactcattggctcgaggtgggttgaatccatagagagcataccttcggaacatacaccctgttccaacatagacaggaccttgtaacccatctaatgctctcatgttacctgtttcagaaccggaataatgtttaagttatggtggcttgtaacataagcattacaattttgctgtgcaattcaatgtaacaactcaccgtcgaagaagacggtattgtgatttgcatatcgatctgatgggtcgattccttcgaaccgttgtggaaactgaatataacagatcctgtcaccgcctcggtccatcatgaaacacattccttctttgatagctttggagttgtagatgtagtgatcacagtccagattgaggataaacgcgccattggataatatggctgaagctctaaccataccattcatagcgccggctttcttgttgtggtcaaaacctggacgtttctcacgcgagacataagcaaacataggtacacgaatatcaatccctgtgaaatctagcgcgccttcattcggtccgcccatcaccggttcaagatcaggcactttgctcatgatctacaaaacattatgtcaagttttcatggttttatttgaaatcaatgaagttgatggttcatacctgtagaattccggcgtgatctccttttgaatgatcaggtttaggttcaaaccatgtccctggccaatgcgtaccatcagccatccacgttgcttttaccacctcaaccccatctggcggcaatacacccccatttttctctcgggcaattcgcttctccttgagctcttctctcatgttgaactgttcagctcttttcttgatttgttctggaagaccattgatcctgaccttgaattcgtcatactcacgcttgatccaacgacgatctttgacgaaatcttgccttttcttgttttttgttgggtcctttttaatgctaaagtaactatccgggttccgtggctctatatcatgttttctgcaaaatggcacccaatactgcatacaaaattcaaaaccatttacatttttgccaccatctaatagactagttaagatacagagggagagaaagcggaaatgaaacctcagcaaaacgaacagcttcagccatagcttcaaaggtgagaattgcaccaccatcgtctgacaagtagcaagcaagtttctccacagggtaatcaacagcaaggatcgagagaatggtgttggctgtgaccagaggtggttctttctcagggtctgcagttgagacaaacacatcgatacccggaagatcagatcttcctttggggttcctgaggtttggagactcaaagcgttctttaagaacacctaaatcagttaatctgttaaccggacagagttttggaagctgatccaaaagccaagacaaggcaaaccaaagctcacaggtcgttgacattccccacaaccacattgcttctcggtttgggtggcgaaccctccatgtcaggaacaaaccaagagccaccagacgcagtgcaatgagtaatctgtttcgtcacacacaagaaaaaacaaaacacattagcacattcacgacatagtaaatctattccatgatcctaattcagtaagcctctaagaaaaacatactaaatcaagaaacagctaaagcaaaagttctttacctgtaaggactgataattgcagcagagacactgactttcctagtaagaggcctcttgcttctctccccaaactcaggtggcgtttcatacccgtttccaccaccacccgacccgattccatacccatctttaggccaaacagcgttcccatacccataagtacctttagtctcaaacaaccaccgagtatgatcaaaatctccagcttgattctgcgctttaaacgacttcacaaccgaaagcctcttgtcaagctttgattcacccatctgaggaagtggtttcgcctcatcttcttcgtcttcttcctcagtctctggatcatcgttgatatccctataaggctctttgcaaccaggacaattgcctccaccacttgtgatacaatcaaagtaacaatctctacagattcggaaaccacactcacatctcccgtgaacaactttctcatcacaaccttttaaccagcagatctgacctgacttt

SEQ ID NO: 28643 - DNA, 1165 bp, Arabidopsis thaliana landsberg
cacacggctccaattccctggagaatgattcctttccccaaaatcactcgatcaagtatccattgcccccgcctgaatcaagaagaacacaagaatctaatgaatatgattttacatgacggacatagtcaagaggtaaggttacctctcaattgggttaccctagctggaaactttttccagaacctcatttcatgttttagaagttgaccactgccttcgttttaagcttgatgatggtgggtcaaaatggtttgaaattttctgctttctttgatccctctacgccattgccatgagacggcaaattctggatcttctcacccagtaatccgccgcaaatctgcctgccccgtcacctgatgattctgcttgatttgctgttttcgtttcatctattttgtttatttcatatgaaacctccgagttcattcccgagtcaactcattaacccaaatcatactgaaaataattctagcccggttttgttttggtactctctttgagattttggttttatattaggaccgatttgggttttgaattccggttcaatttggtgtacgaattataaccaaaataaatcagcggtaagtaaattcaaaacaaccggctgatctgattctgcataaaaaaaaatacaggtttttatgaatcatgattacttgcgagagagtcgtcttctcatctgcaattctcgtcttcttcatgttcactggagttgggtaacttgatcgggtctctcctcaatccaaatcttaattcatcctccagagtggttatccatcagagaccacttgtttgtcttctgccgtttcaagaaccctaagacaaacaattggacgagttcggcttcgaatcccatcggcaaattcccagaagagtagcttttatgtggtgcgcgcttaatctctgaatatgtctcagcagacaaaatcaacatggagcatcaataatctatctcaaagaaaaaatcactactttggtaagcctttttgagttttcgtttcaaaatacgtttttttcctttgggcaaaatttcacaacgtatatacgttaattaaaatctctaattgcataagttacacactttatagtgagatgcttcattagcttaggttgaaatagaaaatctcagataaaccgcaatgttcatcagtgataa

SEQ ID NO: 28644 - DNA, 2151 bp, Arabidopsis thaliana landsberg
  unsure (1)..(2151): unsure at all n locations
cacaggatgtggatgttaccgaaactattaacaagacaaacggcccagatgccaaagtaaccgcagtacactccttatttgcactttgcaacccaagttttaagctgttttaatcgatctgacatatttgaaacaaacagatgtatctacctgtggaggtatccactccataggttcagacttcacacgcacgaaaggaagatctggtgggatgcagcagaacggctctgttctaagtgaacagactatctctaaagctgggaacactcccattagcaacaaggcacaggtagtatgaaatcaccactgagagtgatagacatatcttactgtgtatatgactcttttaagtgtttgctaatttggttattgttgctcactcagcctgcggcttcgagggagagctttgcggtacatggtggagctgttaaggaagccgagacagtcaactgtagccaagcctcacaggacagacgtggcaggaaaaccagcatggtatcttacactaaaccatataaactctctctacgtttttcaactttttagttatttgctgaaagaaactgacatggttcttgtgattgttattcctacaggtgagggagcctattctgcagtactccaagcgtcagaaatctcaagctaattgaagataccacctctatcagacaccataaccaccttcctcagtggtgatgatattaacctgatacactcgctttttattgctttatttctcctctgcattcagactattttcatactccatgcttgttattatctctcttaaagtatcatatcttatcgcacttttgggaagataatttattgcatatcaaactttaacacttattagttattactgtgagtattattcactaatgctctacattcttttatggaacaagtatgaagtataggactatcttcgttttaaattcccctgtcgatcactttaatccaaaaactttaacgcttatacgttcactactcaatggaaagtatacacgtgttcgtacaagaatcccctagaatattttcgtcattccgagcccacagcttaaaagtccagaaacatccacacacgacacgcctttctagaaacgattctttttttaataccccacacaccctcagatctattatcaaccgttggattacgtggacaagtacaatgccactcgtatttttaaccattcctcacactcctcaacgtgatgtgaagatactttgctgtttcataacgtcataaagaacagagacaggcgaaatttctcaagaaagcaaatcagaagaactcacaaaaaaaactaaggtaagagattattatcatcacttttgttcttccttcactcaaaactacgatcaaaatcgtgatttcatcgtctttggtgtagatggagacagacaagaaaaatagcaaggaggtagcgctaaaacacctagcgtgcgtgagaattgcaacgatccatattctggcttccgtctcaaatctctacgaatacgctaaacaaaactccggtcctctcaaatccgccgcggaaaaggtcgaaggagccgtcaccaccgtcgacacccctgtatatcagaaattcaaagatgttcctgattctctcctcgtctttctagatcagaaggtataacccaaatttgaatttctcatagatttattctttgttggatctgatgacctaatttagaaaccagatcgtgtttaagtttaagatttcctttctttatttactaggtgggtgaagtttcgtacaagtttgatgagcatgctcctccaatggctaagaaagtggtgaatcgagcacatgtattgatctacaaggcaacagagaaagctcaaagctttgtgaaagaggctcnnnnnnnnnnnnnnnnnnnnnnnnnnnnnnnnnnnnnnnnnnngtacaagcttttcgttgtgaccaactcggttaaagtctgggctaaacttaaccagtataaaccaatccatgcaatgggtgacaaagctttgcctgtggctgcacacttttccagtcggtacaacgatttggtgactgatatgactaatatgggttactctttggttggttatcttccgttggttcctgttgatgacattgttaaggcttataaaaggaaaatgcaaggagaagcttt

SEQ ID NO: 28645 - DNA, 1391 bp, Arabidopsis thaliana landsberg
acacatgcaccacgtcacaattttcatttcttttcaatctttctctgttgtttattagcagtgttaatacataccttactcctagtgagaggtctaaaaagtcttgatctgtctccaacaacttggcacacacaatttccatcaagtcattttagggaacggaagtcttccttaccattgaacctgtcatcatcatcaacatcgttcagtttccatggtaaatactaaaaagtctttgacttgttccactttatattctttgcacgtaccttttggtgcgttcacatttgtctgaagctgacaaagaaagtggaaagcgaaggaaggcacagttactgtcatgtctttcttctttctttaggatttttttccttcattagtcgatttttaacccctttagagattttcttcattagtctatttttatccccttttctactttacctgactttttcaagtaaagttcctacagaaaagaaaaaaaaaatcataacaacaaagtagaaagaaatctttaaactaaagtttaacccacctaattcaaaagagatttccctttgaaaataaagattcatatacacaaaagaaagacttagacaaaaaccattcacctatttctcatatatcttttacctcttcttcttcattctctggttaatctctaaagaaaaaaaaaagaaaaaaagagaagagtaccatgataaatcttcctctgtctctgacaatcatatggatgctctttatgatcccctctagtttttttgtcagttgataagcgtcacgaggacatatctgtactatcccttttggtcgcctgaaaagtgaagagtgagagctaagtatatatccttcgtcaagttccatatccttgagctgaactatttcgatgatttcataagactcgccagaatagattatcagaacaatctttgtcccatataccctgagactgcaacaatcaaccaacaaatctttccatttcttcaagacatcgagctgggtatgtgtgcaaagttactttgtctatgattgacatggatatatggatatataactcttgaccttctcaatgttctccataaaaacacctttgacttcggtcacttgaggcttgagccttaaccttggcaagttgctgatctcctcggggtgatctacacagtagttaagacctgagaaacaactaaattagttaaaaaccatatccacagacagttaaaacacgatgttattttctttggtatttcgtattctgacggtagagccaaaaaagtacccaaattctttgttcaaactgtagagttaagtaggtgtagccattcctttccattccatcaccatatctcttattgaaatctttttaaactcactccaagaaagccattggaatc

SEQ ID NO: 28646 - DNA, 1819 bp, Arabidopsis thaliana landsberg
agtgagcaaggttctgctgcatgcaccatcagcgagtaagctatgcactgtagctaagccccactactctttcgaacgtacactcttcttctttggaatctgtttcgattgaagtttgtttgtttgtgataaatttgattttttttgttgttttgtgtgtatacagtgaggttgagatgtactggtgttgatcctgatgatcatcgtgtaaaatctgaaattgtatgtgtctttggatgttttagttctcttattatcttgttaacttaatcaaaatggtatcttttgttgtttgattgatggtagtattggttttgtaggagcggataaacgtgtacagagagaagtttcagaagtgtgttgatcaaagtaaaggtaaagattgattttctggtgcctggattgatttgtagagagatcaaaaacttgtttggttctgtgtgtcttttggtttaaaccatttgtttcagtttgaattggccattgtattgtctcgtggattaagcaagtttttttggctttctcttttcattggagaattgctgctttcaattacctttgttgggggataatatttcaaccatgttcaaggattatgctctcagcttagaatttatttagcctttcgtaattttagaggctaataggtgctaacgatttcttaagcgttaaatgatatcctctgtgtaccttattgttgattagtacattttgaggacatgcgtttctgatcctttgtttgttgggattatgtatctgccttatatagttttccttgttttgttcgatgcttagtgttgatactatttttcgtagatatgatgattttctttaaaagactctttattgcttgtacccatcttaaatgcagggaagtagtgtttccattagaaggctttctcttttcattggagaattgctgcatccatttaccttataaagttgttggggataatatttcaaccgtgttcaaggattttgctctcagcttagaatttatttagccagtcttaatattaggcagataggtgctaacctcttcgttgattagtacattttccgaggacttgcttttctgatcctctgtttgttgggatgatgtatctgctttagattgttttctttgttttgttctatgctcagtgttgattttatttatttttggtagatatgatgattttcgttgaaagactctttattgcatgtacccatcttaaatgcagggaagtagtatttccattggaaggctttctaataatgaatcgcgcctaatccattgttctggacttatcttttagtcaccttactattgcatctacctatcatcttatattgaaaggagatttcctcgtagtctattgaatgaaattagggagactgattcgtgatctagtttctctgtatttgtttttccgttgaatagctttaaaatcaaagtggatagtttcaactttgttttgtcaagatttacttccatttagacaacttatttgatttgaatttatttgtggctcattgttgatgttaatgtttcgctatgtttttcgaagttttttcttattgtggaagatccatttgttcttgtctactatctcaaattttggaggctagtgtcttatctttgtttatcaacgagcttttatattccgtttagaaagtgcttactcaattggtaacgcttgtgctctgcgtttttgtgaaatgactcgtgggcctttcgggcaagaatcgttttgtcgatatgctaccgggtactaatgggccgactagttcgacttagtttctcgaaagtatttcttttcatgcacatcgtttcata

SEQ ID NO: 28647 - DNA, 1379 bp, Arabidopsis thaliana landsberg
tgatgttgacctcttggtagatacagtactacatttatatctttttgatgcaacacataactgtttagtgtttttgatatttccttttttaatcaatctaactctcgtgagtcgtgagttgtgagtcgtgatccattgggattattactacgtagtacatgttaaactacatatataaggattccataaatattaatcaaatcgaattcttcttatataactaagacattaaatgtctacttgcacttcattaaaaagaatcttctgatttttttttggtatatgcaaaattataactgcatttaaaacagagattagatcatgaaacgaatattatttctgaaaaagtaggtatatctagtaatgttaatttattttttgctaaggatatctagtaatattttatatgaaacacttgtttttatttatgtgtgtttgcgcataaagtcaatattataacgaatcactagattagttttatttttatctttatagattagtttaataagcctatatctataagatttactatgttcagagaaacattaggtgtaatgagaaaacaataaggaaacggtcatatattagtaaatccaagtcagtgagagacctgcaaaaatttcgaactttttgtgaatgtcttatagcaaagatactatcctccaatctgatcatgtttccatagatattagttaattggctaataatacaattcttcacacacatcacatgatcgatatgcgtaatctcacgtcacaatttccgtcataatcaaaaggagtaacagaattagtatattatatagtttctgtgatctagcaaagatttaaatgtaaacaaaactatccagatttatatggttttgttacgtttctttgaagatcaatgtaaacaatgatgaaccaatattagggtccacgttgaatataaacgtgaaaaacgacaaagcgacgtcagcataatttacgaataggaaaacagtgttaacttttgttatcacattccgtgcaatttacataggatatagaattttttatttacaaaagttatatttataaagaattactcaaatcaagaattccataaaaagataaacactttcatatatcgttcacaatcacatggccttttcaaaaaatcaatcttttagttctctatcgatgcgtaggcttgaagcatgatgacgacagtcgccgccgatctccaccgttatcttttcctgattaccgtttttcttttcttcctctgcgacaaaacctctcttgctctgaccacagacggtgttcttcttctctctttccgttactcaatcgttgacgatcctctttacgtttttcggagctggagattcgacgacgagactccttgctcttggcgtg

SEQ ID NO: 28648 - DNA, 1301 bp, Arabidopsis thaliana landsberg
aagtaacagtaagtccttgtaactcttatgtctttcacaccactcaatgcaaggttactgaaatgattctaagatgtgtactgaaataaactaataagaaaatgcacaaagaaaatgcacaaaggggcatgaaagtagtattacttgttgtcttccaaacaagctagtgcatctatttggttgaagaagtccttggcatcaccaggaattccaacacccagaaagaatttggccagaccaactatcttatcacctggaagctgcatgagataatgggaatgcgaaggtcaactatcaacacatttgtcagaataggatacatgaaaatatgggtattacatacgttcaatcctgtggattctgaagctgcaaatgacgtgagccctctaataactgatgcagttgttgagatcgggccttgacttgcatcaacagacttctcatcaaaataaaatgtcccatcatctaaaagaccaaaaataataattcaaagcccacatatgcaaaacccaagctggcaaaaactatgaagtgagtgaagagaatataacatgcaatacataggatagcaagtaatttactgcataccatatttttggatactgtcagaaagcttcaggatacccgtcttcaccgactggatctaacagaggacaaacatgaatgacgatcattacataaccaagattaataaactaccagataaaatgaaaaagaaaccaccagaataaccaaatgagaagtcaggtggacatgcataattatcaaaacacgaatctttctttgtgattatcaaatcacaattccctgtagctaagatttggaatttataattatcaaaacaaaactctttattttagttacttagagattccagaagcaaaagtagatcatcactaaaccaagatatcgtagtgatatctcatcaaaatatattctcaggaaatcagaagtatagtggattaaacatctcacttaccaaagatggatcaaactctgaaggtgctaatgaaatcactccagcaagcgtttcataggctaagcctgagaaaaaaaatcgcatgttgagaagaatgagtgaaataacaaagagcaaaagaagtgaacaagctgaagcaagaaaggaagggatacataatctaaaaggctcatcattaacgttaggtaagggttaatccaatatgtactactaaccagcagcaaaagtgcttgattcgggattgttggagctgtagcgccatcttccatcactctggctaagagactgatacaaatgcactatatcagccaaataatacccg

SEQ ID NO: 28649 - DNA, 1920 bp, Arabidopsis thaliana landsberg
tataaaaaaggtgcgtgtgtaggtggtgatgaaaagaagagttttggaataatataaaataaaaatacgacaaaagtgaagaaataaatgtgtggggaggggagaagagggagatcaaggagaagaaattgggggtaggtagagggaatggctgtaaaaagaggaacggagggtcgttttggtttggtaggtttcatattttcctttatactctagcatgtctttttttattttgtatttatttaatttcttaaaactgaaattctgttacatatattgcgtatataaatatcaagctaccaaatttcttttacgaaataaattaatattatacaaaatcgacacatcactaagtcgcatgttatgattttaatattttgttttatacgaacaaaaatataaaaataactactatatcaaatagttttataggtaatactaaggaatagctaaatgaaacacaaagattaagcaaatatagagagaaagatttttcttaaaatagtcatagacagaagaaatgaaataacataaccatcattcgttttttgcgaaatcaatagtatgagagatagtttcataaaaaatttcaaaatagtatgtaacatttaaattcacatgttctacttaattaaaagacatgatatttgaaaaacttaatgaatttgtaaagataaacattggtagtgtttttatttttttaaacatagttataaatttgtttaacccgaatagaatttttcaaaaattgaaacggtccaaactcgtttcggttcggctctaataccacttgtaacgtttcatccgccaccaaacttgaagatatccgaataattatgatcgtttaatttcttttgttatgaaaaatggattcctttgttccttgaaataattcattgttgttaactttgaaagattttgtcaagttgtgaaagtgcaagttccttgagataatctattggtgtaactttgaaaaagtttgttaagttttgaaagtggaagcttcctctctgtatatacctacgtttgcttcattgtaaaaatataggacaaaggaaaaagtaataacacaagtcttgagtgctcctttactcttctctctcgttcctatacatctatacatatgtatccaaactcccttttttttgaaaatctaaacaccaagcctctgtttttgtgttcaattagtttcgcaagtaccaacgaagtgttgtagccacagctgtgcaagaaagggaagaacacaatcgtattcgcacaactcctacgagggttctccagggactcgtgccgtttgttatcctcgaaagccatgaagtttgtggaaaagtagaattactatatttttctgtacaatatcaataactatactttagacaacttcttgtacatttgaacgttgattcacgatcgaaactagttagtggaccacactttgaagaagatttacaaagaatgtgtttgagagatatatcatttaatgtaagcaactgtacatccatggttcataggatttgcctgttcataccttgagacacgagtgttctttcttaacctctcaagcactagctcctttataatgcctgcccccattccatgaataataaataggatcgagcccgagtctcttcccgagatggccatgtctagctggtgaaccgcttcttccgcccgcattcctcttagatccaatgtgttctttgacgtttgaatccgcactggttcgctttgcatctgcaacacactgcctagctctttcatgtttatctgtgcaagtatcaggcaccacatagaactgatgttataactcaaatcaacatattactatcaaaatcacaaattttcaaatagcctataaactataaactttcaactttattactatttattatgacataccaatatggttaggtttcataa

SEQ ID NO: 28650 - DNA, 2193 bp, Arabidopsis thaliana landsberg
gatttacaagctataaagggaatgctatcgtaagtatattctcaattggcaaaagagtaagatggatacctggctgagcttaagatacaacaacaggtaatgtaataggagtcgattgtgaactctgctgcttcaaataccttttgctagctgatccattccctgtttattagattttgttgaatcattcagtgaggagaacaaattggtatttgataatttggtgtttctatctgtagctgcagaaggagcttgacgactatcagaacaaaatgtcactcatggaggccattacagacaaaacgaattcagtgcaagttctcactagatatcctttaattctgttagctggtgaagcataatttataaaatgataattacggtcgcagtaatcatttatcacatttacgccagtgcttgtacctttcatttcgatttgccattctttcaaaagaatagtttccttgacaaaaaacaagcagacttctgagttggaacagacattggcttcacttggggaggagctgcaaaggagatgccgatgccaacattgtgaggcggaaaatttggaagtcctgagcttacttcttcagggagatcaagtatgttaacccttacaaactatttttttctcatttctaaataacttttttgaactaccaccaagatactggaaccaaaagcttttacattcgtatgttatgggcttatctggaaagtggaatgttgacaacggtctggtgtatccatgttcagatattttccgtttctctagttttttttactaaaacctatttgaaatctgttagtgtaaaccttattacagaaaccaataaaacttttaaccagaattttaaagttaagatagaaggcatctatcacatgtagacgaaccaagtttctcttagacagattgaagcaggcagtctctagttaaggctcataaatagacttttgtggtctattgatcatctagttttcactgatactgctttgtaaaacgtatagtcaagaaaagactccgtatatatgttctgcttcattttagctggaattatcatccttaaagaatgtagacttgtgtttgggtagctatgattttaagaagcatactatctgtaatatgagttacctttctaattttgggcacttcgattttaccttattatatactagtccataagccatggtgcatgctaagatcacagtgcgcacacaatctccgtgctaaaactcaaaataatggacaatctatatcatcttctccagaatctgtacaaatttctattcaacacattccgatttcttcttcttcgcgaaatctccagaaaacgaagagaatgtatgaagtatcttacctccacgagatctttcagaggtgaaatcgcggatcagagagagaagctgcttctgcgtatcgattcccgccatggtttcttcgtgtgttcacttcaagctctctctactgaaaaaaatatctcggttcctttctaaaactgttcgcgtctatgtgagagggtttaggcccatatcgataagggcccaaactattaaactcaaatatattgaggaaattaattagacatttttaagaacttgtaaattcgattttttttttaaagtttatttccccaaacgaatacttagtgttaccccattatatgatatatctggtagaataaaaatataaaattttgttgattttgttataactgaagagcaaataagtttataaatccaaatcctcggttccttattaatcaaaatttttagaaagaacaaaattgttacaaaaagatataaatttcagatttttttcttcatttttattagttattaatgatgaattgtacatttcaataaaaataaaaatttgaatattctcagattcctcagttattaaaacttttgttgaaaattgttttgtttttgttttgttttttctttcttttttagtcagtgagttgtaaaacattgtttttgcatacatatacaaccaatatttagggaaaacaaaataattgaaaaagtgaaagaaaatgccgctttatttcgcatgtaagattaaattcaaggatggttgaccaaaatcatcagctcgagagggtatggttagaattcaacatagaatattggaatgtgttctaaagtaagttataaaatatccagtcataaacagttgattttgaatta

SEQ ID NO: 28651 - DNA, 1390 bp, Arabidopsis thaliana landsberg
ccaaatcaagaacttggaccaaaggaacaagaagaacaataagcaaaagaaaaataaaaacttggaactcatctaagcaacctaagctcctaaaccgtcagataaagttaccacaacacacaaatcttacccggactagagacactcactccaaatgtccaagtttgctaggttttgagtcttgggaatgaagagaatcaagaaagtaggagagaaacccttaaaagggtaaatgacctaatctcaaagtgaagctggtaaaatccagctaagagattgctgctatgtgattctatcaaagtttctgatatgtctttcgtcaggattgccgcgttacagggaatccctgacgagtaaggaaataagataaaaagacaagaaaattgtggaaaagtatgtttctttattagtcaaaagcaaagccttgtcggcgttttgaccagaagactttaaaagacgagcaacaaatcactttggtccaaatttgacttccatgtaaatttcaaagagaggaacaagaaaatttgaaaatctatagaatcttccaacaatagtaaaatctcagagcaaaacaaaggatttttatgatatgtttacagagttgaaaccttggattagacgcacaattagaaagcatacaaagcacattttaagaacataaaatcctaattatcaaaagcccattgaaactatatttaacaaaaaaaaaccaaaaaaaaaagtgaactttttgctatatgaacccctacgaacagatttacactactggcgagtgacaggtgtaataggcacagatgagttaatgccatagaaaccatcttgtccctgaaacttctggtatgaattctccgatggagcagaggttgttgaaagttgagtgagcccaggtacccaaggaccttgttcttgttgttgttgctgagtggttgcagtagaggttgctatggtgtagttgaatggtgtgtggtttactggcccgggaggctgtaacggctgcaagaactgaggttgaagctggaatggtggtggtggtggaagcggttgtgggggtgtggaggatgatgttgttgcagtgttctgatggtgcggtgagagatacgactggtcatgattttgaagcttaggtcttttctctggtgggaaatcgacggatgatagagtttctgttacagcaggtgggttgttgtttccgatgatgccttcggaggctaaggaggagagaacataggagagcatctcggctgaggaagttgaagcagttagcttagctaccactgcagcagcagcagtttttcttgggtcttccagcgattgagatgggtttgaggcaaacataactggtgcagattgttccacatcgctgtgtgtgaagctttgtggtgctgctgcg

SEQ ID NO: 28652 - DNA, 1586 bp, Arabidopsis thaliana landsberg
gcaagtactggtgtactatcttttataaaagatacaaatcgttaaaagaaaactgtgaaacaaaactacacaacaaagggcaaatttcaacgatcactcttttgggggcaccgaagtctcaacggtcacttcttcggtcacttctgtttcttctttaccgtccgaatccaaaagtttttgatgaatcgtatcctggatcttcgttacacccttctctaccggtcctattgcttggtttattgtaagaaccacatctttcacgacatgttggccaccgtcaatcactatgtcctgtacactctccttaatgcttgtgccagatgcttcaacctgagtctccgaggtctcaacaagaccaccttcttctagtttcacttccgtcttgctcgtttcggctgtgattttaccgcactctgataccggaatgtagtggtaaggttcagctggaaaaacaaagagatgagccaccgctgcaatcgccatctgccagtgtacaccccaagaagtagtagaatccttagaaacataattatgtttggaaagagctcatatagaatagagatcgctagttcgagtggcacttgggaaagagcttttaagttacctcaatgcaaatgaggaaatcttgcagcccgttttggaatcgaccttcttttggaagtataccgtaataacaaagcaacgcgataccgaagccttgccaccaagtcgcaaacacgatagccttaaagctaatgaacttagccaacggttttatttctttaagccgttcatgagtgacattatagaactgaaccaagcaaaacagagcccacatttggctgaagtttagcaccaccactatgtatggatatctacagaatcaaagactcatcacctgtctttccatctgatgaaataacaaatactatgatataatagttaattcacatacccgtaataccatttgaattcaccatcaccatagacaccaagaagctccaacaaaaatgtcaagaaggcacaaaaggttttgagggatcatctgaaacaattatcacaaaaactcaaaaacatgcaataattagggtgcagaagagcccaatcacttgacttacatatttgtacgagaccaaacttttctatcacaggagagctctcgttcccaagacatatggatcacacatgaatttccaaaatgaattcttcttcttctttttgctctcatttgctccttcttctaacaatggtttctttgattcattttcaaggtattcaacaactcttctttcaccacctgaccattcatttggaatcttggcttaaagctgatgcataacaattactaaccagaagaaagagagagagagggcacacatagctcacctagacatgccaccaagtagcttccaaacgaatacaaagcaaaagcttcatagcagtttctcaaaatgtcacaaggcagcgagaatttcgaattggacaatgaaatgatctataaaaacacaaccagattattattgaaattataagaacagattcataaactcctgaagataaagaagagacttaccgattcagttgcctaaactggcaccataaacaaa

SEQ ID NO: 28653 - DNA, 2533 bp, Arabidopsis thaliana landsberg
  unsure (1)..(2533): unsure at all n locations
caggtttagataaatcagactttccatgtcttgcatctcttgtggtaatgttttcaattctatgcagccttcaagattcaatcttctaatattatgagctcctattaaccctgatatatcgcatagctcactcgagtggctgagatcgacccattttagtttggatatttcctgtgaccaaaaacaaagtcactcattagtcaacaataaaagaaataaacttactagacagaggctgcatttaggcacaccttactttccttccaaagtcgtgtaattttgctgtaagggaggttgagctcgataagattcttagggttaaatgcttttgaaagcttcttcaatgggaattgtagccaatagagatatcggacattttccattgagcatttaagtccatctgggaaggtcagtttgcaaccaacatcacaatctcgagagcattgtgaattgtagactttgaggtaccgtagattgcacatctcgctgaagaatttagaatctaaggtcatgttattatccatttcagacacatccagcaatatacccatgacattgtccatttcctgataaaatagcaacacatgttagaaaatcacacaacaagctctatctatttaactctaaaattcctaatagtaatgaatacttaccgattctgtgacttttttccttggttgattgacatatctcatccttttatttttagccgcagcattaaagctttcatgattccaaatcatttggtatccatagttattttcattagataaggatgaacaaagttttttggcgaacgtagccattaaatcatgcatctccaatcgaccacttgagatgctaattagtaagttgcctgcgagatctcttacttcgctagcagcatcatcggcagaatcaggatcttctgtatccactaaactcctaatgtaatattcatcccctgatccaaagaaccaggctacgacaagaaaagcttctttctgttgattgctcagatcatcataacttgctctcaatagatcctgtatatacgggatgggaagttgtgccagagtatcgagtctctttggccactgatccttgtctatcgaaagaagctcccgacccaatatcttgagagctaagggattgcctctggcataatctacgaactttgtggaaagatccatgagattccccgggtatggacagttgtgatcttcaaaggcataaaagctgaattgctttaagccgtctgtgatattcaatcttgggacaacataagtatactcgaactgggttatggatatcttgtcacgcgtagtaataacaatcttgcttcctttcctaatccagttaagattcccgagaagaccttgtatttgtttcttgctactcacgtcatcgagaacaagaagaactttcttcttcagcagctcatcctttacagaagcgtacgtcatctcttcagttatatcattgtaagtgtcgctaagcaactctttcagaatcattctctctagggaatgcgtcccgtattccttcgacttctgacggatattcannnnnnnnnnnnnnnnnnnnnnnnngtgtttccactcatcatacaatctcttcaccagtgtggtcttgccgattccgggcatccctaaaaccccaacaatgcgagtttccttgcggctaaggtccaacttttcttttagttccttgaggcgttggctgagtccaacgagctcaatttgattttcaggatctaccatgtttctattttgtgggataaagcttgaacctgtagaggtatttgtgcacaccattttatttttttcatctccttctccttgtgaaattatctttattactctctgaacctccccaacgatttgattgattaaaagttgttcttcgctgcaatagtaaaagtttgaataaaaagttaatttaccattatcagcggtaataaaggaaaatttaaaataaaagatgtgtcaaactttaggtttttggaaagcgtatgatccaacttcaggtctaaggtagatttctttttgcgggtgaaggtatagaaaaattctttggttcaaattttatttccttaatttattttgttttctaattttaattttaattttaatttattttaaataaaatatgacacgacatattgttgtattttgattagttattaaaaaattggttattaatcatagtttcttcaaaatacattttgtcgtcctacacctacgtgacaactctcaacaagtaccactaacacgctactccttggtttccatattatgtttcttgttcttctctgtattccgctgtagtatcatcaaaattaaagtctgcgtagaatttccagattctaggtctttcagtgctatatatttgaattaagagggcagttttgtttccccttaattaactggacaattaataataataaattcgcggtcctctgccccgcgtaagtgaatgcctaaaatttaagggaccagactttaaagcattcagtcccattttttcttccggccccatcattcaacataat

SEQ ID NO: 28654 - DNA, 1507 bp, Arabidopsis thaliana landsberg
gctaatagttttgatcttagtaaccgccagatttcaacttgatcgtataaacgagctaccgacattggatattaacttctctctttttatttgttgtcttcatttattgaataataactttctactgtattccttgttttcatatttagtttgttccaagagagttaaaaaaacgggatattcttttctttttcctagttattaaaaaaaaaaaaaaacagagtaatattacgtttctctagtaaagaaaaaagtaaagagtaatgtacttttattgtattgaaaaaatattttttttttaaaagagagagtaacgtactattttttctttaaaaatttgtttgtttcgaagaggaatcgagtaattattaaaaaaaagcggtgagtccaaaaaaagaagcgacaaaagttgagtacgaaagctcaggaatagaggaagtggtggcgggtcacgtgggctctctcattcattcataacccaaaaacaaagaaaaataaaaaactgtacgtcctcagagatggcacggacccatcacgtgggatccacgtgttattaacaccgtcacatcacggctctctctctctgttactccaccctccacgcgcttccctgagcgagtgtgagttctggggtctacttacgttcgctggaatagaatgttctttcttctcgcgcttacgatgccaagacgtcaccagctctttgcacgtgtccttaacgcgcggcgaattgagaacctttagatcttgtatgtgttttttttaagaactattgtcagaggaatttcatttttatttttttaaaattataaatcagacctactagatagtggtatgccaaaacagtatttattaggttttgtgttcaaaaactttattttgtgatttgtttacttaggtttgtagtttagtagtttgtaatgttaatgtgggtttttaatagtgtctgaaacatcaaaatgagaaaaatgaaaacataggattcttaattaatttgtttttcatgatttgattgatactacgtgccaccatttagtttctaacaacacatgatggacataaacataatccagagagaataatcatatacttttgatccaccaaaaaagaaaaaaaaatagtactaaactactaatcataacacaattgacaaacaccaatggcatgttttaagataaggcagcattttcattaactttattctcacaataaatggaccagcctttttttagcggcaagaaaatagtgtttcacctaactattaataatttcatagataatacacctaaacaacgtttttcatttatcttgggagttttagagtgtaaaaggtttatactggtaggttatactccacatgtttatttttaacaactataaatataaacattactgtttctccacaagtttccaactaatcagtaacctatgtacatagctattgagttaatatcattggagtgtaacaatgttattgatttgatattaccaagatgatggtcttaga

SEQ ID NO: 28655 - DNA, 2373 bp, Arabidopsis thaliana landsberg
  unsure (1)..(2373): unsure at all n locations
cacagcatgctctgtaagacagtgcataccatgctcaggagctgcagcttctagtgattggtcaatgaccaacgcgagcctcagtccagtgacgctgcagtagattatgcagacagagattatgatatgcaaacatcacatccacctgatccgatgcaacatttagatctgataaagctgattccagcatattatcatccccttcttctatacattgcctcgtactgtcttatacttatgggacaaaacatcccatactgaaccgtaccaccgggacatgagttctcttgccaaatcgtagcttcctccttccaaagcatattcagcatactgattccaaatacactgtatgcatgacgcctcttttgcttcctgcttgagaagctcttcaaacccagacgaaaacatatcctttaactcatttgattgcatcctaactgctaacaattttagctccaagcatgttgggtagagttgaacagatgccttcaaaatgtccctacggctttctaactcatctactgcaatcataaacagggcgtagttcagagcaaatagcccagcaggtcgcttttgtattccattgttggtaccatgttctacggaacgcatccctttatcaaatagtctgagcgccatttgcttcagatcaccatccaaattaacagtaggccattctatttcaagtagttccttctccatttcaagtcgtcggataatagagtcaggcagcttcctgtaaataactaagtacacacaacaaacccagaacacacatttgtcagaatatgttaagcatgtgagaatgtgagacatcagtgaaaagtcagggtcatcagaaactgctgctggagcctgaagcttggatattctctgtattgccttcgaaacattcccagaaatgcacaaaaggttgaacatctgcaacaaaacatctaatatgcaagcgctggcatgattcctgtcaatggacccagatgcatggttgcaaagtgctgagagggcggtatcatatgcaattaattgatcattaagttgtcctcgactgttgatgtacataagccaaattacgtatgatctgctactgtgtttgacctgaagagttgaaatgttatcccatataaaccaggtggaaagactgtgaagcatcaaaaagcattctatagcaaagataaaaaattaactagtaactagacaacgaaactgaaaaagataataacatgccaagacatctatatagaagtttgaaaattgtaaaacactatcagaaacaccaagttggattagtatatgaatatatgcaaacatacacaaacaatcaatcataaaatgcaaatggtgtggctatgtagatgcaggcaatatcgtagaaggggataacataccccataagaaaacatatctttcccatctgatccttcatatgcatggtaaatcaggagataaacagcccaaagaatctcagaagttgggtcaccttcaagaccttgtgaaagcaaagaaagggcctgaaatatgtgccactaaaattagaacgagagtcaaatttgatacaacacaatattgacaggaatcaaacaacattgcctggatcaagccttctgactgctcaacttcccgaaagaaaataataagagccatttccatgggttcaacagcagcatctgaaccttgtttaaggatattctacgaatgcaccaagcaggtcagtgcaagatgataataagaatatcaacaaaagaagaaaacattggtcagatctgcatctagatattagcaaaatttaaggttaacttataagaaagagaaaacaaagaccaaccattaagctatgcttaatcctgaagtatgatgagtatgttttcgaatttcctaggaccacaattcgaccttcattttcctttgcaggtacattcctgtaaaacgagtttgatgaggctaggcaggcactaaagtgcttgcaccatatttgtccatgtctttgagccagaacggactcataagaccacgagtcaaccttcatcgtatccaaggagacaagataagttggtgaaaacactgagtccaaaatatgggatccttcggaagaattatgtgtcttctgatgtgaacttgacccaactctaccatctggaagataaaaaaattagaaattctagcaaagaaatatcatttctagaactcttacaaaaatattctgccgtaccaggatcatgttgactttgatgtaaactgtcatcagagaaatccttgaaatnnnnnnnnnnnnnnnnnnnnnnnttgcaccttccacgtaactcgtacatgcagagaggccaagaagggtccaccttcaaattacaggtgtagaagccaatttttttctcatatact

SEQ ID NO: 28656 - DNA, 1307 bp, Arabidopsis thaliana landsberg
  unsure (1)..(1307): unsure at all n locations
caatgatcgaaaaaggcaatgcaaaagagctcttggatccgaatattgctggtactttcgacgaggatcagtttcataagatggttcttgctgctacacattgtctcacaagagcagccacttatcgtcccaatatcaaggaggttagttactctaattttggcagacttataaccgaattttaaatgttggatcctctgttctacctatgaattatgccaagatctctaaccttttagtcacatatccaatatcatttctgtagatattgaagctgctaagaggcgaagatgatgtctcgaaatgggtgaagatagaagaagatgacgaagatggtttcgacgacgaggtttacccaaattcgaacacagaattacacttgagcctcgcgatggttgacgtggaggataatgactctgtgtcaaacagtagcttggagagaagtaacaacagccttttttcttcttcttcttcttcctctcaggagcttcagtcttaattagggtttgtgcttagcttgtctccagttcacttgaggactacgtcatctcttacggtgtctgcactcaatatgtcacactatatatcacttctctgccttggcttttgcaaccattgttggagaagtctttttcctctttctctttttgtatatatgagaggaggaaaatagaaaataattattataagtttttaacgtgattgaatgtaatgactaattttaaaaatcagataagtttcatgaattagtattgctaaaacacgggtttttccaaaaccatatttaatcattttatagcaagtttctcttgtcaaatataacataaacctttgtcactatcaaaactaaaatttaaatgtttttgcttggtctaagttggtagaggagggtttaattaaaagactcagtagactcaatatctcttgttttggtggcaatgttttgtcaaacaccaaatactaagacataaatatttatgagtgatactaaaggacttgcaaaaaccatgtataggcgaattactgttcactagttttttggttaagaatgacttggaacttgcagtttggtgaagctcttggaagagtcaaaagacgattgtatatcgatgggcactttgaggttatttgcagaacatattttgaccagctcaagacacggtaatgtagccnnnnnnnnnnnnnnnnnnnnnatatctttgtcactatctttgtaacctgatacctccagcactttcactcgagatgctgataggcaagacgatctatccgctctcgcgttacgggccttacggaaaacacataca

SEQ ID NO: 28657 - DNA, 1650 bp, Arabidopsis thaliana landsberg
ctaagtaaaacaaataaaaaccattgagtcaatagaaaagtaagaaactctaatttgattcacggatttgagtcatataccagtttttattgaaattttgaaccaaacttaacgtaattagtgtggtttggttcaatttgactagttcgatttttgtttttggcctccctttttattcaaccagtaagaaaatttggttaatatacatcacgacaagatttttcatttttcagtttataaaaagtcttcgtacgacggttctacggttactatttacgttcgaagtttcttaataccagaactaccctcgaattctcctcacagtcctcgagtcccacagccagtaactgtttacagttccaagggtatttccgtaactccgtccttacaactaatttctcagtttctacttttctttccaaaatcctttctttctcagcgattgtccttttttgactcacttgttcttcttctaaagaaagcgaagtttcttctctccagaataatgttgattctctgtgttgtgatcctccataggataaatccctagacaatcctcttgatcgcgcttttcgtttcgaaaaatttaaactttttaactccgttgatcgagatggtacagtcagcggtggaagttctattaccgtcggcgtgggagattgaggtcgcggtggtcgcttctgtgtttttaatcgcttcctattggctattcgcttacagaggaggcggagatgacgatgtcgtcggtgttggatttgatcggtctcgtctcatgcagaatctcgattccggtgacgcctttgacaaagacaaggtttttatatcatcttcttcatttctctaaattgatcggtttctcagtttacttagccggagaaatctcgtgggttcttaatgaattttagctttccccttctctaattgggtaattttccaaattttttgacttgcagtttctgcacttatttttgtagataggacacttgagaggagacactcaaactaatgctgcttatatagtcaaggtaaatgcttctcctgattcttatgattcatctgtgcatagataggatactaacattgcatcaatgtgaggatcttcttccaggtggaactcttggctgctaagaatctaattggtgctaacttaaatggaacatcagatccttatgctattgttaattgtggatcagaaaagcgattcaggttgttacatatccttttcaattagtgttataacttttcaaaggaacatgtgagcaacttttttgatgtcatgtttctttcctgctcttttccgctgtcttttagcttcttaccaacaacaacctctatccatctaaaaaaagtgaaaacatataattggtggtttggttgttgagtgcttacacatttgatggtctaatgttaatgtagtagctctgtgcttgttacagttctatggtccctggctcgagaaatccaatgtggggtgaagagttcaattttcccacagatgaacttcctgctaaggttaaatatcatttactgctttaggaaacttatttcaccttaaagttgtttagactctcatgggaatatgaggcagagggcttatcactaagttcaaacccttgatatcttctagtatgagaatttcgcttatatatg

SEQ ID NO: 28658 - DNA, 1846 bp, Arabidopsis thaliana landsberg
  unsure (1)..(1846): unsure at all n locations
gaaaagtgaattgcctttttaaaacataatttggtaaataccaaataatatcatttttttacattcatcctaaatttttatactaatattttcatttgcaagtttattaacgaatcacctcaagcaaaaagtataaaagatttgaattggttatgtacgtgtgtgtatatcaaacaggtcgcattcaaaagttcgaaattcttatatattggaaacaggtaaatactaaatagtattgtaatccgattcactaaatttaccaatagtattgtttatcacgatgacacttttgggtggctattttatccatccgattcttatntgcactctaaataagtgtagtgtccaacgttaccgtctccaccactaccactatgctatctttttctcttataaaaatattattaggtaacaactattaataaacaaagctatatactctatttttctatataaggcgtgagttctccacaagcctcctcatcaatcaagatcaagtaagcatcactactttgtactaaatccaaaccatgacttccaacgttcagctttcagaaacaaacagcccaaggaatcagaaaacccgtccgagagcagagaaggaggaagtggactacatgcagagagctcagtggctaagagctgccttgcttggagccaacgatggtctggtcacagtcgcttcgctaatgatgggtgttggttctatcaaagaagacgtcaaagcaatgcttctcgttggttttgctggccttgttgcgggtgcttgtagtatggctattggagagtttgtgtctgtgtgcacccaaagggatattgaaactgcacagatgaagagagctattgaacataagacatcactatcagcaatcgacgaacaagaagaggtaatgtagctagtgtctaattacacactaaactttactcacacataaaaataaaaatagaaacctatgtatacgtattttcccatagttattacctacaccaatctggcactattttttgaatcatattaacaaattttccttattagttagcatgtaggcttttgaattttcagctcatatatatattttaaaatatatcatttatattttatgattaagtacaatgtgactcttttgatgacatgtgattactatatgtataagttggcgtttgaaaaacaatgagataaaaatttcgtatttaaagatatatgagtcacatatttattgccaattcattttgtaatcgaaacttcacactatacaaaattatccttgttttcttttagatgtacatgacatttctatatgattacatttagttataaaatgtatgtttaatggtaggaggagaagaaagaaaggctgccaaatccagggcaagcagcaattgcatcggcgttagcgttttcagtgggtgcagcaatgccgcttctgggcgctgtattcatagagaatcataaggtaagaatggtggtggtagcggttgtggccaccatagcattggttgtgtttggagtgactggtgcggtcttgggaaagacaagtgtggttaagtcgagcgtcagggtggtgattggtggttggatggctatggctcttacctttggtctcaccaagttcattggctctgcagccatgcaaatctagaggctctttcatgtggtccttcttgtttccatgcatcacaattagtgttccgtcatgtttgtattctaatcatcatactatatctcccgaactacatatgtgatgtagactttggtaatgctcaacaaaaaccaagagcattaataaatggtttgtgaatcgatctccagttcccaaagaggtgagtagacaaccggttagaaaag

SEQ ID NO: 28659 - DNA, 2283 bp, Arabidopsis thaliana landsberg
  unsure (1)..(2283): unsure at all n locations
tgtggtgcacttctgtctcatctgctagatttcatagtatttctgttgtccatgtctcacagatattatggtggcaatgagtacattgatcagttggagacactttgccagaaccgggctttggcagccttccgcttagattctacgaaatggggggttaatgttcagccgttatctggttcacctgcaaactttgctgtctacactgcgatacttagccctcatgatcggatcatggtaaagaacttttgcactcttcacctcagctttacttgtgtgcttgatatagactgaatataatggcttgttttatacgattagggtttggatttacctcacggtggtcatctgtcgcatgggttcatgaccgctaaaaggcgtgtatctggaacttcaatatactttgagtccatgccttatcgacttgatgaatcaacaggtggtgcatttattatgaaaagcgtctctgcagctactttttgtatgaggctatttcctgatgtctgaatatttgaacaggcattgttgactacgatatgctcgagaaaactgctacacttttcagaccaaagcttattatcgcaggagctagtgcatacagccgagattttgactatcctcgcatgaggaaggtagaaacacaacctgatccttgaaaacacctttcatgtttctgtctacttttggctttcaaatataaatctgttatttcattttcctcacaatttgtatgaatttctgaagatcgcagactcagttggtgcttttctgatgatggatatggctcatatcagtgggcttgtggctgcttctgtggtagctgacccttttgagtattgtgatattgttacaacaacaactcacaaggtatgtctgttccgaaatatgaaacatgatttccatttgtatttagacaaaaagcgtttccagattatctgttagtaacacacttttaccttactagtctttgagaggtccgagaggtggcatgatcttcttcaggaaggatccaattaatggggttgatcttgaatctgccgtgaacaatgctgtcttccctggtttgcaggttgagatattcaccattatttttagctctcttagataattcttctcccaacgtgattaaaagttgtctgaattgtatatttgaagggtggccctcataaccacacaattggaggattagcagtctgcttgaaacacgcacaatcaccggaattcaaggcgtaccagaaaagagtacccacccttttacttgatcattaagttcttctgcaccggataaagtttgtaaattttgcttctaacaagaatcttttgctgcttgtttaggttgtgtctaactgtagagctctagctaaccgattggttgaactcgggtttaagctagtttctggtggcagcgataaccacttggttctcgtcgatcttagacccatggtaagattacaaactgtattaatggcttgaataaatcaacttttttcttaaaccagaaaatcacttatgataatgcggtgtcagtctaacatttttgttgtggttagggtatggatggtgcgcgggttgagaaaatcttagacatggcatctattactctcaacaagaactctgtccctggtgagttcctcctcctactctcggtcttcttcttcccatttgaaaagtcaattctgagagaagccctcttactcttttacaaaacagaaatgaagtcgataagtagaacttgtagaacacaactgttaaagaaatgcttaattgttgttatagcaaaaatcatcaattgatatatttatannnnnnnnnnnnnnnnnnnnnnnnnnntgagacagtgttgttgtgtatgtgaaatggtgaaacaggggacaaaagtgcgttggtaccagggggaataaggataggatccccggctatgacgacaagaggactgtcagagaaagactttgtagtagtggctgacttcatcaaggaaggtgtggagataacaatggaagccaagaaagccgcgccgggttcaaagcttcaagatttcaacaagttcgtgacatctcctgagtttccattgaaagagagagtgaagagtctaaaggagagagtggaaaccttcacatctcgttttcccattcctggcgtttaagctataaacacacacagatatgctcttgttgtaccttaattattcacctttttcatctgtcttttagggctcttacttgcttgtgtcccaagtttaaagttacagttgaatcgagagaaattattttcaaaaataatttt

SEQ ID NO: 28660 - DNA, 1679 bp, Arabidopsis thaliana landsberg
gtctcttgatgatattgatagatagtggtagcacccacttggaaaaacgtgcaagccgctaacattagactacaatccccacgcttcttagaaagtcacattacatttttaagattatatatgccaaaagctagaacaagacgacctttgtgaaaaaaaaaaagaagaagaagaagaagcagacgacctttctcaaacgtccttggccaagcccgagagatcaatctcgccagaggagtgtggtcgtgtaggggcagtttcgtcattgcggtgctcctctaccttgggatggttttcaatgggtatccctcctctcctggtgcttgggtgatggtctcccatgatatcaaataagctgcttgtcatctcttcagccgcatcaaagaaactcttcattccgctcaagaaatggcgttcgatggcgtctacatctctgcggagtcccgggaagtttagcgggtttttatcctcaaactgattcggaagagcggatcttcccaccatctggtctgtcacatcctcttctgtgtgctttgtgttggattgaacgacttcagagggcctaaagcagatacagaaccaagggtaaatcgatttagtgattgtctagaggcgcgaaaggtaacaaacaatcaaggtgcttgaacattttaatggctcaatctcaaaatcacacatgaaagggcgagaaagaaaacaagagttgtcttccaaaggaaagcattacatttaacatggaataactcatatcacaggtagcaaacaaacaaacatgaagctcgccgaatacacagaaactgtgatgtgatactctatgcatcttcttcttatatgagagtactccacttacttaacccaaaaaagactaaccagcagttgctccacttacttaaccaaaaaaaacatgccagttataacactacaaagatgataaaatcataagaacttttataatgaaacatttttaccataatggttcagtgatagagagtcctttcgaagaaaacaacatcaaaccacaagaagtaagcaatgtaaccattccagtgcataaacacaactatctttctgcaattcatattagtaagcttagcatcagaaacacaaatttagagtcaatctttaactattggcttttagcttttacataaccacaaaaacgtcaaaaaaatttaactcagagctcaaaacaaacacacttcatctatttgatctataaaccctggagatttgttttccacatgtaattcaaaatctaaaagcttatcttttgcttaattagggttatgatcaaaagcgagaaaatatccgaaacactcacttcccaaaacagtggcggaggatttcttctgttttgtcgcatttcctgacgaactttccaggctcgacctcctccgtcttgcactgagatcttaccaccgtggtcgtggagcaattttcggcggcggcggcagaatctccgagcggtttatcggtgagatcagcaccggctttagaggcggatgaatcgtcaatccagatccaacccatagctaaaattcgtgatgagattcttcttctgtgtgtgtgtggattcttcctcaagaaaaactcgaagcgtccgatttgtttttttatactcaggcctctttgtttgagaaaccgacttaccggtacgtgaggattttctttttcttcac

SEQ ID NO: 28661 - DNA, 6361 bp, Arabidopsis thaliana landsberg
  unsure (1)..(6361): unsure at all n locations
taattattctatccaagactcatataattattctatccaagactcatatctgggaccagttttgaagacaacaacaagaaagtttactctgtctggaaaattgctacattgtgtatttagtaggatcttgactacactgaaagaaaaggagctttggtttcatttcggaggacaacctacgagattctctattagaaaatttcatatggttaccagatttaagtgttctccagattctgaggaacgtgaggagaatgaagaggagaatgatgaagatacaggctacagttgggcgaagataaaacagagacacacaacggatgtgcttcttcacattccgagggacactgatgaagattcgagtgaagaaagattctgcttggccatgctcctcttaatagagtcgactttcctcactctgtacaaaggctgcaaattccctgtagaaaatctggagagagcacaagatgtggaaaagttgaccaattatccatggggggaagatgcattcaatgtcccaatgtcatcgatcaagaagaacgtggcatcaaacatgatgaagccaaagcatgatattcatggatttcctctagcactacacatttggattctttagtctattccaatgctacaaacagcctacaaccgaatcagtttaatagagaggcctactgcattcttgtgtgagaaatacacgagcctaccatcaccacaactttctcaaatacagaacattgaagcatcatatcatgtaagtttagtctcttctttcaacggtttaaactagttttgggaaggctttatactaattcggtatggccttccttatttgggaaggctttatattaattcaggacggtcttctggaaatatatagtcgaatgtattaagtttgctaaatgtttttgtttttgtgcagccgaaggtgtttttcatcttaccgtcaatacctgatgatcttgaagataaagtttcattggaagacgaagatgatccagaattggatatgctggtctagcttctaggcaaaggttacaagataaaatctgaagattggacaaaaacaatagttgatgtaggagcagtattagaagaagttgtagtgatttttttttgttcggtaacaaagaggtaatgaaaccaacttcatcaggcgagtctctggttgagaagcttgacaagctagtaaacctagttcaagaagggtttaaatcaacaaatcaacgcttattagaaatagagaggaagctgacaaaacttgatagaagaagaagaagagatcatgtaaaataagattcttaacaaatttaaattatattagaggttctgaaatgaatttaagccgatttgatgtcttgttgtagtgggaacgatcaagaagtccatctcctatgcgaacagatttctattccaaccgacctccatcttctatggtaactgagcaagaacctgcaaacactacaaaaaaatgtccattgatagcattacggcataacacggcttactgaactgctattgaagattagatgtattttagtattcatatgatagcatttaatgacgctaataaacattgattaaaattatattatttatcctacgctatggatatgttttcattaagcgggaaagtaaaatagtttttttccgcctaacacttaacaaaatgatgaatttccccaatttgtcgattagagttattattttctcaaatttctcaagaaccttaagaactagccatctctgctcaacctctctcaatccgacaattcgtcgccgattaatcttgataataggcttttagtcaattaatcctaaagcactatcatgtcgttgtagtaatgaaggttgtcaatccaaatgggtgtgttgcaaccaaatgagatgaaatcagaagtcaataagtcaagccaagcaataacagttttgagatttctaacaatcctaagcgaacatggcgaacatgcagaagacagaaacaataacagaattactaaaatcactcgaccgcaacaagctgatgccagaaggaggatgttgtcgagtaacaggtcgagtaacacacaggaaatgaagataatcttactcgactgcacagtctgttgccagacactgggtgtggtcgagtaagatggtcgagtgattgtaaaaactaagaaacaggcaatgagaacgattaagcgataactataaaacagagaaataagatagacaagaaattcgtaaggatggggtaatcgagtagagtggtatcctagcctattcgaatggttaacaagcgcaatcaagctatccctagacaacaggttcaacaacaaatcaattcactcccgtgatagaaatcctcaagcaaagctagcccagactaattaccattaacggaatctaactatgcaggcaataagaacagactgataaagtcaataaacgctctaaacggccaatcccatggaatagagacgcatatctcaggaactagtggatcaagcattccatcgaacaccttctgggtgtgggaaagcttgggatcgaattccagttgatcagaaagaaataagcagtaaacgcaactagtcctaaagggattcaatcaattctaaagcttaaccattctacagactacagattccacaactactctatcccatccctaagaattctaagtcactactcagacaacatgctcaaagacataaacacagataaacgataatattgcataagtaaagagataaagagtagagaaacaagatgacagatgaaatcaaatgcggaatctgaataacttggaaaaatctcgaattacaggttgcagaagcaaaagcggtgcaacagagtttaacagaaaataaaactgaagcaaaaactcaatgtcaaatagatgtctcacgacaaaaccctaagacatctatttatacaaaacgaaagaaaatgatagtagacgggccaataacctaatcgccacgcccatatattgataatgggccgagatgggcttcgtgatccgatggaggtccacgccgcttccaaacacttcgtcttctcctcttctcttccttgtgctcagcttgtctggttgagtgcggatttgagtacactccaaagatgtgatcgagtgcttggtcgagtgatggtattggtggtgagcgatgatactccaccatgggtcgagtaacgtggtaaagtgaacggtctaatgtggtcaggtggtatggcaaagagatactcgatcagagggtccagtgacgtcatcgagtggcctgagctgaggatacttgaccagggggtcgagtagatgggaaaaatggctccaaagtcactcgaccagggggtcgagtatggtgctggatgcacacgacctggtggtcgagtatatcttctggttctggctcgtttcttccaatttactcgcaaacagctccaaatcacctgaaaacaactcagaaatgcaatatgtatgcgaagctatcctaatcatacacagtatgcaagaatgatgagaaatgatataaaacagtgatgaatgatacgaaactggactcaaaacgatgatgaatggacaatgaaaacatgcaaattatagacatatcaataacacaatagaaattaaaaacaaagtttgaaattcaaaagtaacccttcaacttcaaaggccacgaaattgtctctttattttagtgggcttgggccttgaatcatcaaaatggattatatgaagtgaaaacataagcctcattaaaaaccttcctttggaaaacccattgagacaaaattaaatgcagggaaaaagggcactcatgaatcacttatccatcttgatgaggtccttcagcttgaatcaaaaccaaagaggtagtgacttggctcaagtcctttggtcagtctcaaatgtggttaagcatccctccaatggcttggttgaatagcttaactctagaacgagtcattggaacgtccggtgtgacaagaacatcctctgctacaagcttctcttcagctacaagcttagctccttcctcggctacaagctcacattcaagcttctgttcattctccctattcttaatgttgtccatgatcatatcacaatcggtttacagggaaccagagttcatcgaactacactccaaagccggcctttctgaagtcatttcctcagagcaacttccagaggacctatggtaattcagcttagcaagccctaggtaattctcctcctcgggctctatttctccattatccaagagaaccatgactctcttatttgaacattcattaacataatgtcctttcccttgacatttgtaacacctaacatcacgaactctaaatgtagaaatttcagcctttcctatgtgatctttaactgcagcatatgatttactttcagcccttgaactgacaatcggcttatagctgctggttctctcctctctttggtaagtaggcttagcaatggttcctgaaccataactagatcgtgaagaactcttcctcttaacttgctgctcaaacagaatcgccttgtgtaacatctcttctatttcaacatagtattgagtctccaatctgtcttgaatatctctgtttaaaccccaagaaaccttgacatagttgcttctctatcctcagaaatatcagcccgcaacatcaaagtctctgtttccttatagtacccttcgacagaacggttctcttgtgtaagattcctcaacttgagatgcagctcacgatagtagtgactagggacaaagctcttcctcataatagctttgatttcagaccaagattccaatggaagttcttgattacgtctccgtgaagtaactagctgatcccaccaactcaaagcatagtcataaaattcagtagcaacaactcttaccctattgatctcggtgtagtgttgaaggttgaaaaccaattcaatcttcttttcccattccaaataagcatctggatcattttttccatggaatggtggaattttaagcttaagacctccaacattgtcttgcaaaagatctctaccttcattagcacgtctatggtgtctcctttgactattgcgagataaagagctcctatgcccatagtactgatctgtagcttcatctctttgctcaagctgctcatcaactcttctttgtactcgaggacgagtctgccctaattctagtttctcatgaaactctttggcgaaaagcattcagtttggtgtccatcattttctcaaaggcttccaccaaaagtttgttgttccgattgtggttagtctcttcctctttagtttcagccattctttctacaatagagacaacaaaataacaccagtaacttgttcttttgaaacaaacacgaaaagacccttgaggtgtcctagaaccctaattacgatagtttcacttgttgggatgctaaaaactaccaaatcgtttccaaatatttcagaaatatttacaaaaatagtagactcttttccaaacctatgacagttgatttcgcaattttagcacacgccaattaattataaaacttaaatgaaggtgacagacggaaacagatttaaagatgaaaagacacaaaatggtgagattgaagactcaactttcagagtgtgctttgataccacatgatgagatcctcccaaggactcgacattcttaagttgagcaaagggtagaggtggctgtgaagccgtgatgatggatcgatttgaatgaatcgatggatatcacagaagcttgcagaagggcttcaaaataccaaaacttagattctttggatatacataccaaangagattaagggttttgctgaatatacataccaacaagatgatcttcttagaaaatatttttgattaaaagaaagataggttctcataagagattacatgagcttttgtatggttctatcataagtaattgatgtaacttgatgaacaatagcttagcagcttctataatagttggtatttgtaaactactaaaaaaaacacattttgtttatgtgttttcttctttcaacatgtctaattcgttttttttgtttgtttttttttggaatttgataaaaatctgataaccaacacgtttaaactaaaattgaccgactcgaaccgaaattaatttcgatttaaatcgactaatttttttgtaaaccaaataactcgacctgtttaacccgatcattggcctaatatattatatgcaaaaataaagttggatattatattttaatattggtggagaaaagcagaggttatgcggggagagtgggagttaattaatatgatcaacatatattcacgaaataatgaaaacagccaagcgttgttttgggaaatgaagctaaagac

SEQ ID NO: 28662 - DNA, 1250 bp, Arabidopsis thaliana landsberg
tatgggttcaaagttcaaactcttgggataacatatatttcgatatatacacacacacgcaatttgaccggtcgaagattctggcacaataaaggcatttgcacgggcaagtgccattgacgtggagtgatatatgcatatatgagtgcattactgatcacgtcagcagtgaattttttgtataagtaactaggactatattaaattgtgtgtgcatgcctatttctacacataaacatctacacgcactccaactacaagtaatttaaaaatttcacaaacttggtgcagcattaatttttaacttcgttttccaataacttgcaaaaaaaattattttatttatgaaattaacaatatggaagattacattttctagatacaggttaaagcaatttaagcaaagaatataacatattggtatgttttttaaaatggaaataacttaagaaaaaatgaagactaaaggaaacaacatgatacaaaaaaactatattaagttaaaattttcaataataaattatttaatttagatgaattgttcctctctatatatatgtcactgtcttatacgaaaagaacagacagagtgttaaagcgtcaagatcacagatgtcagaatcacccactcgattactgacatgtggatgtaggcccaacataatacgtgtataaatgggccctgtctctccatttgctaacgttgcctcgtctttggcctataaatcttcctaaaccctataaatcgctacacagttacttctcggctccggctattctccttttctctttcgtcgccggtagtttgctcctccttacgcctcaaatttccgagttattgcatgttaactcctttgtctgattttgtttaatcctttcttttgtctgattatgtttttgtgagatgtgaaaggatttgttactgctaatttcgctgtcaaaactatgaaaaaggtgtagattcaatatacgacggatattaattaatggattttattgaaaaagttggattcttttttttttttttttttttgggtgcattatgcaatttcaaatttcactttatgagagaggagacgaggagacttagatctttgtcataagaagaaattttgcattacgttttgctttgatttatgtgctttgggatggttctctatttgaggtgggcacattgcgttttcttattcatataaaagcatagaaaattgaccttgcttgggcgtaccagaagatataaccgctttccg

SEQ ID NO: 28663 - DNA, 1803 bp, Arabidopsis thaliana landsberg
  unsure (1)..(1803): unsure at all n locations
cagctcataaaaagtatgaaagctcagttttcatttgatttttctcaacgctaacgaaatcaatcatttgaattagccattccgagtctccttatattttcattggaggaataaaaaagatagttttgaaaacaatacatattttaatgatgattaatgagtggtccgtttctaaactaaatactatctccaacctcaaagcaatctttcgcctttttgaaagtttttttctgacatcgtcaaacatatataattgaaatattaacagaactaatgcaacagtgtatgagtacaaggtagaggaagggtaatgttaacagaagtaatgcaaacgtatatgcaaaaacctttaaaagttgacacacacaaaaacacactactgaaacaatttgaccaagggtaatgctagtgtgttaaaatatcaaatttagattgatgaacactctctttaagacttgactagagtagagatttgaattttttacatggatatatcatatatgcaatacatagtcaaattttaatataatatttgtaagaaaatagcatatgatatcagnttttttttttttttttttttaaagcatatgatatcgtgagtgtttgttttttttttgcttaaataattttatttatacattttcctagaaagttataagttcgtttatcagtttcaaaaggtccaaattgttacggtttagaaggaatgatttatattaactgtatgaaattgaaagaaacactaaagaggctttttcaaatcctagttttcttgtgtggtgggggcaaatggctaaaactctggccactttaatcatttcatctaagtggacaaatcattgaaaccatgtattaatgtaatccatgagacaagatagatacagacacatcttggtacaggaatagaaccactgtatctcattggagaccaaacttgaagcaataacaaaacttgagccgaaagaaaaggaatatcacaacaacccatttatgccctaaaatcatatatataaatagttgaacagcttctttctaaggcatgaaattattaacatcatcagtaagattatcatccttgtagtctctctcttaccatgaagcagacgtaaagacacattcaatgtgtccccataagtagttgatacgtgactatgatatcatcatcttagtctagattatatgcatcttcgcgtttaatatccattcgtgaggagaactttgacgatcatcgagaggaactaaagaacttagatttgattgagattaattctcgtaccgcttcagccattccaatcctatcccttcgatattcttcagaacactttatccccacttgcaaaactagtctcaaccaagttgctgcctcctctgctcgtggaacacgacaataccgactttgtgtagccgtggaggttataaccgcctccaaatgaattgtctgtcggtgttttcccagtgaacatctccaaaagtagaactccaaagttgtacacatctccttgtattgatggtttgcttcctattccatattctacacatatgtcaaagaaacaatagatattaagataggataattcagagttaattataaacaatactatttagcatatagagttttgcttttatacctggtgcggcatagccaatggtacctctgacaccagcagaactgaactggtttagaaaggattcttgatcaaacttatagaggagacgagccaaaccaaagtcactaacatgagccgttacagggtcatgacaataaacatgcagatactccaaagcagaagccacatctattgc

SEQ ID NO: 28664 - DNA, 3855 bp, Arabidopsis thaliana landsberg
caaacaaggatttcaaaaacgtaccttgtcgaattcccagcgaatacatgcaaggggttcatgtattagctcgagtggaacagaagtaacactattgatggacgatttgattttcgaaggctggttacaaataaataaaaaagggttaacacagccaatacatatacaacatcaaataaaacaatttaccaaagcctccaacgtttggcttaagaactaaataaaaccccattataccaatcaaagatcatctcaataaccatacaccaaaacatcagaaacaggcaaacggaactaaagataaatttttttgagtgagattaaaaaaaaaccctccaaggtttggcttaagaactcaaaccccattataccaatcaatgatcacaacaataaccatgcaccaagacatcagaaacagacaaacggaacaaaaagataaatcttttgagtgagattaaaaaactgaattccaaatgataaatgaataacaagtagcagatattaaaaagagtaatgcaaagagacagatagttatacaattgattaaaaggtttaattacgtggtttagtaacactaaccacttccgaagctcttctccttctaagcttcatgatgatttagagacagtcagacagggcatatcctaaagcaaacactaaaggattaagcagtgatcaaatcctcgagacgatagagaattgatcagtaatcacttgtggatatcgaatcacaaatatcaacgaggggtgatctggtccaatactttggattgatggcgatcgttgaggaagacgaacgagaagaagaaaaagagaaggaaagaaaaggagaaagagcgaaggatttgacgatcctggagataatcgccaagtttggaagcgatccgaagaaactagggttttgaagatcgcatattagagagaagggatttgatagggagagagaaagtcggtgtgagagagagagatttctaagtcggtccgataaattttgttccaatgtcggtttaataaaattttgttcaattggtcggtttaattaaaaaaaacatcttttttactcgatagaacttcattaataagagtaaacatagtcatacattagttattccatagtctcagttttcactcttctctcttcatacttttaagagaaaaagtcttctttactctgccatccggaattttctagcaaagccgttcgattgatttcaattggctttagcccgacatctatcattttctcattcggtggttggtcgatttgttttccgacttctttagtagagatcaaaattgatcattactaaatcatttgggtgagtttggattattgtttggtaaccttatcatatcaaacttttcagtgttgccattaaaactcattagtatgtaatctccaaatcatcatcaagatatgtggctccataatatagaaaaccattgatgctctcctggaactcttctacaaaggacgatgtttgtaattggttttaaccgttgtccatgattttcagctgatctgatctcaatgttaaaacccgacattcatcagaagattcaccagacggtatacacacaactttgtgtttactctcgattggatcatatcctagaaagactataacattatacacggaatcctatatggatttggttaaggttaacagctgtctcgtgctaaagttccaaattacgggttttgtttcttttcgaaagcagaattaagccgttgactaactcggtactcgaaaagatgcaatttgtggggtatttcatgtggtaactatccacatgatgggaataagactgaggcttgttcgaactcttgttgtactgcggaagccggaaaacaaacactttatgatatctgtttctaccagaacatacatatctgttttggatgacacaagcgtcattaactcgttatgataatgcaatgcaacttgataatggtgatgcacactataacacttttttttttttttggacaaaagcacagtaggacactacaactaataatatctactattttatgagattcgcatctacaacagatataaattatttatcaaatacacgttttagggccattgccaaaaatcaaaaactagtaaaataaaatactccaactaatgcgtctacgctactgcatccccaaccaaattatttgctcggccagcaaaacgacaccgtttaagtaattccacacacatacaaaaccgcaccgttttaatgactcccattagtcaacgaatttcccaaaaatccccaaaactgagagaaactaaacaaattcaaatgaccaccaccgataaatccgccggaatcgtaactgactcggaagccggaccggagacttctcttctcctcaatcctcacgaaggatctaccaaaaaagctccttctgattcctaccacttcgcttacatcatctacttcaccctcggcgttggctttcttcttccatggaacgcattcatcaccgccgtcgattacttctcttacctctatccttccacggccgtcgatcggatcttcgccgttatctacatgctcgttgctcttgtttgtctattcgttatcgttgtcttctatgcacataagagcctcgctagctttagaatcaatctcggtcttttactcttcgtaatcgccttgcttgtggttcctgttttggatctggtttatgttaaaggacaggtcggattatacgccggattcgatgttacttccgccgccgttgccttatccggtctaggtgatgcacttatgcaaggaggtcttatcggtgttgccggtgaaatgccggagaggtatatgcaagctgttgtcgccggaactgctggctccggtaaatgtttcatcttcctcaataatggagaatgatttggttgctgtggttagattaatttaggtttttgggaattttggatgtgtaggtgttcttgtgtcactattgagaattttgactaaagctgtgtatcctcaagatcctgatggtttgagaaaaagtgcgaatctatactttgctgtggggattgttgttatggtgatttgtgctgtgttctacaacgtagcgcataagcttccggtgatcaagttccatgaggagcgtaagaatgaagaactaatcagagagaagagcgaagagaaaggttctttaaccggtttagcgtggaggacaacactctgggatatcgtgacgaaagttaaatctcatggtttcgggattgttctcttatacatggtgacattgtcgatatttcctggatacattactgaggatgttcattcagagcttcttacagattggtaccctattctgcttattgcagcgtacaatgtgtttgacttggttggtaagtgtctgactgctgtattcatgctggaggatgagaaaatcgctgttggtggttccattgctaggctcttgttttaccctctcttctggggttgcttgcacggtccgatgtttctcaggactgagattcctgtaactatactgacatgcttattgggacttaccaacgggtacttgacaagcgtcttgatgattctggctccaaaatcggttccactgagacactcggagactgcaggaatcgtcactgtgatgttcttggttgttggtttggcctctggatctgtcattgcttggttctgggtcatttgattctaccaaagctttgttatctgtatttgttgaattctttaagcttcgacaaactcagcttcattaatctgtgaatcatcctgtgtgaattgttcgtttttccttcagtaatatgtgaaaattcttctttctacaccatgaacacaaaagacttataagctgtaaaaggaaacaacgtc

SEQ ID NO: 28665 - DNA, 1723 bp, Arabidopsis thaliana landsberg
tttcattttatgcatgagttcttggaaagaaatagtcttgctaatccgtatgatacgcgtttcaccacctacatacctaagtttctgatctctggggcggggtataactttaccaccaaaactacacaagaacttcgcacggttcaaagagctatcagaagctctagaagaaaccaaactatgacgcctttgaccagtatcatttttcgaagagataactggggctgactggaccagttcatgataggtcttatcttcaattctagaagggggtttcctctcgtgctcaaagctctgacgtttttcttctatgttaagcactgtagcgttagggccactctctgacattggatgaaccattcccagagcacttaagttaacagaaacaggcataccactgtgctcaccatacacatttgggatgaactgcggtttcataataaccctatctctcataaactcaaaagcaaattcttcaccggtctgtattgagtagtttagcactggccgagcaggggttgaaacaccataatctggaggtcgtacataagtgttaacattagttgaagagtcgtgggaaaacctttgattaatggagccaagtccctcatctctagggtcaggggcagtataccgaacatgttcataaccttttgcttgatccatgttttctttctcaaggtgtctatctatctagttcataagctccctcacaaacgcttgtaggcgacatatcatgatcatgacccaagtaaaatctttgcataagcatccatcgcaaatttctaacgttttggctgcagagcagaccgacttctatcatggacatctcaaactctcattaaggtgcctgaaataggagaagagtaactttactcaagtagtcaaacatattcaagaacaaaaaaaccaaaatagcatacggctagaaactcagaaaaccatactatttaaggaacattttcggtatacaaaccaataaaactctttactctagcagggacagatcatccaggacaaatatctgactgtgcatactttccaacatgaaactagctaaaatgactactttctagtctcttcaagtttaaactaacaggaatcgctgaaactaaaatcgatcaacttcaccaaactattagcaaacccatcgtaactttgagagagtgtaaatcaacagatcaaaacatagaactaaatccaaaattcaatcaagtccgtgaaacaattccaaacctcaaaaaggaaacaaataagcgtcatttcgaaccaaaaactgagctaaaaacctctacccaaccaaaaaacaaaagccgatcaagccatcaaaaccactgaaactctagaaaatgcaagatctgagtatcattacccgaaattcaggtggaaacacatcggatccagagattttcgataataatgatcaaaattcaaaaacagcatacacctaaaaggaagacgagtaagcaaagaaggagagaagtagagaaaaaggtttataccaggaaaggcggcaccagagactgtgaagcgtcctcggtttgacgatcgatgagtaggagaagaagccaagtccttccttaaaatctctcttctaattttgacaattcgaaaaacaaaactatattctcgagaaaataactattatgcctaccaataaaataattgctatctacttacagttattaaattctgaaaagcatattaatatcatataaaacat

SEQ ID NO: 28666 - DNA, 2216 bp, Arabidopsis thaliana landsberg
ttttaaattactcattaatctcaaatcctattaaaacaaaaaaatggaactttcacataaagatttcacttttcaattccaaaaccataaaaggaagtggagaaacagaaaccctgtttactttacttgttgtcaagaagagaaagcatacctctgatcgaattgggttctctcattgacactagtttgtaattgcgactgtaatatgaagggtggaatcgaagcctgaaacagatgagagaagaggcaggaggtttataccagtacacaaaagggcgtcaaaggtttaagtaaacaaactgttctaaaaggaactgctcatgtgccgaacttccaggttttagaaagtaaacttgaaacagatgccaggaaattcataccataaagagtcttcgtttgttcaataaaccgtttccgctgcaataaaaccagaagaagcattgtgaccaattaaagcaaagagacatggatctaaatgagactctaacaaagctgctaaaggaaaaaacaaaggtcatcagacacggaatagccaaatgcagcataataagaatcatgtatgcccaacttacataagtgagaaaactacaagacggaaattactacacaatcaatcacaggtacatagtggctactggataaccagtggaaccagtctgtaaaatgatttcagactactagactgcatggtttaagtataaaatctgaacctaactacaattttcacgcaaattccaactgtttattgaactctatcctagtcatgtatcgcgaacacccaaaacccccagcagtttatttcgatatactgactcgattgtaaactgagctaatcgtctctcaaattcatcatcctcgtctacaaatcccaataagaagcagccaattcgaacgagaaaaaataaaaaaatcaacgaggtttatgcaatcaaaatcgaggactcacagttcgataacggagatccatttaagagtggcgtaaacagactctggatcatcgggtcggtgcaactctttgacgcatctcacgacacgcgcgaaggactctttctccttcttcgtctcctccgctacaggcggcggtaaccattcattgtacagatgcatcgcttcttctcagtctccgtctttcgtcgtcttcaattttatgcagattgatgtagtctctcctctctcagacgctgaatttataagctgcgtttgctttttcagtttattttctcttgttttctttccaagcaagaaaaatcatatccgaggaaaaggacaatgaacataccatagaaatgaaaacaacttgaggaaaaaaaaattattgtattgactttaccgttgactggctaccggcaacgggagcggcaggtacaccacttaccgaaaccgactaaataggatttcaaattagccccttaagttttacttataatacaatttacccttaaacatttgacttgtgctatattgtttagatggaacgcatactgtccacaagtaattccggccaataaattgtgaatttaagtctgaccgtacggtggagacacatacgcaaagatggatatttttgttgtcaacaggtggaaatttaagcagctattatttgttcatcgaattaacttacgtacgtatatgatgacgacattaacattgcagtttattctgtgttaggtcggggtttgtgataggaccaacgttctaatgagtgattaaaaattactaaatcatagataaactatcactaaactaattgctaactgaggtttagcagaaattcaatgaattaaaaataattattttggttttaacaatcaaaaatgtcgttgtagtatagtggtaagtattcccgcctgtcacgcgggtgacccgggttcgatccccggcaacggcgatttatttttgttattttcggtttcgtccctcaattttgtggtcttttaaatctagtcccttcagttttctttctcctttttaccttttttggtcgacaccgacagaacaaaatccatttggggataaactataaaccctaattccccagaagaaaagatgaaagctgtagcttttcccgctaaaatcgcaaatcttagcttcccttctaactgttgctcactattcttccgatcaccggcgacgtttttatcgccggcattgccttgtcggaagctgacgaaaggaataagaggtgtcgaaggcttgatgtctcactgattatcatc

SEQ ID NO: 28667 - DNA, 741 bp, Arabidopsis thaliana landsberg
tgaatgtattgatatgtggttaaaatctcattccacttgtactctatatagatatctcgataagcctctcgccgggaatgaatcaacggcggcggcaagggagagggaagtagtgattgcggttaaatctgatccggttttggtaattgaaccgagttctagctctggattgacggatgaaccacatggatctggatcttctcagatgctgagggaagattccgggagaaaaccggcggcgattgaggttccgaggaggacttttagcgagtttgaagatgagttgactcggagagactcgccggcgagtcagtcgtttaggtctccgatgagtcggatgttatctttcactcggatgttgagtagagatagaagatgcgcttcgtctcctatcgccggagctccgccgctatcgccgacgttaagctgccggatacagatgaccgagtcagatatcgaacggggaggagaagagagtaggtgacttgtcacgtgttggtgtctgattggtttaatgttaaccgggagtaaaaaaaggaattactacaagtcaacaggcttttgtctaggtgttgatttcggcgcccaaggacacgtggcgtaaactgagcttccaggaatcaatattcaccgtctattatgattagataggttagatagatttgtgtaacgatgtacaaagtcatctacaatattgaatctgtttccatttattttaccatattctttttttttataatt

SEQ ID NO: 28668 - DNA, 2870 bp, Arabidopsis thaliana landsberg
  unsure (1)..(2870): unsure at all n locations
caatcatgtttggggcagaattaaaattgtacaactataagaattaattgacacacgacaaaatacactacatgcagtgatgcagatcttttttttgtttaaataaaaatgttacatcatatctcctgtcatgtgttcctaacacacacacaaaaaaaagaaatatctgaaaattaaacttaaatttgaaaagaaaacaaaaacaataaaccacacgtgtggtttacaattacaagctcgaagaggctttgaaacatggaagcacgaaggttactgacaaagacatgacaagctctcccaaagacatgacaagctctccttcttcacctctgctaacttattttttgtttttaaagattgattagttttggtttttgtcaggtagaatcgtgcagaagcgtatttcccgctaattgttcctcatcagactcactttccagtctatacgaccaattaatttagccccaattgactaaattttttatacttaaaaataataaatattcactctgaccaacttgcgaccgaagaaatcaagaaaagcaaattaagatagtttaccaaacataattatttatatttttaagaaatcggatgtcgtcaacaataaatttctgaaggagacaattgctcctaacatgatcgttcaatgattcagaacacaacacaacaaagaagcagataacatatattatatatatggaagctagagagtatatataatgttgtatgactgatataagaaaatatataatgtgtatgtaaagtggtttatgattcacaagttagttttctacttattaacagcttcttcaagctctcttaagccaccaaccttctgttcaatttcttcgataagttcttcacgccatacgtccgctcttgctttctcttctatgtcttcttgctgcatcatataacccaaaacacaataacaactctatccaatcttataatagttgtacacattgtgaatctgtgatgatataccaaaggtcaatggcccgagcaagcccagcccgacccaacttaggatcaatgttacctaccatcagatctgttaacgtttgaattattatatcaagcccaacccggctcaaacttactaagcatgattgatctatcaataggatggatcaatgttacctaccatctatcagattgtgactttcgtttagatgatcaaggttgtggattcatatttttgggtgcatatataccaacggtaaacgctaacctaaaagccacctatttttctttgtttagggaggtttatcgcatgctgagacacatggaggagtactcaaaaccggctctgaacaggtctacatggcctactaagaccaaggtgggatagtctgaggtcaaactagatctgaactggtccacagggtctagtaagaccacagcgggttggtcggtccattgcaacatccctagttataatttgtatgcatttntaagtttttttctttctttcctaatagtactagaaagggacagatacatacagtttcatagacccaatatccagttccatcccctccatctccacggtactcctctgagtcatagaatggttcctgtattgatccaatatcacaaagtactattaagatcccaatgcagcaaatgtatcaaaagattcagtttgagttgttgttttcatacttttgctgaaccgaagtacaaacatccccaacaagtgaacatgatgtagaacatatctgccatatcaagatcaatatcaaaacataagaacaagaagaaaaaaaagtctaagaaagaaaataaaatctctcaagaaaccccaagtgtttaacttacaaacattcttgatagctttatcacttagatgccacacgtgtttctctgtaatgatatcacgcattccttctatttgttgaaccatcacagccattaatggcaaatcatgtggcaatgcctttcttacacataagcttcctctcatcaaattcctttccctcttctcattaacattcttctaatttttcaaattctaagacgtaaattcacaagaatatggagatttttttttctaatcttagtcttagttagagaaaattacttacagatagccaatatccatgatttggtcctgaattctgcttaggctacaacacaagacacaattcttaaatgtgttttgaaattaaatgtctttggtaagaatattaaataattaataatatgtaccgagtgactgcaggaacaaggtatatgaagatttgtgaaggtgaaacttgtgaaagcttcagccattgttacttcttgatggtggcaatggagaagagaaataatcaatgttgttgtaatcttttttttttcatttattttaatctttaagattagattttttcaggcagaaaatgtgtggataagggaattggtatcgtccactcttcagtcttgtgataaacaaaaaaaaataacgtacgttagcaatcacatcgcataacactttttttgtcttttaaaagcccaatttagacaatcacagtacacattttagccttctaaaacgctcaggttgggaacaactatttgccttaaagagtggtaagatatttccagcaaaattcaactacaaactttcttattttacccgtccaacaaactttccattcgcgcaggttagcaatcactaaacacgttcactctgctagacgtgcaagttagtaaccacgccaaaattgctaataaatctttggttggtgaaattcaaactttccgcttatgtctcttcccaaatacatcatttgttgaatagcgtacgttggcaactattgccaacactttaatgatatttccatctaattcaacttcctatgcgcgcatgttagcaatca

SEQ ID NO: 28669 - DNA, 285 bp, Arabidopsis thaliana landsberg
aagaccactggtaagactgtctcttactagttctctcatctctctttcgctttatctaccatttgatgacattttgctctttccttttctaggacggaacttactgttggctcagattgagcaactctgtgccaatactggccagattctttcatctgagctaatccattctgttctttcgtttctccgcaaatctgaggatctttccatgcatttggattccttcttacagtttttgtcttctgctcaacctagagatgacttctcttttgctctaacacctat

SEQ ID NO: 28670 - DNA, 1871 bp, Arabidopsis thaliana landsberg
attttccttgtttggctaatgcgtcttggttggctaccaaacaatgagctgttttatatttgttaatctgatcgtatctgctttctattccacttttggcttggatttattgtcagctttgtttgagtgttgttgaaagctgaaagcttacaccttctatcgtttagaatttgtgcaagtagtttatgtgagcggagacttttaatttctgggtagtcttatcttatgaacaaaaaagtgtcttgtgaattgggtgcttggtgaagatttacttggagcgaaaaggtgggagctttaccggctacatcctgctaaagctgtgttcctttcttctttgcatttgttttctttcatagatgagtctgttgtcgtcgatacagtaaacctgctacaaaattatatacttcatatcaaaatggtgttctttctcgtagtatgtcagcattgttggcatttggtaccaaagttaagatttgcttatgtggtgaatggttagttgtttgtattttgaaccatcaattcaaagcatctccttgagtgtgggtgtagtgatctcggattggttctcttttaaggtgattttagaatgcaatgtgataaaagtaatgcttctgcaggtaattgatcttcttatattcaaaggaatggaagagctgactgacattgtggatcacgcaaagcagcgtcaccacatcatcggtcaatatgtggtgggtgaagggctcgtgcagaatactggaaacaaggatcaaggaaagactgattttctcaagaatttctacaccagcaactacttttgaactggtgatgtttacttttcgagtttcacataagctgtactgtttatgctgcttcagttcttgctcaagtttgcatatgtcttgccagtattgtattctcgacatttggaagaagtcttcttcctggaaataattagatcttttcatttgtatgagtattttctctgactcaggttggttatacatagtattagccaaacctctgtaagctttatgtgtgacagtgtttactgggcaatcttgctatgatttcaagatacacaatctgctctcttttttgaactctcaatataaattgatttggtctgctggagtttatgatcatacaatccaagttcctgaaaggatcccatcttctgtcatgttggtaattgcgaccttacactgatcacctatccgctttgaatattcaaagacctataaacattcactctataaaactatgcaacctgatggctaaaaattacaacacacacaacactcgagtcttgcggacctcaggaaaccaatttcaaaacctgcagtcttctttcccaaaatattgcttttggtaagaatctgagaatgccttgctttgtgatcgatctcttggaaggagtatccctgccgatctgagtcataagattatgtatagggctgactgctgagtagagcactattcttctgtttcactctcttggccgggcaagccacaaggaactaagagcacgtaatcgagatgaataatcgtgtatagcaagaagagcacgagctgactgacgtgttgttaatactcgaagcatttgttgtagtgtttgcagcctcaagttatcagcctgccaccaagaaatgccctatgaactccataacagacggattcatatataaaataaaatatttatctctttgtgacgatgaaaagatatggtatatctcgataacatccacatttctaaagtacctggcgtatgaatccttcgagggtgcctaactgccccattgccatggccatctgacccatgtagctcgcgacattatccgatgaactggaaccaagagttccactggataaagtatcagctagggattgct

SEQ ID NO: 28671 - DNA, 1681 bp, Arabidopsis thaliana landsberg
aagagatgggaacggatcttacggagttcggttttaaaatcagagttggatcgtcgtgtttctgaaacagtatcttcagtcctccggggaaaataactgcaaaagagacaaaagcgattcatcactagctcgaactaagaaaccttaaagatcaagagaaaggatctgctatttcagtggagtttacctgaatgattgttcgagcagagcatgatcctgactgactcatgagtaggagtgaaggaagaaagagagaaacttgaccgagagatggtgacgacggtgatgtctctctctcattatcttttctatgagcagaagaatagttgaaatttgtaaagagaaggaagaaatgtgttgttggtaatgagattgatagcgtttaagggagtatttataggaatcttcaccaacggctatcttcttacgaaaagcttcaccaacggctataacaagttacaacgttcgactggcttctcattgatttgacaaaattagcgcggtgcattagtattactgatttgtaattttgtaaaccaagccaagaaaagagcagtcctatgtgatgggccaattagcccaaaaacgccacatagcgaaggcccaatggaccttaaatctggtatcggattgaattctaagaaagaaggagaagcggcaataaggagttcgaatctcaaacaaatttctgggttttttctttcctccaaaatttttaaacaatttctgtgtctgtggatttctacttggacggcgatggcgagaattggggctaaacccagaaattgaggatttgaattctgctgctgcggcgtctctgtggtggtttggtttctcgtttctgaaaatctacggtgtagtaagtcggagatgcagttgagatttagcaatggacagggaggataaccttccggttcaaccggataaacctccgaagagtctggttcgtcccattttaaacctggaaacaacttcgtcttcttcatcctcttcctcctcctcaccggaacttctacggcatttgcaagccgctttcaaacgccatcgcccactcagtcagtactttctctttctgggtcgaaatctcttatttctggaagtttaatttcactaatttaggtttctttggggtttatctcttttgacgatttagggctttttttgggaaagttaagttcttcttagaatggtttacaatcgctaggtttctctgatggtttgtggtgtgggtgatatgataagctagttaaaccttttgattatggagacgaactcaccattttagagaatgtccactgtttcttattttagttgtttttttggtatattgaactctttgcaatggatgatctctcatagagttcttttttttgttttcaggtaaaatgcagacgaccagtatcgggcctcgacgaagtgttgctccacaaagacaagcttcaagaaatacacgattggttacagctgaagggcagagatctcaggatgttgttacgctgagtcagagtcttgctgccaatactttgacacaggatactactaacaacttagccatcacttctgttgctggagaatctgcgtccattacgcaacctacagtttcagagcatttcaatccatcagatagacaaatggattttggaaaatctgctgttactagtctagaaagcaatctggatgt

SEQ ID NO: 28672 - DNA, 1953 bp, Arabidopsis thaliana landsberg
  unsure (1)..(1953): unsure at all n locations
gtttatgcaagtacattatctcattgaagttttggcataaatagaaagccaaaataaataatgaaagacatttatatatatatatacatatatatcattatcagcaaatatttgtaaggaaacaaagacaatttttaatgcatgtgaaagtacgagtgttaatttaattttaagcagctgagacataattttgatatatcccaagtttagttgatataatcaaattcataaagcccaagttcaaaaagaagagaatgtccacagtctagttaggcggcttggttcgttttgaagaattctttaaaataatcatctccatgacaaaccgatgaaaatgactttatgtttcagataacgtaaaattatcaagttgatgctaatttcacttgtttgattaattagcccctggaaagattaacggtctattactagatagtttctctgaaatcaatatcatcattagatttatttatttatttcatgagtactactacctctaataataaaattatgaaagtataataaaacttacggaaatttcttttatgttaagttgttaacatgttggaaacggtaaacaacctaatgatgtgttttagactattagtacgtttttaaaaaatggtatagagtaacattgatacaaaaaacacatagggtatgacactatgactaatatactagataaatccctttgctaaacatgaaaagtagtatacaaaaccttaatcttagagaatagagaattgttttagctattttatgtttaaataagaaatatctggtatttaatatgtctgaaattagtcggagttttcttgcgtatagaaaaacagtagtggaactttccaaaacacattaagacagaaaaaataatatgaaaagtgtgcattaaatacaatccaacccgcactatgataaaacttgtaagcataattcttctttgcggataaggaaacaaacagaagaattacaaaaacttatgtataatcccaaaacgttaaaaacatactacaatttcttattaaaaaattcttaaagacgtgcataaaattctcgtaaactgacattatcaaaaccaatgtttattatttcaagttaatttccttttgaaagaaacgagaaattttttgacattggttttgttggggtgaaatttgaattatttgtaaatacaggggccttaatagaaaacgttgaaagaaagggacaaaatctggaaaagggaataaaaagcacagaaaacaaataaaaagggccaaactccaaactccaaaggcacaccaccattgaattgaacttccctcacacgcaagtaccacaccttctctctctctctctctatcatctcttttctttttctctcatcgccttgaagctctgagaagtagagagaagctccgatctgataggaactgtgagtttccttgagtcnnnnnnnnnnnnnnnnnnnnnnnnnnnnnnnnnnnnnntagtctcgaaatcaaaacgatgttttgcgattgcttctactggaataaaggcttctccgagttggaatcggaatcgtccgagtcaaagcccttctcgcttccatctcctcttcctcaatggccacaaggtacagtagtaccatcatcttttcttggaaattgcaattatttacaaatcaacttgcagatttttttgttgtcaaacagttatctatttttatttctaattttggatattttcatgatttctatacattacattaaagatcaaattgatgttttaatgtttccatatcatcatgaattgatattcaatgttatggataataattttactttttgagttttccttttctgaataaaattcgttggaatattcaacattggcacctgttgttgtctggtttactagttctttgttttgacatttgttttcatgatttttggtctgggtcaaagttttggactaacacattttaat

SEQ ID NO: 28673 - DNA, 1735 bp, Arabidopsis thaliana landsberg
taagcagggcgggaatgatctaaagaattcgtttgaagggtgatctgcacacaccacaaacttttccatggctagtgcttctgcggttgctgtgcatagaacatcgctgatgctggggtttatgaacactttgtaccttcatcaagatgtgggaaagacaatcaaagagcgaaaccttaacaagtttttaaaagcaaagccacatttttcagaacttacttgtgaagagcatcgtcagcgtggtcccttcctttgaggaaattgagattcaagtcatgtttctttgctgcacgttggacctcgactgcatcttcaccgttcccatatacatctagattgaagctcccaagttcgcttttgtgtttagccatcagatctattagttctctgtatcctttagcccacaccatttttcctaagaagtatgcaccttttgagaaagcttgttcaccacgggatctctcttcagcaattttctccccaatcataaggaacttgggattgacaccatggacattgcatacaacagactttggtaaatcttgtgttgccgcagagaggcgaagaacctttcatgagtagaaaatatgtattagctcgtgtactatttattagtaaagaggattcaagcaacagaacaaggcttgaagaaatagagtagatgattcaccttgtcacaatacgctcgtgtgacccaattgtttacatggttcacaaaaaatgcttgaagagctccattcttctccctcttgatgtactctaagtagtttgtgtggacaattccaacaacatggttgaatttatcagtccaacgcttgccgtgataataccagttgagatgttcaggttcttcaagtatagcaatgtcagcatcttttgacgatataaattgagaagtgtcaccagcaggaaatatgctgcgcctttcttttgaaaactataagaaaccagaaagctcagttactctatagaaataattgaaaaacatattggcagccatagaaataaaaaaatagaatccaaaatgatcaacatacctttcctgggtaaaaggagattttaaaatcagccttgaaaccaatcctttcctccaaccatttacgtatataactctcttgttcttcaggtgagctgaaggtgagattgtttggatacactagttcttgatcagattcgcagagccaaggaaccacgagagtaacactctgttttgcagcttttgccaaatacgccgctctgaatagcggatttacagctgttccggtcatccaaggaagactagctgttgtaacaattgccacatgccttttgttttccggtgtctcaggcttcacaaaatcagtccaaaacccaccatcataatggtgtcctgtgctttgaagaacactggctatcctcatatccaaatcaactccatggttatcattttcaattaaatcgcatgcttgtgcagatggcagacgccaaagttgttggctcttgcatttgcaaaggctttctactattcggtcacatgtatctgaaagaaaattcagcagaacagaatcaggaactttgtatgtaaacactgaaactataagataatgtacaagaaagggtgtttaaaaccaataacctacacatctagaaatttttatgtctacggcagatgtcatttgattgatatgtctcatacagaatctagacttacacatatttgatatccaggattagtgtgataatgcagaacatcaaa

SEQ ID NO: 28674 - DNA, 1564 bp, Arabidopsis thaliana landsberg
agcgacacatttaaaaattcatcttcaatagaaggtgcatatatacactgggaccctttctactatgacaccagactattatcctggcacataatctaggatttttgtcccgctcggggggtatgattaagtagtatgatcaacgttacaagtggagattctacacatttatataaagaaattaattacccttgccaagtaatacctataggacgtcgtgaatgatgtaatcctttgaatatctgtaaaatggcataactattattaaccctggtttaagacacttgcctaggtactcacctgtgtgctactcgatcgaacattatttaggcttccatcctcaacatcccatgattcttgctgacagaacgaaacgaaaactaggataacttgacaaaccttggaacaaaataatctcgtgaagcgaaaaatattatattacctgaacaattttctccaggtcatccataagtgttttctcttccaactcaatatatggagttaaatgaggttcaaagcaggaagagatcattccacggaagttaaactgcgaattcgagtatctagtgagtaaataaatcttgtaaagatagaatggcacaagtggatcacatgtcatttcagttttccaggtatgtagtaaggtcaagtagacccgaaaatgaagatgacatgcaagatattattcccgtcttctataaatgcaaaattgtgcctacaatctattaagagtaaagaacctttcacttgctctctaaggtatttcagaattacaatagatatgacatcagccaacaaaatcagggagagaacgagactagaggtagggaatataccccagctccagtaacagataaatctttgtttccggtcttttcctgttgaaaaccctatcacaataaagtgtaagcgttaatataaattttgtagagtgttttttccataatatagaataagaacatagaatatacattctcctcggtttcttgactagcagcaaacttcttttcatatttcttgcggattttggatatattctgactattatcttcccatgtaccaatttcttcaatgtcatcttcaatatctttagtaggaacaccaccaccaaatttcttttcaagttctttttcaaactccactgtactttgtagtgcctaacaattcaatgacatcaaactttaacagaggcctgaaacattccacaatatattcaacgtaacatgatttgatgatagtgaaaagaaggaacaggataagataatttaaaatcattagatatttccttcagaggctaatgaaattttctgttaggaaaagcaggcatatgcaattattgatcaaagagagtattcctgaccagaagcaatatcgctacaactggcttttctttcatgttgaccagaataaattctacttgctttctgaaaaattgatgggaaaacaggatagttagttaagaaggctgcatatctttgttaaattaagattgacacagttacccactgcgacttagtcttttacagcaaaactacatactcacaaaagattcacaccaaaaaag

SEQ ID NO: 28675 - DNA, 572 bp, Arabidopsis thaliana landsberg
aataaacgaacaggccctaaataaactactttattaatattatttaacaattatatattaaataataataactatatattttatttcaaattttaaaataacaaattcattttaatataataacaaatagattttataaaattaaagtatttgataatagtttttgattatgttatactttgttttaatgattaaattctataattgaataacttttttatgatgaaactatttaaaggatttaacaatatgtatgttaagaaattaaatttatatttaaatcaatttgtgtattaatggtttataaatatttgttattgtttatttattacacaaaaagtaattaattattaatatatatatattccataatccgcaccgcaactagtttttttcaccaatcaaacattattctgtaccgcttatttgatatacacttatcccgcaaattttttttttcccgcacgtaccacagttgaaccgtaccgcactgtaataacgatttctccgcacggtatgacaatgcggtacggttcagctgcggtacgtgctggaaagcggtatgatagtgc

SEQ ID NO: 28676 - DNA, 1222 bp, Arabidopsis thaliana landsberg
ctcacagacatagtcatttgatagttgtaataatcatctcatatgtaagtaaattagtcttttatatataatctgcttcagacatcattataatcaaactactcagattttgttcactcctaaagcttattagcataactataactgaacatataaatctggtcaatgctaaaactcaaaacatggctcactcctgtctggcaggtactagaggaattccgaacatcatcattgggtgaatgttatctttaaagccaagcggctgtggaatagcacattccttgactagtcttagctggttccagcgagtgaggagcagcgagaagagtctctaggttcaggtcttgctctaaggtctcattgatccttgtatgagttggaggtggaacctgtggtaatcgcatagggtttaagcctaaaccattcataacggctaaagtctgcatcatgcagtaaatcaagttaatgatctgagtgatgtaatttacaaatcagactttgaacgtatataatcatagtaagtaggaaaaaaacctggacttgaagttgaagctgcttcagatattctatagcttcatcaagcattgaggctttatcagtctataaacaaacaaaagataacggatcaatcagaacaatgtttctcactatctctgattcgaacaaagattgattaaccttgttggaattgggaatgagtttctgcaaagctttcattttctcgttgatcttgctcctcctcttctgctaacactcagattctaatcaactacaatctcaaggttcttcttctttctaaattaagaatcttaaaaggaagataaaagagaaaaccttttcagacaagttgtggaattgagcatcaatgtttctcttcaacgaatttctctgtttagctccacttctctttagtgtttagccattccaaaaagaaaagagactaattttggtttttgttttcttttacaaggaaagccaagtgaagcatctctgcagctaagaatagttaagtttataccttgtgttcgaaagcatatttgtcttggccagtttcagagactccataaccgacggaagaaacagctccgccggaaacggaagggaagaaggtctcagcggaggaaacattagtactcttcggtggtgaagaaggttgagctgtaggagtacgggaaagaatctgtcggagaaagctcgagagttcgtcggaagaagatggagg

SEQ ID NO: 28677 - DNA, 2192 bp, Arabidopsis thaliana landsberg
gcattgaatgagttttaaaaaggtttttctttttgaaaaaaatgaagtcaaacaaaaaaagctaatattagaaagatgtgtttcgagtcaatagcagaacatatctcatacgtgatgacatgtaagaaggataaaagcgtagagaagaacaagtcatttttttttttttttaatttggttttgaataaaaatgatgcattacaatattaaatcttttattattaaaaatcgtttgttataatcatgagagggactcactcgcactttcgcagcaaaaataaaaagatatgcttagagcggtttggacacgaccgaacgggacgcagaaacaaaaagaaaagaagatatttttcttgtttctaataaggtgccgatgtcagtgggctttaatgggcttaactaaagagaagccccaggcccatttaccatggtcttccccaaacaaaaaccgcctccctgcaacggttaacccctgattgaaccctctctctctctgtctgtttcttcgacgatctctttcgcaccgctcaatcatcctcccgattccgtaagtttcggttttgaatcgtttcttctcctctgccactatcgtcttcttctcggttttctatatcgttttagtttctttcaccgtcgtttcttttctctcccacgctcatccaattttcttcccctaaagaaccggaatttaggtcagttatcatcctcgaagctttctttctttcttttggttctaattatatatagacgaactagtaaagtttcgtttttgcagtgtctgtgtgtgatggagtccagtagagtagtagtgggtggtgggctgcccttggcgaataggaggaactctagctttgccaaacccaaaatccaacaagggacttttctacctctatctcggatcaatgatgtctctgccccccaaaaatgctcccttcacaccaatccaaaccccatgttcccttttgttactcgccgcaagagccagactaaccctgattgcggtgtcgtcaagttgggggaagaagatgactcttcctcttcactggacaaactcccgtaaggctattgaggtgctgcgttatccctttgttactcttagggccatgttgcttttgcgttttcttgcctatgtaatgctttggtctccgttcttgctagggaggttaatggggttcacactggtgtagcacgtcctgtcgatatcaaacgagaactcgtgatgctctctcttccagccattgctggccaagctattgatcctttgacgctgctaatggagactgcatacatcggaaggctcggtattttcctttgcttctctagagttatttcaccatggaagatgttgttttgagagttctaaggactccccttctttccaatatgcaggatctgtagagttgggttcagctggcgtttccatggccattttcaataccatatcaaagctcttcaacattccgctcctcagcgttgccacttctttcgtcgctgaagatattgcaaagattgccgctcaagatttagcctcaggtatacgttgataatagcttttttctcttcccaatttttcccagccttatatctctttgaatggatttacagaagatagtcagagtgacataccttctcaaggtttaccagaaaggaaacagttatcttcagtgtcaacagcgctagtgttagccattggaattggcatcttcgaggcactggcattgtctttggcatctggaccctttctaaggttaatgggtatacaatctgtaagttcggtccagagagtgcttattgtcttctatgtcttacgaaatttcgtgagaaatctatgctgaggaatgcatgttttctgtctttttttttacctgaaacccagatgtcagaaatgttcatccctgcgcggcagtttcttgtccttagggcgcttggtgctcctgcttatgtggtttccttagcacttcaaggcatttttcgtggattcaaggatacaaaaactccagtctactgtttaggttagcattctttgagatcttgttacatatccaagaacattatattatctttattgttctcggtttgcatcagttctttcgttccctaatttccataattcaggtattggtaattttctggaagtaaatctagagcctctgtttatatacaaattcaggatgggtgtagccggggcagca

SEQ ID NO: 28678 - DNA, 789 bp, Arabidopsis thaliana landsberg
tcagctgcttgtccttcctttagaatctactactacgacggagccgccggtgccgtcccttttgattgggaatctcatccaggcacacccaaacacccctcctctgagctacctactctgccacctctcactcctccgccgtctcatttctctttctccggcgaccaaatccgccgccgttccaaaaagtccaccaagaaaatcctcgcactaatcccgacaaggctcttctggctatcgggcgatcacaatggtaaggctaagaaactgtcggcttcatcaccaccatctctgtcggagagagtgttgatcgacgaaaatgagtacgatctgttcaagtttcaaacagaaaggaatgtcatgcgaagattttcatccttcgactcttctgctgactacccaattcagagatcacaatccacttcctgcttcggaatccgcagatgtttcctctgctaattccgctgcaaaatttggaaaataaaacgttgaaattttataaaatgtttttcatatattagtttattttgtgttccatcgtcttattattataatatttaatcagtttgtgtcggtaatgcaactccgaatcatataatacgtttacctttttgttaaataagagcaatgaacagttacaagagttacgtaaattgatcagaagattattatagtaactgtcgcattcactttggtttaaagtgcatgactaaaacttcgataatttaagtatagctttctggcaagcgtgtctttttgtatatggatggttccgtgtaaaaatgtaac

SEQ ID NO: 28679 - DNA, 1135 bp, Arabidopsis thaliana landsberg
gagatatcttggtatgattaatacatggattcatggcagttgtgttaaagaacattttaacctctttaatgacattgacacctattatggtccaacaattttggtagaaactgacgtgagactatcgaatcctggtacttttctggagcctatattgccgaagaatttgtacatctatgtacttaaatgatattagaccgtcgggtcctactgataacatgtaatattaactgagatagatgcctatgaacaaatagttctccagccataagacagagagtatgattttatatttttcaaagattagatttctgaaaatatctctctttaaagactttggcaaaaagagaatctcgaaacgttatcaaacgccataactgtttcgatagtatagctgaattaaaatcatctatactccgaaaacctaaaccacctttcaatttgctaatacacaatttattccaagccatctagtgcatacctctaaattcaccattcgaattccacgaaagtcacatatagaatttgatattattatataccaaaaatatgttcataatacatgctaataattgctaaactatgtaattagctcaaaaaaatctctatttcaaactaactacctaagtagtacggttcatgatctggttagttgtagttaattaagcacttatttctatttatgtttatatcaaccgtaattaagcacttatagttacagttgtagttaatttttaaaaaacataataacttatcgaggggtaaaattgtaaaacgaccaaaaaacaaaccctaccctaatcttcttcttcctgcgccgtatcccataaaaaacacagaagaaagaaaaaaaattcgaacttttctgaaccaaatcattccaagcctttgccgcttaatcctcgcaatccgatttctagggtttagaaattagattttgggtttggatctcttaatcatgtcgaggcagaataaagatgaaaaatttgtttttgatgacggagaagacgaagacagagaagatccagtagccattacagaagtcgacaacggcgaagaagaagatgatgatgaagctaatgaagatctaagcttgaagattttagagaaagcattatcgaggcgtgatgttggg

SEQ ID NO: 28680 - DNA, 1052 bp, Arabidopsis thaliana landsberg
  unsure (1)..(1052): unsure at all n locations
acaaaaacatgactcccccaccaagttccttcatttaaagtatttttccccacctttaactacacggggcattgggtcacagtataataaactttaattattgctagacacactcattataaaataaccaacaaaggtaaatctcattcatcctaataaaatattgattacatgcttatatagttatcagttattactactagtatcaaccacagtctagaagcttattgcgagacactcattttaaagtaagtacctaacaaagttcaatttcattcatccgatacattagtaataaaacatatgacccaagcttaccggccgattgttaatatgaaacgacaagtctagaagcttattgcgagcgataattaacaaagttagttttcatccatccagttaccaatcaaatattaatatgtgcttactactataagccacaatttacaagccatatatttttcttccaatgtttactgtcaaaatacaatctcttttccgttgatattgtaaatgatgaaaacaatggactaccaccgtttgttaaacactaaaaaatggagtgtgttacgcacaaaatcgttttttttttttgtagggttcgtagtcttctagaagtcctatccatgaccgtggccacaccgccacgtcctccacagacacttttttaattggtctattttctctacacattcattattaaatactactacgtaataaataattcagcagataaagacaacaaaatgcttctagaatggcgttgatatttattagtcgacgagtttacttttccctgtctgattatcatgtgacggtacattgttttctgctctctcaattctcagccgttgatctaatggcaacgattccttctagaagcactttatttatttatcaatgaatcgaatatattctttgcaagcaagtattgtactagtagtatagattagtggagatgacattattaaaacatcgggataaaagtaccaccatataaacactgttaacagatntaaataattggttagaggtgactattcanaatatgc

SEQ ID NO: 28681 - DNA, 1357 bp, Arabidopsis thaliana landsberg
accttggagtaaaaaaatgtccaaatgcatagtaatatatgactgatgcggtgggatcacactatagaatcgtccgtcccaataaatggtgtttgttcccaatcgcaagacccataattattgtcttcgaaactgagcaagccaggttaattattcgtattgtaagagaaattgagattcttgtatgatttatgagatcttgcatcttatttttggggtacccaaattactggttcagaacaacatacatttgtttgtcttattactgtcacgaatgtcaatgcagcttcttcttctttttttataacaatttgggttttacatttgattcttcgatctacaaatagaattcaaaagacgtgtatgtttgataaattggaaaattcggaaaaccgaagacagcgatcaaacgaaagttaaaaactagtgtataatgtttactgtctcaaccagctttagaagttcttactacttttggcagctcaacagaatcaaggtcaccagggtaaggagtccagagcccaaagccgcctcggctttccttcaaactctctcccttccctttgagttcctgaagactcttgacccactcaatcttcgaggaatgctctcgaatgtgagggtgcagttcgaagagagagttatactcacagttctggaacatgaacaccttgaaggctccttttagtctgtccactacatacccaaagcttagctggtccctcggtgttaacaggtgtacctcattgaaccacaggcagctgaacagattgttcattgcagtgtgctctcttattatcacagctccctctcgaacatctgtggaacgcaagacaagatgcttagtaatcaataaggtgcacgatgacattgatgtttttgctatgttctttaccactaacagtgttcttcttgatgctccatggttccaagccctcgtatcgatatattttcatatgaagatcaaccagaggtcgggcgtatcgctttctcctcttgcacgcatcagcttcctcatatatgtttcggtggtgtttgtgttgggcaatggcaaaagtatgtttcccacgccacaaatacctgaaagtgagatgaaagcgaaatatgcatctattagccttttcttagtaacacggagactgatagtccctgtgctaataaacattgtggagaagtatataatctgctagaataagcaagggcaacaataagctccattttctacgggtcttatatccttatttgtattcatacctttctagaataagcaaggggtcaacaataagctccattttcccatcaatccaaatgctgtactgtgcttcaaggaataacctgtgagttaagattttcggga

SEQ ID NO: 28682 - DNA, 2325 bp, Arabidopsis thaliana landsberg
ataatatcttatctcattgacatgatataaccttacacttttttcttattaataaacaaattttcatttaaatggtggttggttaatcaatcttaaagattcagccgaaaaaaccaatttttaattccctttattatagattcttttttgttgtctcactacaattacatagattttagtttctagtttgtatgaatttggaaaacgctttttctcacaccaatgaattaaacataagtgtaggaaatccattgactaatattaacacaacctttaagaagaaagaattttaaactaaattcacttcttcaaccacaaatggagaaaaaaggtcaataataaacaaatgaattataaaaccccactaggcttctctcagacaaaacacacacacactagtttcctccattgacactatcccactaccttcaaaaatcccaccttttctgttcaatcaaatctctctctcttgatctctcttgaccaatcgagagcaaaaaaaaaaaaaacgtttttgttcaaacatgaagatgaaagattaattgcacatagagactacttttgattactaccgttctcttccaccaaactcgtttctgtctttaattttcttatttttgtttgtgaacattaaagtctcacaaaaaaaaaatcattcctttgcttatttctcactgttcctttgcttcttcttcttcttgcggttgaagtcatttcttcttcttctgccacttcgattgctttaaacttggagattaagattacacatcaaataattcttctttgtcttcctcgtgatcatcgaggaagcttgatctcttctatggaatggagaatttgactctcctccttaggatctgtcttgtttcgtcggttttagttgctgcttcttcctcaggtatgtttatacaattatttgttttcactttttcaataattgggattagattagacccatatggatcaatttggtaaatttgcattcttttttgtgcattatgtttgctaaattctcaactttgtttttgttttaataaactctgctagtgatgaaaaaaggaaactttattattgcaaacacaatgcgattttacaatgtgatttttttttttatgctttcgtgtaaactaaaattttgttataaatggtttaaaactcaggatcggaattgttatctccgttatcatcaccaccgtctccattacccgaaacttcaaaagggtttggtcaagcaccgagtaattcacctgaatctcacaaatccgacaatgtgccaccgtctaaagcttcttctcaaccgtctcttcctcctttagctgatttggcagctccaccaccgtcagattccgtcggaggtaaagcaccggccggtgtgcctgttgtctttgttcctaatgctccaggtatgtaacttggattggattgaaatgttgattctcttcacagacaattgatcgaacacttggcagtcattttgaaccactagaattgtgtactgaattttcgatttttattgggttttgattcgttcttcagctccagctacaatacccgttaaggatttgcccgtacgttcgcctccggttcttcaacccattacaccgattgcttcaccacctcgattcattccaggagatgcaccaaaggagcctcctttctcaggtagagttactccaggtatgtgtatatactaccaattgaaattttgaaactttagcataaatcttgagtctttaacttgcaatgtcgtctaatccgcagccctggtttcgtcacctgtttcggatattcctccaattcgatctgtggctctgcctccgcttacagcgagcaatgtacttcttagaaatgcttctaacaatcgcaagcctccacgtatggaaaagtcaattgctcgtggtatagtaccatgttcagctcacctcttacttcaatcatatgtggtatataaatggcacagactcatttgtggtttttgaatcagatgcatcaccgcccacaatatgtataggcattgctccaccagtagttccacgtcatacataagtttacaccctcgagctcccatgggagctggctgttggatgacattagtcacagtgtcttgaaaatgtgtctctttatcctgtgatatctctctatagccatgcagagcatactttgactgcaactaagggatctcagaccaagaaatccgccaacgacccacccagttgtccccatagaatatctggctgtctcaacaggtttgtttaacgttggaatgtgtgcatccgtaagaagtcctcagccagaatatcttcatctcgtgttcttgtgtagagt

SEQ ID NO: 28683 - DNA, 1753 bp, Arabidopsis thaliana landsberg
tacaataatgaagccaactaatgcagtaataaatgagttaggatctcagttctgacagttttgttttgtattttatttgtataataatggacagacagacaaggcatcgatgctcgatgagatcatagattatgtcaagtttttacaactccaagtcaaggtgaatctctccctctctctcatatatttacagttattattttattaagtttgttttttatacgtacaaggggtaattcttttacagagtgcaatttgttttattttattctcttcaatatagatggaagattcgtttttttgccttttagtttgacatattaaacaaaaagaaaagctgacatattagtacaatctttacataccaatatatcaaatttatgggcctctgcaactaaaattccttatgctccctcctcaaattttatatatacattctggattattatgtcatataaatacatacatgataaataatgtttttaagttataaattagtggaccagtgtacttaatcattctgttttgaatttaattatgcgttttaggtactgagcatgagcagattgggaggtgctgcttccgtttcttctcaaatctccgaggtaactaatatattactatctctacgtactcatttttcataaatttcaataaacatcaaagccaatggacaaaattaagaaattagacaatcacttttctcttataatgttaattagattttacaaaatattattttggtgtgtaaaaatagataaatcgtgcaagacgttgaaaacaaaatgaatgtaaaaagtttccagaaacagaaaacaaataagacaaattttataattctaaaatagagaaatataaaagagagcacgcgtgccgactaatcacttagggtttcgctttctttgtctttttgtttttcaaaatgttttgttttattttgcttaggctggtggatcccacgggaacgcatcctccgccatggtcggcggtagccagacggccggaaactccaacgacagcgttacaatgacggaacatcaagtggccaaactaatggaagaagacatgggctcggccatgcaatatcttcaagggaaaggtctttgtctcatgccaatctctttagccaccgccatctcaaccgccacgtgtcactcccgtaaccctttgatccctggagctgttgccgacgtcggaggtccttcccctcccaatctttctggcatgaccatacagtcgacgagtacaaaaatgggtagcggtaatgggaaattaaacggtaacggcgtgaccgagaggtcgtcttctatcgccgttaaagagaccgtatccgtttcgaaagcgtgataacggccgtttacttttggggttaggcagagagataccaaaaacaaagagaaagtggggtgaagtgggagataaagtcaaagtctacgaagaatgaggttgaggttgtttgatgtgttctctgagcgaagccatatttttcgtagagttttggttcttttacctacgcactacaaaaccactcaagggacacttctttttcttttttaaatatatggttgcaatatgttttatttttattaaataaagttggtatcgttgatctgaatattaggctagaaaaaaaaaacatagtatattggttttcacttagagatggagttataatctcgctctcaaactcaaatattgaatcaagactttagatgtttatggatcgacaagtctaaatattaggatatgagtt

SEQ ID NO: 28684 - DNA, 1125 bp, Arabidopsis thaliana landsberg
  unsure (1)..(1125): unsure at all n locations
agagcaatgaacagtaccaagagttacgtaaattgatcagaagattattatagtaactgtcgcattcactttggtttaaagtgcatgactaaaacttcgataatttaagtatagcttttggcaagtgtgtctttttgtatatggatggttccgtgtaaaaatgtaactgtgagtttnnnnnnnnnnnnnnnnnnnnnnntttagctgtcttccaagcaaaggaaattaatgaatggggtttggtggttggtttcttcttaattgattttttgtcgaatatgattggttttctacaacctcctcacactcgaaatagcagaatcatttggtccatttttaaaagataaaatctacacatctttctttcttctatattacctggtaggttttagagtcaagattttaatttacctttttcttgttagatgtaacaatacgtttgaatactgacataaactaagatttgacactaaagtatgttgagttaataagttaaggaaggtgtcggcggctaccattcgagcgtgttcatcacccgcctgtcgtgcgcgtagaaaactcatttcgctcccacaaattaatgtggaagacccttgctatctatgttacgaggcccatgggcccatgtaattaaaatagtgtaatttgaaattactgatgtgttctcgggaagatcaatatataattagaaagaaggctctgcgccgacggcgtagaagacgatgcgtctcttgtcgtcgccgataaatcgaggcttcttcgactatgttgaactctatccatcgctcgtttcatcttacttcccgccaccagatcgtccttcggctgtgctctccgtcggcgagtaggacgataatgagttcttctcctcactctccgatcccaaagacgcatgtgagtgatcgttttcgcattctctagactattatctttcaacctagtttcgctgattttgaaccatttttactatgccgctgatcgcatgaatttgattggaaaaaaatgctctcatgctttcatagtttatattcaatttccagtggcataccatatcaagtactgttgtttagagattatgaactctccattggctcccagtgattttcctatgatcaaagcataatc

SEQ ID NO: 28685 - DNA, 2172 bp, Arabidopsis thaliana landsberg
catcagcaggagatatgcaattgcaaggttgctacttatgttttaatttcaatatacttcttgaggtttctgagtacgggtcttataatataaaccatggagttgaattataagtctgatacaataattcaataacaggggaggagatccaaatgctgtggataaagacagtaacataccagtcaaatatgcttcacagacagacctcaatgatagcgaactgattgctttattaacagactccaaaagatgataacactgatgaatcgaatttgaccatttcatttgctcatcacaatgaaagcagaatggtatagcactagaagagtgttgtttgactcaactcttttcgcctttttccgccttttagttcgttccatattcttttctttttttggcccatataatcagcaacttgtcaatgaggagcttagagaatacatgtagattttcttgttttgcttgttaggttgatatacttgtttatactctctggtgtacatatggtctttttatgggttgtatgttctgtaagatgaaaacctctgtttgatttcactatgagatacatttttttgttctttttctgtaatgaaagacaaagacaccaattgtgttcttctgttcagagatctatgttttcaggcagaatttttggtttagcccatttaaaagaacttgctttaaatcaccagccagattttgatattgatgaataaataacttaatataagttgatcatcatagtaacattcgtacaccaaatctttttatagataaaaaaatcagtataaaactgtcatctctgttcttcaacaggatttttccgagactaagaaaacagaggaagttgcagaataaattgctcccatgcgtctccttttcatcgtcaacttctgattgtcgtcatcgtaatggaaactgctcccatgtaaatcaatgggatccaacatgtctagctgaaggcaaaccgttctgaagtaaatgaattggtccagaagagtttatgagcagacacaaattgtttcaggaacagcacctccagattcttaatggtaactgaaaaaatatacaatgacatatcagaagattgagactgagtagagatcatcaaaagtgagatgataaagcttgtaaattttgccacaattgcagcccatcagaaatttgccgtaaaccaaactaaaagcagcagactccgtttttagccacaaagaaaaagaaggaagtttatctgctcttagctttccgtctagaaaactatggaactgcatcagcttccactctttggtttgaggaaatgcaactttcattgattaactcaataacagtcgcagaatcaggaatatattggagtcgaaccatgttctccataaccttctcagctacctccatttctcccactttagcaaaaccagagagtagagcccggcatgttgaaatacttagcttacacccatcatcaacagcgttcttagcaaacatttgatccacaagcacaagtgcttttgtcgtcatcccttctttcaggaaagcattgatgataacactatacattatgttgtctggttcaattcctgcagcaatcgcctcatcaaatacaggaaacatttcagctcttctacccattttatcatacccgtttagaagagatgtgtaagttataacagtaggcatcagattagcgttctgcatctggtgaaagagctcctttgcagcttccaagtttccttccttgcatagataatcaatcataatgttgtatgttacgtcattggacaagccaaacctatcaaacgacccatccattagccgatttagcacttctgtttttaaatctgtttttccaaacttaaaaacccaattgatcaaagcattgaaaggggcggtactaaaagcacagcccttcttgtttgtcccaaagatggttatagctctttccacatcgttcaatctgcaacacccatccacgagtgttgtgtacacaaaactatcaggaactaatccctttactttcatctcatcaaataaccgaaaagcctcagctagatccccagatttgcaatatccatctataattgtacagtaggtcactgcatacgggtgaagacctttaactgacatttcatcaagcagttccttagctttttcaatttcaccagatctgcaaaa

SEQ ID NO: 28686 - DNA, 2491 bp, Arabidopsis thaliana landsberg
cctgtaacgcaagaaactcacgccacaatgactacacttgattctttctgctatcttttttttgtctgagtcgaaaaagtttactcgttgaagacaaaaagtgaatcgctttagaaacaaagagagtatagtttacacaagtcagcaagcattgttcacaggcgcaaagattctgtaacagatctatgttcttatccaaggggttttttggttgtcctacctcgatctcacatcaatgctcgagtttcttgttatattcgcgggttcttgaatccccgggatgtaaaacgcggcggtttcttcgcttacacctttcttcttgacagtttcttcgctgctgttgttgttgtcatactccagtgtatggagttgtaaaccgaccttactgtttttgcaaccgccaatttccatttccatatcatatttatctcctcggggtccaaaagttcggtctagctcagatgcaatggatccaacctcctcgtcaggttcctctggagcccagtctctgaagttgatcatgggaggtggaattctggcaaagaacaactcatataggttcttgaagagaccctttccataagggttttctttcttgtcataccgataccggaaattctcataagttgtctgcaaaatagtaacaaaagagtcaaaaatttgcaaagttatagcacaaaacagagcagcaatagtcaaataaaggttaaggatcttgcctgattggtgcagatgaggtagatatgaaaaacagtgagtccactgacaagccagacatcgtcgaagcagtaaaggatgagaacgacaagtcctaagtcgtttgtgatgaccattaacaacatgttgttgtgtacctcaagcatactgacccatgagaagacaaagacgtacaagcagaggagtgttgaagttgatatgaaacagatgaagtatggatagtttcgctgcaaagagctattatgttaatcacagtttttgttgcatgagattcaaaaataaacgttttggaagacttactaaggctatgcattggccaacccatggacaatgatgatcaaacctttgaacacagttgttacagattgaacagtgagaggcgcgaggaggacggtaaagcaaacatgtatcacaaaatttaactttgacagtgtagccattcaccaatatatccttcgttcgaggtatctttgtattaccgagtttgttgtttacccactctgaggattgagtgatcatatcaagcccttctgcttcaggtgcttctttgtttctagggataatcccggggtctctcgatgatgttaagaagagaaatgtaaaatcctgtaaggaagaagcatgaatatgatgcagaaagggcaacgaaatctcagaaagaaagaaacatgtttttagggttttaccaggacagtgagcaaaagtgcacccaacaatataagagagtggaacaaaggatagcgttttccgatcaaaaaaaccattcgtatgcagaaagtgagagcaggacctccaatcatagctgttgtcagaaggagagacgatgcatctggaccaaagactagtctccctccacaataaaatctctgaacgaacaaaacaagtcaagctagttcagacattgcagaacataatctcagctttcaattgttcaaatctaattcaggccatgatgcgtggtttgcaaggcaagttattatgtcacgcattacaaaaacgctttctttttgtctgtaaaattcaaaaacaagagaaaaacttgcattggcaaaagaaaaggcatacattgttgccgggccagagttggtagattctcttgggtttatgatcttgagaaaacattatatcgtcatcggaaggagcattatggacatgacagcttttcttcctccccatcaccaccttctttttcctcaagcctcagactcaacgacgaaacgcccaaagcgtaatctccattgcctggtttgtgcgtcgtcgttgtcgcagccagcgaacgaaaccggagatttcaaatcgctgccgccgggattttggctcgtttcttcctcctcgtcgcaaaatctctatcctctttggctccactcttccctctctctctctctctctctctctctgtcttgctaattaaggtttgtttcaaagaatagtttctctttcttccccttaaagcttttacctccgccattggaagttcgtcaacaccaatatccattctctctggaacatccttaacatagcaaatctcaccatcacagcaattttctaactttttctcctgatttttagcaactttccaaaaaccctaatttcattgcttctcccgcacgcgccattttctgtttcaacaatcaacaaccgaaaccaaggttcaaaatggttttgcactttgtaacgttgcattgaccatgagcttcttttttttttcttttttttttttggtcgggcacaatatttataaactaacaccattagaatttgcatattacatatt

SEQ ID NO: 28687 - DNA, 1930 bp, Arabidopsis thaliana landsberg
  unsure (1)..(1930): unsure at all n locations
ggcggtggcacgtatagcttctaattcaagaagagggtagcaatgaggttggctatttcagaactcgtgtgatcaaaagatccaatatgaggacttacgagatcaaatcgaccaggtcgcattagagcagcatcaattgcatacgggcggtttgtggcagccaagacgaggattcccttaaaccaaaacccgatcaatatcattgcaacccaataacaaagataaaatctttaaaagcctatgagctttagtttacctttgcttcttcaagaccgtccatttcggttaacagtgtagatagaagcctttctccaactgtagaactattgcttgagctctcatcacctctacgaagacccaaggaaataaacatgttaagaagagtctataacacgaagcaagagttgggagagatagagacaaaccttttacaggcaacgacatcagcttcatcaaagaatattatacttggagaagcaagtcgagctctttgaaatgtattccgcaataatgcttcaccttctccaacatacatagaaaatagctccgcacagctgcatcgcacacccacacaaagacacaagaaaaaataagtttctttaaacaagtttcacaaccaaagggggattttgttaaatgtgatctatcaaaatctataccttaaggaaaagaaggaggcttgagcagcatttgcagcggctttagcaagagttgtctttgagcaacctggaggaccatgtagaagtatcccacgcattggcgatatgcccatttttacaaatgcagctgaatgtttgattggccattcaacagcttgctggagctttttctgtcacaaggaaaaaaaaaccattaatcgcaatggagaaaacaggacaacaaagtgcaaaatgaatatttttaaaaagtattgacctttaagtctttaagaccaccaacatcgtcccatgtcactttagggatttcaactgtgatgcctctgtttatacttggaccaaccacagattttgcaatcttgaagtcttgagatgttagaataagagaatctgaagatcttttacttgcagatattgtcgcttcacgacataaagcttccaaatctgctccaacataaccgttgcaagatattgcaatggcttgaagatcgacactaggatctaaattgactttctttgtgtacagctgaaaaaaatagaaaacatgaagatcacaaacaaacttactatatacgaaaatcccatttaagaactcgataattacctgcaggatttttaaacgatcctcctcatttggtgtgctcacttcaactaaagcatcaaatcgtcccgctcttcttagcgctgggtcaatcgcatccacccttttgacaagatcggggaaaaccattggatcattgcattcaaaaccaatgttgataatcaacttatattatgcttaaggtagacaagaacctatttgtggatgctacaacaacaactcttggtgcagatgatgaaggcttgtttgagtccataagtgtaaacagttgagaagcaatacgaacatcttgttctcgtctgcattttaaagagaacaagattattctcaatctcttaaagatctctctgaagatagcaactataaactaggggtgaagcaatacctagcatcacgacgaggacaaagaacatcgatttcatcaataaaaatcacagaaggcttgtctgaaacagcgtgagaagaagcctcagcgaaagcttcccttaagactttctcgctttctccagcatgtgctcgatgtacagaatgagggctaaacagagtatttgacaaacaaagacaaatcataaattagctttagcctctattactccaaagcataaactatacagaagctacatancaaagtaccttanaacaatcaaatgtgcatcacatntctggacaacag

SEQ ID NO: 28688 - DNA, 1266 bp, Arabidopsis thaliana landsberg
ggatcaatctatggactgatggtacttattccggtttcttgtgatagagagagaagtaatcgtgtccacatcatattattgacgtttttcccctttctatagcaaagttttaacttttatgggtccataatgagatgtacatacattaactgagtgaaactagatgtcaagaacctacttataaactattatgaaaaatagcgcgaattatcaggctagggctacaagacgcttgatttaacctctcatattcggaaagtgacatgtctctacatagcaaacacctagttaacattgaaacgtgaaaaagaaagaaaggaatatataagttgaataattgatcccgaattcgaatgtctacgaaagactttataacagttccaacacatcaatgatcgatccggagatattttgttaagttaacatagattgatcagtgtgagaaacaaatgtaaaaaaaaaaaaacttacctctttgaaccagaaactcttctaaggagagcaagaaaacacaacacacgataaagtacgaaaaaccctaacaaaacataaacattaaaccacctctgtttctcatgaagtcctttcttcttcaacacgtcacctccagtaaccatgcagatctttgtttgagcttcctccaaccagaccaaacacttggaggctaagcacgagtactcgtttatcagaagtgcatccaatgcatacttatacattgagaagaagtacatgaaaagccagtacttgggaagactttccttggaaatgaagtaaccggaaaacaagaagaaagccgctagaagaattgtcacaagagaggttcccgtaatgtaatttggggcaagagagctcaagaagagaacaaaagagttcgccattaggagaatgatccatatcacgagaacgaagtacccaaaagcttgccatgtggggcagagaccaatgaggaaatagaccgaaacagagtaaatgattgagataacgaacaagtacggcaagaatacgagtgtatttgcgagaatgtgagaggagagtctgtaaacaccactcgaagtctccctgagaagaattggacgctcgttgatgaagatcgggagggtttcggttgttgaagagaggagaaaagtgagcgtgaaggcgaacatgccgaatcttttctcgattcctgctttgccgattccgatgttgatgtagatagttcctaggacaagaccaactacaagggcttctaatgcattggtaagaagtagttgccttgtccggtaa

SEQ ID NO: 28689 - DNA, 2430 bp, Arabidopsis thaliana landsberg
caaccaaagtagctgcgtatttgcagccaggaatgtgtcgagagcttctctgcaaatttttcagatttctctgcttttggattcgactactggcagagctctctttggtctcctctcttgcctcgaaattacgccagtgcttcagatctagactccgacagttgcgttagcgagaatcttacgctaggggagctccaagttggcgggaagaagaagatgaagatgatgtcaatgaagaagaacaagaagaagagtaaattactgtaactatacataccttcaatgaagaatgatgattcttctcctaaaattggctgttttcctcttcctaccaaggtatgttatatcatataacatagataatgttctcagttttgttttggtcaatgtttataatagatgttgttaattgtttagggatggaatggtgtgttaaaggcagcttcaaaacatttcaagaaatcgaaaaagaagagagattcattcgctgatgccaagcttctcgacttcaaatactaaagattatagcaacttcaattgcttttcattgtattcaataattactagacctttgatgaattgtgaagttgagctgtttctattatggtcatcatgtaatcatttggagtgtttgatcatagatatatccatgactgcttttgatttctgatgcatttgagttttagacacaagtagagattttgaaacagagtttgatgtacagttgaataaacaagcctaataccattactggtgaaatctagtagattttggttctgtatctggaaatacttcaaccatgacccaaaatctctcatttctttactgtttcaatccctttgttgctcacattgacgcagtcttcttctgcaaactcgttgtcatcagacatttgttcatcgtcattgtctttggaaatcgtcagtccattttgaagcaatcgccggttctcttccgattcttgcctcattagccgttgctgaatcccatctctgatggctgttccctgagaaaaataaaacaataattagcgacggagacactactatactcatgtttgagatttcaaatgatcttttttttgtaatgctgcttaccattttatgacaaccttcctcaaacatttcaagaaatccagccacccaacgatcagcattttcaagccactcatcatggtgcatcccagcagtttttgctacggtttgtatctgcacaaagggaaaaagattcaggattcagaaagttacacaatgagcgattctgactctaactccattcttagacaaacatactgcacttcttctgtatatttactatttacaagccgtgcatcattaacgcataagaatagattcatcgcctctcaccttttcttgttgctctttaactttctcttgtagtttcttcaatctcatattcactctaagcctcttctcctgttcgtatagtaaacaagttagtgtatcacgttgaatataccattcccacatcaaggcagagaaaaatggagagcgtaccttaacgaagctgacaccgagttcttctcttgaataacctcggtccagattacgcaacacatactggttataatctttcactattctcatgattatatcagatgtcgatatcccctctgttcgtttagtctccttaaacttcccaatcgactttacctgcacaaaataaactccaaatctttaagaaacagcataagaagaagaaagaacatctctatgttaatacttacaaactcataaacatcatttccagctccactagtatccgcatagctattgaaacaaacacaaacacaaatcattaaccttgtttaaaattgctaattctctctaatggaaaaatacacaacaacaaaaaaacgaatcttacggaagagcatcgtgagctacgtaatctatcttatgcttatcaagaaactctgttgtaagaacccatggtgcatctggaatcacttcatcaacccacctattaacaaaaacaccattataacaaacaaaaaaactccagagaatctacaatagctccatagaaaattgaaacattacttgcaatgtcgaagagattcgtatcgctcagattcagtcatcacagttttccccttgaatttgttcgtaatttcgtcattgcaacatccaacaagcagatacgtattcggaaacctaatttttcaaaattggaatcacaaatcacaaattcacaaccctaatttctcaattctggcaaaataatcgaaagaaaacaaaaattggtaactgacgattttttggcttgttcgatggcacgagcgtggccgaaatggaacaaatcgaagatcccatcggcgtagactctaacaggtcgatctgaagatgaactatctcctcctgagaccttgttctcaccattaacgctcatttcttcttcttcttcttc

SEQ ID NO: 28690 - DNA, 1359 bp, Arabidopsis thaliana landsberg
aaagtctgtaacttttgtgtctctatatatataaaagatatggaagttcatgtgaaacaattgagtgttgttatgggacgtagttgtatcgattaaagagataacagagattgttcatctaggaagctgtctcaatggtttgaatgcattcaagaacagatgcatttttggacattgcagccattagagcttcatggatggtcttgttgtttttgagaagagaagcagagtaaagaacctgcataacataacatgtaggttcatgaatactttagaaaaaaacatgtatgagagatgacaagagaaacttacagcccatcttgttagattttgctgctgctcgttgctgattttgggttggcttctgtttatgaatctctgcaggagacaaaaaaagaagaagctgtaataaccaaaacctgagctaccaagtgaacatgtgagtgatgagataaaatgaactagaggacctgaagagagaagagatctgcagattggccaattactttgtcatacttcagaccctcggcggcaagtccagccattgcaacagcagccaacctgaaaaaccaaagaagattcaatgggttgagaatcttgagatctctgattcttctttctctttaactaaactctacctatcgagctcctttgagtcaagcttgccgctgtatattagtttagctagtctctcgtcaatgagattgacatgttctttaccgatgtctaacgagtacccgaggattggaagcccgattaagtaagccactggaaagttgcaggttttaaacacaattaagacattgcacctttggaatcgaaagatttaaacttttcaagggtacctaagaagtgggctgcttcatgtgcagcaattcgttcttgataatcagggaagaacgtcgaaaacccggaaatcgcagcttgaagaagcctacaagaacaaaacagcagaagataaatctgtatcccagagtacattacgctaaccaaatatgcagtgtttcagttattttcttaccctggtgaaacgcttcccacggctaaaactaccaacgaaatgctcccaactaagtaaggcacaaagaatccccagtcctgtccagattcaacagttattcatatgtcatatagaacctaacactcttgacagaaaccgagatattgtcattgatttcgacatggtatacacggtctatagtgtaggatgtagttcttggtatagtatagcctaaactattctctagaagaaagaacagactactgaacatcaatgagacaagaccaaaaacttttcatggccttaaacaccacagaaaatagcgtatttaaagttaccccgggaagtgaccggcaagt

SEQ ID NO: 28691 - DNA, 1459 bp, Arabidopsis thaliana landsberg
catgattgagcttaacactctcactctactctccctcttcagtctgacttgaagaagctcctgagacatcctccttcactaaaacttccaaatgtagacgatctgatcaccagcaatcctttattgaaagatcgctcaagcttcaggagtttggccattggcgaaacagatgcatgaactgagactttaggtatccttgtcagaatcaactagagtagaatctggttccaggatcgagtcatgagctcgttcgatctatgaccaaaaacagtccattcgtatagtttttaacttgtttcataattacagggatcgaattcatgaactcgtataatcatttcaatcaatcctttttggctttgaaaaggaaaataagaacgataatggttaaatccgtaaagggaaaaaaacatcaacgaaaaaacaaatcatggtcgctctctaagccaaaaacgcgttaacttggaaccaaagaaagaaaaagtcttgactacttcaaactctgacagtacactttaaagttaaacctatattaatcacttatatgcaaaacaaatctagatcccagaaatatataaattcccaaattataaacgaatttgcaataggaacaaaaatataagaacgagccaacgcgtcttgagaattttcacgcggttcttttaactcacccaactcttcttcactataaactctcacgtcggcagttccagcttgcagagacacatcatcatctctagtactaaaaccaaaccgacataaaccgggctgagagagagaaatgggtgaaagagaagcttgtctagtcccaaagagaggacaagttcttaaaagagtcatgagtgttgtcttcttttcttgtctttgtttcccttctcgtaaaaatacacaatcatgtctccgatcatctccctcatcttcttatgtcacaccttctcttgaaaccatcaagccttaaggacatttataggaccaaaccaaaactcaattaggatgaaattagattcaaaacccaattctcagtttttttattcaacttgttttgtaccaccaataagtcaaagaccataagctcaatggatggtctctgagtcaccaagagggaaggggtcatctcagaatgttgtaatagttcatgtatacgctactcagcttttgtataagctactcagctctttttattcaacttcttgtaatagttcatgtataagctactcagcttttgtaactttacttttctttagtaattctgaattttcaacacaaactcgaagtctgtttcagtttttctaattttctcatatcatttcaagcttaccaatcttatgtagccttgtttaatactacaagtgactgatacggtaaaaaccaacattagtacactagcttaagcaatatattcccaatgtttcaactaacatcttatctaatctaattccatacctgtgacaacgataag

SEQ ID NO: 28692 - DNA, 1697 bp, Arabidopsis thaliana landsberg
atgaagtatggataccaggaggaggataaatacacggggttgatgagaacatagatctcgcccaagagttagaagaaatgcatctcgatgataaagactctaatctagtcttaggctttaatgaaggagtggaggttgaaatacccagcgatgactttgaaaaatgtcaacggaactccgaatctacatttccacttcatcagcatactgtcgattctttagatgatgaaagaccttctattgagacaagccgtggtgaacaagccgcccaacctgctgtcgtttctgatcccttgggcatgcataatgcgtctaggaccttccagggtgctgaaaccacgatgcagaacttgacagttcacccaaatattggtcgccagtcatttgaggtggccagtaaagtagactccacaagtaactctaccgtttctactcatcctgtcataccacttcacagcgctgctctgcatccatcatctcttcagacagctattcctcctgtatctactacttcagcacagatggaggagcctgtcaagtttcagtttggtttgttttctggtccttcgctgataccttctcctttccctgccatacagattggttccatccaaatgcctcttcctcttcatccccaatttggctcctcgcttacccatatgcaacagccccagccacctctcattcagtttggtcaactaccgtatacatccccaatatcccaaggggtgctgccaccgccacatcattcagttgtccaagcgaatggtttatcaacttatgctttgaatcagaatcctggatccttggtgactgttcagcttggtcaaggaaattcggctaacctgctcgctagaaacgcagcaacctctgtctcacaccctcagcttagtgttcttagaagaccgacaaatgtttctgatgagggcacactgaagaatgctaatctacctccagcgagagcgagcattgaggctgctgtgtcacctcaaaagcaaccagagttgtctggtaattcgcaattaccttctcgaaagatgagtcatggaaaatcaaattttgctgaaagacaatcaggataccaagtccaaactgacacaagtgcagtaagaaattctggcttgcgctcatctggtaccgctgaggtttctcgggtagattctggtggtaatagaagatatcgtcgtcagagggttgaatttagagttcgggaatcaaactggccatcttccgatgaaaatcgaaatggaaatggaagggcacaaacttctacaaaaattgggagtagaaaatatgttgtgtccaacaagtcccagaaacaagccttagacagctcagcgtccggtttgaatgctatgcagaaaacagttagtgggggttcatttgagaatagacttgggaaagatgctgtcgtgaagaatccactcagtccaaattctggacaagcaaaccttaaaaggtatatggtatctgaaaagaaaattgatgcacctttgcagattggaattgttcgtgtctttgagcaacaaggtattgaagctcctagtgacgatgatgattttattgaggtaagatcaaaaaggcaaatgcttaatgatctccgtgatcagagagaaaagataattaaagagcagtgtcaggcagccaaggttctgatgcaatctataactatagtgttcttctacatgtgaattgtt

SEQ ID NO: 28693 - DNA, 2358 bp, Arabidopsis thaliana landsberg
gttcttatatatccatccacattctgatcacaccggttttgatgttccttttttcgctgaagagacgatcttatatgttttgtttctgttatgcaagatgagaaggtggaagaagtgggaagaggagactaagactatcgaatatcagtattcacacggtataatttacaaacttggaatgaaaaattgattaaatgtaaaacttgagtgtgaagtttcaacaaggaatgtttcggataatgtagatcccgagaggtttaggtttgcgcgggatacatctttcgggcgtagacatctgagtttctggagcaaatcaactattacgctgtggattgtatgtttcttcagacagttctttagatctgtaaccaaagttgattacttaacactgagacatggtttcatcatggtataagtcaatcttttgatctttaacttttctgttgtataataacttatctctcaaggcaaagatcttacagcattgcacgaatgcttcttctttttcttctgtttcaggcccatttggctcctgggagcgacgcaagattcgatttccgaaagtatattcagagatcactagaggaagacttcaaaaccattgtcgagatcaagtatggaactaattacgattacaaactccacttcactaaccactacttaatctgatgttttaactgcttatatcttcagccctgtgatctggttcatagctgtgctattcctcctgacaaacacaaacggtacactcgttttcaaaacgtcgctgcatcgatacctctttaaaagccttcaacaatccaaaactaatagattactctgcttttctaatgaacaggattgaattcttacctctggttaccgttcattcccttcatcgtaagcaacaaacaaaacctttagactaaacctattttgtttcggtttcaactccgtaacaagaatgaaatgtataaacaaactgcaggtgattcttattgttggaacaaaacttcaagtgataataacaaaactaggacttagaatccaagagaaaggcgacgtagtgaaaggcacaccgctagttcagcccggtgatcatttcttctggttcggtcgtccacgtttcattctcttcctcattcacttagtcctcttcacggtatacattcatcttttactttctactctctctccttacaaaaatgcctgaaatttaaccatttctttttcgccatcatcagaacgcgtttcaactagctttctttgtctggagtacggtaagcaagcaatcctgcattctccacgaacttgaaccgtaataatacctatacaatcatcattttcatcaaaatcatttgttatctcttcagtatgaattcggtctaaagaactgtttccatgaaagcagagttgacgtgatcatcagaatctcaatcgggtaagtggaaaacataagcttcaaaacccttcatagaaaccatcccttaacatctaacaaagtcacaaccttttggaaaacataagcttcaaacatagaactgagaaaccattccttaaaatctaacaaagtcacgaccttttggatcttgcagacttttagttcagattctttgcagctacgttactcttcctctatatgctcttgttactcaagtaagacccacacacaaaaaaacacaaagattgaaactttcaatttcaaaaactgacatttttgaattcaattttggtgaagatgggttcaaagatgaaaccaacagtgttcaacgagagagtagcaacagcgttaaagagttggcatcacacagctaagaaaaatatcaaacatggaagaacttcagaatcaacaacacctttctctagtagaccaacaacaccaacacatggttcttctccgattcatctccttcgtaatgctcctcacaaacgaagcagaagcgttgacgaaagctttgcgaattcgttttctccgagaaactctgatttcgattcgtgggatcctgagtctcaacatgaaactgctgagacttcgaattcgaatcatcgttctaggtttggagaagaagaatcggagaaaaagtttgtttcttcatcagtggaacttcctccaggacctggacaaatacgaacacagcatgagattagtactataagcttaagggatttttcgtttaagcgatgatttaatgttttcttaattcattatttagtgatttgttaatatgctaaatgaaaccagttcttgtaaattttctatactatgtttgctaaaaccagcccttgaagctttaatttctcaatgtaaaagtctgatgatcttggattttaagactatggagattcatgggtagttggtgaagagtgttcttgtctttt

SEQ ID NO: 28694 - DNA, 1662 bp, Arabidopsis thaliana landsberg
ttttatcatttgttaatgagtactggcgtttctctttgttttgtgtgtttcacctttctgcacaaaaataaaaatgagactgtggttttatgtttgtacacagaaggatgagtcaatgtctgaattaattgtaagagagaattgtatatattttaaaaacctattgaatgatccacctcgagaacccatacaccttcattgtttctctttgatttttggtccttttctctttctctccccttttaagagaaaaggcacataattttggagaatgtcgtaagctattctacaaaacttttttcttacatagagtgattatatgttttacaaagtgattatgtaacgtttctttctatttaaaaccaatgatgtttgagttatttgcattttgcaaccaatgatgtttgaattatgtgccgttcgattatatcccctatattaatatacactactgtagacgaaagtgaaaactcccgacaaaataaactttgaaaggtgaaaactatagttattccaaaaaatatattcctttatacatatatactaaattcacatttacagaagtagagtacgtaatgtaataattttgggagcatatgagattgggccagtttgaatacaacataaaaaacaatatagtacaatggtcttgctttatgtttattttctgtctaacccttccttctcttgcggcccttttcaatgcactttaatatttataaccttaccattttctctctaaccatataaacatccgttttcgcgtattaataacctcatccacacacacacacatctctctctatataaccctaagtgtttggagatagcatcactagagaacacacacacaaagcatcaatatttgtctgaacggagaatgagtcctgtggcttcaacgaggtggtgtccgacgccggagcaactgatgatcttggaagagatgtaccggagtggtatacggactccgaatgcggtgcagatacaacagatcacagctcacttggcgttctatggaagaatcgagggcaaaaacgtcttttactggttccagaaccataaggctagagatagacagaagctgaggaagaaactagccaagcaacttcaccagcaacaacatcaacttcaactccaacttcagcagatcaaaccaaaaccaatatcatcgatgatttctcaaccagttaataagaatatcatcgatcatcacaatccttatcatcatcaccatcataatcatcatcataatcatcatcgtccatatgatcatatgtcctttgattgctgctctcatccttctcccatgtgtcttcctcatcaggtatgtaattaagaagagtctacttttctctctttttgttaaacatttttctttcataagatttttttaatgcaatgtttatcatcaaaatagctaggttacatatggatataaccaaaacatttgtatacctacaaaaagaagaagaaaaacataattgaagaactaatctcaaaccttaaaattatttatgataatttttttaattaccggaaacactaatttcaaaccttaaaaataccaaatgtttttggctattataccctgtttacatggctagatgggaaagctgcaagtgagaatactttttttgggtctagaataaaaaatattttttt

SEQ ID NO: 28695 - DNA, 2008 bp, Arabidopsis thaliana landsberg
caattattaacaaggagaagtgttataggaacatgagaaagcaagaaggaagctaagatcatcttttcatatgcccaaaattccttaggtagtcttgtttagttcatattttcttgtacctaattgctttatttcatgtaagcagtatcgcatgtacgtatacgatgtatttttatataaccctagttcttaaatatctgtaatgcttattaaaaatcacaggttttcatcttaaaacaaattggcaataagtaaaataatttaatgttgaatttatcaaacttccaatgtgggacaatttccctatctaataagtctttgagaatttgtgagaaacggtctaacaagaacaatccaaacttaatatattggaaataccataacaagacggatcacttatacgaaccgcagaggtgagaaacccctttatttggaaaaatgtctagtgggtcaatctggctctgataccatattagaaattataggctttcaactcaaaaccaattgacaatgagaagagaatattggtgtagaatttactacaagcattatataatattaatatatatcaaattacaactttaaaatataaagtatcatattttgttttattcctaatatgatctaatttaggaaataaaaactctaatatatgtatagtacgtacactgatatgtgccctcttgggaggaaaattgcggaaccgcatttttgcgggaaaaatattgactcacgtttttgtggaaactatacggaatcacatatttttgcgagaaaaattcattctcttatttttagctggaaattatgaaccgtattgttagcaaagaactatagaattatgttttgacgctaaaaagcgaactcgcattttttgcggaaaaatggtgagatcgtgtatttgacagaaattttgattttgagagagaatgagagatcgatgatgaaagatgtgagaaatttgtgtttgcttctgtttactaaaattggtttaaacattttattcagttatatttggtttacacatttggttattttgtcaatttggttatgggtaatccactaatctatttcaaccaattattccaacccaaatcattacactcattaatccattgattcattaattatcaaatttccaacaactcattagatccatgagttggattggtttgggttgagttgaaaaattaacttcaattcattttgacatacctataatatggtatatcatacgaaccacctaaaatatgtgatgcatgcacttattaaattgcattttacaccatgtttatgtttaagtacgtcaacattgaattagcacaatgtatacgtacaaaaaagactactttcatggtaatttaatattctaactcaacaagatatcatagaatgcaataagaagttgtcattgcaatgaggtactatcaaaattctaaaagtctcaattgtgtaattttccctaagaaatagggaaaataccatttaaatatcaaacatttacaaaatgctaaacaatgttcaaattttctttctatacttcttaagttttaaatacgaaatttctttcacagtaccaaattaaaactttgttaatatcatcggatatttctaaaaaaggaaataatttacatgatcctcaatccccgaaaaaaagtatggaagataacagttctgcataggataaagcacctccaattttaataacgattaaaaaaaagcaaaagggtggttggtttatatttattgtcttttggatagagagtctctagtttcatgtgataaagtatcgatcgcccaaaatccatccatacgagatatgctgtgctgtgaggtgtgagcggtgaggctcgtgatgaatggcaaacgattcatgtaactattttcttttattatcttaacaaagtcgttgttactctaaatttaacacttgatcatatttctaatatgtatattctgaataatggcatggcgtcaattctaacttatgagactttaaacttataat

SEQ ID NO: 28696 - DNA, 1044 bp, Arabidopsis thaliana landsberg
tccgtcgctaaaccgccatttcccccgccgcatctcgaacccttactcgagagttaagcaacgaaggccatggctgccaccaggagacgcgacccttttcaattctcgccggaattgggattcccatctgtttgtttacgcttcctcttcttcttctccgtagtcgtcgcctccgtctccaaattcaccgacggatgatctcacggcagagttgtgcgtcaatactggtcttgatctctttaagagaggacgggtaagtactagagttcgattcgaatggttttgtggtcgtaggtgaatatgtttcagtcggttttgggttttctatgtcttactctttttggctgctcctgtcttctattgcgacgcttgtatgattatgtataatgggtaagccctaaaatttagttactttccagtcgctagtaattttaaaagggatactttttgtctgatcgttgctagtttcttgatcttaatgtttgaaacttggaaacaaaattagcaattctctgcatacgcttgtactagttataatgttgacacttggagctagcaaaagagtctttgcttggaacaatttagttgatttgtcatgttggattctttcaggtgaaagatgctcttgttcagtttgaaactgcactgagtttggctccaaatcctattgagtcacaagctgcttactataacaaagcatgttgtcatgcttaccggtaagaacctcgaaccatgtactaatgaaactgtcttatatctactgatttgaaagatcctgatgagattatgttttctttcatttcatcctattgtttatcgatttgaggtaggggcgaaggaaaaaaagctgtggattgcttgcgaattgcgttgagagattataatctgaagtttgccacgattcttaacgatcctgatttagcatcctttcgcgcattacccgagtttaaggagctgcaagaagaggtcttgcactctccttttgtatatcttgttcatatcccaaggaaaactgtctcatgggatcctcgagatgcaggcatg

SEQ ID NO: 28697 - DNA, 2228 bp, Arabidopsis thaliana landsberg
tcttcaaatatatcggcgggaggaataaaggagtccaaagagagaccaggcacatcgaaaacgacgtcgtctatcctccaaatctcctccatcctcgttctgctatactgcaacgacgtctccccaaatcggaacaccgtcgcgacggcacgaccacaatgcgcgacggctactccgtcaacgtcacggtaatctccgatgcttgttccgatcgtcgtctcccagtaaaccgcctcgtcctcaggcgagatcgtcataaccctagtgaggtgcgaatcctctaaatagactaagagaccgcttttctgacagaagtatccgtacagtgcgtggcgtataacctccgccggagctccggcgtcattccgttctaacaacgagtcacgatcggcggagactttgagcacgaaacagtcatcgtcgccgattcttcgttcgcctaagcattgggcctttgcgaataggcttgctgtggtttttgggtccaagccctgtagcccaattacaaaaacaaacgggtttattaaaaaaatattcacaaatatctttatcaaaaagaaacagaaaaggaaattcacaaatatattgattttgcgttacttaatttaaataaattatactactatccaagaaaaatgtgtccggcaaatattcgttggggtttgaacgacaagaacaataaagcaaaagatttaaaagaaagaaagaaagaaataaagataaagtgaaagacaaactttgataatcccaagaagttcccccactttgaaaattgaatgaatgtgtaagatcgtattcatgatgaagcatatagtacattacatagggtttcaatactattagtataatgtcatattatttaaaccaataattgtacacagtcacttaacaatgcgctctgaatctctgacaatttaattatttcactatcttttagaaataccccaataataataaataatctaggacaaaaacctcataccttgctaaaaaaggaactaaaacttgaaccattagcaaaacattttgtaaatagtaagtatacggacaagaaaggagaaaaccacgtgtggtggtgggagagtcaagagtgggtgaatggggttttgtttgattttgaagtttcaagagaaagcaagcaaaaggaggagacagcttctccatcacttgtcaggttagtatttgttttttttttcaaataatattattagcttattggacagcgaccactctttttcctaccacgtccttatctcttggacaatcttattacgtcatctctcctttttgccaagtttatgcaattattttcttctaaatcaatgttaatactatttttactaactaaagttatgttttgtagtattttcgagtaattatcaacatgaaattacctggattagacgacgaagtggacgttgagggcctttagcggcgtgagtaccgagccatggcgtatggcgccaaactgttttaccgtccgagccagagatgagtttagttccaccgagaacaagctccagagaccacattccaggctgcatctgccacagcacgaagcaaccactatctccgctccgaccgtttccaccaccgcctagtgtcttcacactttttccggcggctatctccgtctcacagcaactcattttcattatccccgtcgcgtacatgttttcgccgccttcgctcgcttagacatccgtcgccgctaagattgtgtattatataatgcgctgtcactgtctcctgtaattatacttatgtattattaattaccaatccacatcatactaattactttgcataatcaaatggcaaaaaaaatcattggtctcagtgatgttttaacagacaaacaaattacatgttgatttcacatgttttggcccataacaaaattattaacctttgaacattttttcaaccaatcttatctcaaagataactattcagacgactttgtttggccaattcaaataattaatataaacctaccgtttgaaatttcgacacaacaaataaccagaaaatattttttttttcttttttctcaaaggaacaagatagaaatataataaattaagaaacacaaataaaattcgtatactgaaaagaaataaataaatataaaccaaagagagggaataattagtaatactcacaaatgggacattcttgatttggaaagaaccaagaagagggtcatcgggggatcctctagagtc

SEQ ID NO: 28698 - DNA, 636 bp, Arabidopsis thaliana landsberg
ttcatgcacaaaattaaaaataattggttcatgtatttgtaacccaatgtaacaattttattgttgaacagaagtcattaactccacgtcatgtactccattaaatgttccaaaatattttgggcttgattccaaaaaacaaattatcacgaatagcgatgtttgacaatccaacaaacatggttccattcacctttttttgccacctgtaaatcgcgatattttaaataatttattacctcttccacagatacgaatttttttataaagaataatacgtaacactctaaaacaacacaaatatcataatttctccacgaactgactaagagaggtaccaagaagaaaaccagagaagaatcttctttagagagatgggtgtggtagaagaagctcacaacgtgaaggtgattggttcaggagaagccacgatcgtgttaggtcacgggttcggcacggaccagtcagtatggaaacacttggttccacatctggtcgacgattaccgcgtcgtcctctacgacaacatgggagccggtacgaccaaccctgactatttcgacttagatcgttactcaaatctcgaaggctactctttcgatttgattgcaatcttggaagatctcaagattgagt

SEQ ID NO: 28699 - DNA, 1676 bp, Arabidopsis thaliana landsberg
gctccattcttcaatttcaaaaccaaaagcaagaatccaatatgagttcgtcaggaaacatagacattacaagtttttcagaatccataaaagcaatgtgttgtatacagtaacagagtatagagtacctggagcttgatgagaagctttgaggtggtgccatcggaggaatgaaatagcgagtgaagagacgaagtaagagtcttgaacttggaatggagaagagagtatgcagcggaaggcaatgaaggaatctcgtcccaaacgcaatcaagattctgaattacatacttccagatttgaatcgcgaatttagggtttattcccgctgattcaaattccgatttgatttccgaagcatcgaacaccgatttcaacttcatcgactcttccttgggaattctccgctcgccgtcgccgattttaaaagccctaaacttttaaagcaaatcccctccgtcacaacaaaaattcaaagaagaagctaaaaccggtttggtttttggtggaaaatctaaacccggtttgattttgatatttgggggaaaagtaaaaaccggtttttcttaaccggttttgtcctttgttgtggacgagccggaatataaattccccaattttcacttccaacattcctcagctgctcgatctctctctgatcacaacaatcataagcgatgagaggagctagacccgatgaattcaattttagtacgaatccatcaacgccaaacactggtcagccgacaccgacgtaccccgccggtgttggcggcggcggcggtggaaggaaaaaaggcgttggcgtgaggacgtggttggtacttaactcgtcagggcaatcggagccgaaggaagaagggaaacactccatcatgcggcgaacgggattaccggcgcgtgatcttaggattctcgatccactgttgtcgtatccatctactgttttaggtagagagagagcgattgtcatcaatttggagcatatcaaggcaatcatcactgctcaagaagttttgttgcttaattccaaggatccttcggtctcaccctttattgatgagttgcagaggcggattctctgtcaccatcacgccactaaacctcaggtaattggagaatttagggttttcccactgttcatttggagctctttttgtttattcaaggagttggcttttgtattgtctccttttgtttgtgcctaattgcattgttttggaattgggaagtagaaatattttcgcttgacaatggaatatgtatataatagctaatgtattgttgagacatggttgactatttgatttgtgcaatggtgatgatatgtgaagattatggttgtcagtttagctatggttgactatatactctctttgtatgtgttgtgtaaaggaggagcagaactctgggggagagcctcatacgagggtagatcctgcccaaggagaagctggaacggaacaatcttctggggatcaagggagtgaagccaagaaggatgcgaagcaaagtcttgagaatcaagatggatcgaaggttcttccatttgagtttgttgctctggaagcctgtcttgaagctgcatcaagcagtttggaacatgaggtaaatacttatgttaaggctctgagacaagcatattttcttctcttgtttgggatttgattcattct

SEQ ID NO: 28700 - DNA, 8869 bp, Arabidopsis thaliana landsberg
tagctttgtcaagatgggattttcaactcaaatgattgctagagcaattgaagaaaccgctggtgagtttatctatgatagtgttctttgagatatgcatttcagaattctgtcaatcaatcaaattctgttaataatttgcaggagcaaatatggaacttatgatgattcttgaaactctctttaactattcggtgagtttcgtatttgctcaatctgtcatgtgacgtatggttttctattttttcgcttgtggttaaaatctcttgacactccattctctgtttctttgtataggcaagcactgaagctagttcttcgaaatcgaaagttatcaatcattttattgctatggggtttcctgaggaacatgtgataaaagctatgcaagaacacggtaattctctttgttctttttttctaggacttggaaactttaatgaggttttatgatctttccttgataatgtacaggagatgaagatgtgggagagatcacgaatgcacttctaacttatgcggtaagtaaaccctaaaattaaattgcatattgcataagaatataagatgtcgtttaatagaatgttgttactgtttttctaggaggttgacaaattacgtgaatcagaggacatgaacatcaacattaatgatgatgatgatgataatctctattccttgtcatcagatgatgaagaggtatataaattgttttttccaagtttcagacctttgctatgctaacattcctgcagattctcttacttccaatgcattgccatgtcttacattttaagaagtaggttgtgtacgttgtattcttatctgttttggaaatgacaggatgaactaaacaactcctccaatgaagatagaatcttgcaagcgttgatcaaaatgggctatttgagggaagatgctgctatagctatagagagatgtggtaaaacgtttacatgaagataatatatctcttatctttctgtttaaatctgcaagaagtttacatgcattcctctcgcatagatccaattagctagcgtccttgcaaagtattcatgtttcttctcaaacgtttcaggagaagatgcaagtatggaagaggtggtagacttcatttgtgcagctcagatggcacggcagttcgatgagatttatgcagaacctgacaagaaagaggtaataactctaagtctcttgtagaacctaagacacccatcaaatttattattgaattatccttctgcaattcttgtcagtttgatgagacggctccggttgtctactttaaaattgtgttattgattaacttcgtcatatacttggattaagtagggctgtgatcaatcgatgagaattagttttttgctcatatgtttgaaggatttagtctatccagacctctagggttttcctgtaacctgtatgttgttaactttattcagaacttcaatttttgatttcgtaatccattccattgttctgtgccagatgcattatttggattgatgtaggcttgtagctattaactatagttttcaaattagaaaagctctttggattgtgaatttgtgatctttggcatctttttaccttggtcagtctgattgatgatggatgatatacatgtctctggatttcattgggcttacctattattgaccgcttctgtttttgattggactagagatgctttggtttaagatgggactttgatttcttgtcgtagttctactcggtgtttcactaacttactgatgttactaatactgttctgtttctaatcatctttgcatttatacaattcttcctcaagcctctttaaatgttttttgcctgtgttgattgggattcagcctttctgtcagactattgtatctatcatgtcacttaacatgtttttacttcagtatgctgctcttgttcttggtagacttcatttgtgttttgttactgtgtgtggctaaatagaagaacttaccaaaaacgcactgaaccttgactttttgactggtgcagcttatgaataacaacaaaaaaaggcgaacatacactgagacaccaagaaagccgaacacggaccagctcatctctctaccaaaagagatgattgggtttggtgtccctaatcatcccggacttatgatgcacagaccagtcccaattccggatattgctcgtggcccgcccttcttttactatgagaacgttgctatgacaccaaaaggtgtttgggccaagatctccagccacttgtacgacatcgttcctgaattcgtggattcaaagcatttttgtgccgctgcaagaaagagggggtatatccataatctgccaatccagaataggtttcagattcaacctccacaacacaataccatccaagaagcctttccattgaccaagcgatggtggcctagttgggatgggagaacgaagttgaattgtctgttgacttgtattgccagttctagactcacagaaaaaatacgcgaagctcttgagagatatgatggagagacacctctagatgttcaaaaatgggttatgtatgaatgcaaaaagtggaatttggtttgggtaggtaaaaacaagcttgccccgctggacgcagatgagatggaaaagcttttaggcttcccgagagatcatactcgaggaggaggtatcagcacaactgatcgctacaagtctttagggaactcgtttcaggtatgttacttatatcagttcagcttttggtttgaaaggtgtttggggttctaaactcagttgtgtttttatatgcaaggttgatactgttgcttatcacttgtctgtgcttaagcctctgttcccaaatggaatcaacgtcctgtcactcttcacgggcattggtggtggagaagttgcactccatcgactccaaattaagatgaatgttgttgtgtctgtggagatttcagatgcgaacagaaacatattgagaagcttttgggagcagacgaatcaaaagggtatcctgagagagtttaaagatgttcaaaagctagacgacaatacgattgagcggcttatggacgagtacggaggattcgacttagtcataggaggaagtccgtgtaacaatcttgccggaggcaatcgccatcatcgggtcggtcttggaggagagcactcgtcactcttcttcgactattgtaggattctcgaggctgttcgtcgcaaagcacgacatatgaggagatgaaggatttgaagacccaagttgttctgttttgtaaggcactttttcacatgaatcgaacttgtattttgcagattcttgttgttcctttctgctagctagatatactaatcctgcaagaatattttcagattttagtttggcaagtcgtgtaactaagtttcttcctctgcaagaatattttcgataagtttctctccagtagaagcaaactattaaaccaaatcgaaccatattaaaccgaaaccatcacatcattttttgttttgtaatttagatcgaaccatactaaacccgaaattatttcgactttttgttcttgggttcgagacgacgacaagagacaagctctgtctgtggtcgggaaatcgaaaccagagccttggactgtgtctctgctctgtggagtatccattttcgatttcttgaaggtgaatccagcgaatccttaatatcaagctccgagactgtgcaataaacaaaacagtagctagcagcagcagcaacacatgaactcgtgcaaatcccttatccgtgcctcaatctcttcctttccatttgttcctcttccaaaccctaatttctctatcaccttcatctccgttcgcgccttttctcctctctctgtccttcatccaaattcatcatgtactctctctcactctttcgtctgaagtttcaagcttttattttgaatttcgttatctggattcgtttgattttgatgttgatgagatttcgcgcctaacaggtattggaacagctcgacgcacatttcatggagctgtggctctttcaccggagagcttaacggaagagtctcccaaggatactgtgaaaggattgttaacaaccaatcgtggtgaggcctcaagcttgatgaagatggagcggaggtgtagcttaagcaatggtgagggtgattgtagaggatcttggtttccttacgaggataggttcaggtgtggtgaggtgcatcttagtagccgtgaggtgttggaggcggtgagtcctcatatgatggaagagaggacagataggttcaggcgtgtggtggagaatcgaagctactcggtgtgtcttgtggttgaaggtctctctgattttggaaacatctctgctgctttccgctcagctgatgcgttggggattcaatctgtacatgttgtttcctgtgacagctccaaaaggtgcccctttgaggttggcattttctgtttctttgttgattcataggatttgaggtgaaactagggattcttgcattttgaatttagacaatgtgcggtgacctgagatcataagctggtgattgaagtctgtagaacttttgattgcatcataagctaccaagatagatcatgacttggtagttatgtttcttggatcacaggatggggataagtgaggactcttaaatttccgtaaaacattgaatctacgctgattgtgagtcactactattacattttccttctgagtccaagattgatcataagttggctttcctttttcttagttcatacgagatagaatggagaattgttacggttttttgaactatgcagtgatacaagagtcataggtaatatctgaaaagattgatccattagttgttgactgaaatgtaaaaaaggtttgattgcattgtgtgaattcatttaccgtgctatgtgtgtgttaatgtatattatatatgtgtaggtataacggaaatcgccatgtgagtatgggagctgagaaatggctggacattgagttttgggacacacctaaagaatgtttcaaagttttgaagtctcgcggttacagaatagctacaactcatttgagaatggacacggtaaacctctaaagatttgtttgtatatatttgtcatcaccattatttatgaggcaaaatgaatgacattctcttggtggtaatatcttataggtttccatttacgatatggactggtcatgcccaacagcaatagttgttggaaacgagggcaggtaatgaatatcatctcttagtccaaacttgagggttcataatttcttaatggattgattggggaatatgcaggggaataagtgacgaagcgttggagttatcagatctgcgttgcagtattccgatgaatggaatggttgattcgtttaatgtctcagtggctgcagggattctgatgcaccacgcagtctctgatagaaccactcgtctggtaaacctattgacacaggtagacaatcatttacgttagtttccagttcagtttatgctttaattacattttatgggtttgaaacagggaagccatggagatctgtcggaagcagagaaagagatattgatggctgagttctcacttcgtcacagtagaagctcaatttgcatggcttacgagttcgctaaaggtaaacaacaacactctacctcctcctaattttgaaaccgttgtcttattctctcgctgttttgcgtgttataggcttcaaatgacgcctataaaaactctttcgaactcttcttttggtacgacgcttgcttcatgtacaactcttaaattctataaaagacatccttctgtcgaacgtattgccttttcaatcgagtgagtggtgttgatttcaccattcttttgcatcgacctcacgccatcaaagattaagttagaaatttcgcctttcaagaattggtcactcataactcttatgccaactattaatccatgaacaaacgtcgaaatgcatagaaactcgtgaacacatcgaacttatgatagaaacagttctagacatgatatttataagtttttttcccgtggcatcaaataagtggaaagcaagccctaaaatagatagataaatcctaatagaaaagaaagcctagcaaaagtaaaaaaaaaaagtcctgaataattgttattattttgttacttttggaacacataattaatcaattaacatatcactgtttgtagtctgtatcctttccttgttgctgctatcttctccacttgtccgtttcttagactgatgcgacttcacaaactcatcgattttcgccttcaactcgatgtccggtatcaacatatccgatgtcaaatgtgctcggttaaatggatcatgctgcagcaaaagtagaggatcatatacaaagccaaaatcttcagagaaagagagatgtgactgatcagtgatcatcattgtgttagataagcttacattgtcgctgagaagatgacgttgagtgatgggacgatcaactgtgattcttgagcttggaagtattactggatctctcattagcgtgtactgccaaaaaagaaaaggaaaagaaaaaaacaagaacagacattagtgcatggtaataagacaagatttaggtttaaattagtgtttctttcaacagataaagacctgaattgggtcaaggaactcgtctggtatttccccaagtgcagcttcagcatccagagcttcagaagcagcagctttggcttttgtgcctaactccataaactcttgaatgattcttccctcttcacctattctcctaagcacatctgctcctgcattgaatagctgcaaaaacgggcacttgtttagttcagtagagacgcatctattattatgaaagaggatttggtttagaaagaaggatctgacctgttcattatatgatcggccatcactggagatggcaccagggaatatgtttactgtgtctcctcttgcgagattaacatatatgcgaacgatcttcaaagttcacaatcatatcagtcagttttttctcacatactttgatcaggagaattgagtaattgtaatcactactaacctgtttaagtaactgttttggacggaattcatatttctcaggatctttcaggcttaaagatttacgctgtggacccacgagttgtagcaagaagtagttaagcatgttggcaaccctctcaacctaaataagtgcaaacaaacaaagaaactcatcagttgggtaatcatagggcaggttatcatttcaggaatatggtcaggtaccatctcagggagtaggaaaggggcagtgatctcctcggatgtaaatgcaagcatagtcacatcttcatttgccagcttcatgtcgattctaacaatctgcaaagaaaatcaaagttctttatgggatcgggattcgagtacgaaacaagatataagaagtgataatccaactaacattctcctgcgaatgaaagagtcttgttctctcctgtctctcttgagttggtctctgctcccactctgcagtatttgacatgtctgcctcgatttgtttaatctcgagaattttgtttagactttcatccagaagatagatgctatcattgactaagaagtttaagaagttcaagtacacgcccttctcttcgtcttttgcaatctgtaacacatcaaatttggaaaaacattggaacatgatagttgaagttcaaagtcatggcaagctcactaagaatttacccgtctccatgcatttcggtgactaggcacctgccagagatactctaaaagctcggcaatgttgtggcgaatattgaacttgtcatagaactgcatttggataactagatttcagttccaataaaagcaagaacaaatggctattctggcttccagagctaacatattctcaagtacaatgcaatagagagaagttcattactccaggaatattatagccactaaacaaaatctcttgcaatcacctgagtgtgtgaacccgtgaactcaatgtcaacatatagtttcagtaaattcctgacaagatactcgagcgataactgatgtccctcaaagagagtagatgtagcagaagaagaactactgcaggaaaaaaaaaaaattagaatggtggaccacgttactgcagaacttgttgcattagcaacacaaattgacaaatgtacagctttctttcatgggaagaaaaacaccttgaacgaggcatccagcagttcagaacttcaaccatctttgctatgagatacgggtttctaacatattcaggacttgccatgaacataattatgaagttcataaagtcgtccttaagaaaagagaacaaccatcatcagtgcaaatacaaaaagagaatttctacagactgatgagagcaaactaagcataccagcggcaccccgtccaaagctttgggaattcttgaagcgaatatcagcaactccattgcatcttcaacaaaatgctcaggcatacaggagaattccatagggcaagttgacggtagaggcatcttaaagccaccgactagtccaactaaccaaacaaccattaggcgatagaaagacagagctcgctgaataaaatctccatccttcaatacagtatagagataaggcagctattactatcatgttaccggtccagaggaaaagccgaagatgttatcagagcagagaatatgattacaaaccctcaatatttgggcctcatggcaaagcttttcctgcgaagacagctctagttctttttccattcgggatatatcaagttccaactgtggagaaggtgcttgatctctcatggcttttagcgttgcaagattatcttcacctctcgagatgtcctacgtcatgcggaaaagaaaag

SEQ ID NO: 28701 - DNA, 847 bp, Arabidopsis thaliana landsberg
tgtcttgtttcctgcctcgtactccgacggtttgcctctaccacacccagtgtctggccacactactgggccgagttttctaactgccatatatcctgtgtgtcactgtacctgatactccaccacattctacttatggcatcagcctgttgtggtttagtgatgttagtaattctgttattgcttatatcttctgcatgtttgcttaggactgttagaaaccacaaaactgtttttgcttggcttgacttaatgacttctgatcacatctcatctgcttgcatcacacccatttggattgacacctaaaatactacaacgacatgattggtgttttaggataattgactaaaaacctattatcaatttggcgccgttgccaattgggtgtttgtttgctatatttgagatttcataatacttaagatcaagttctttttcaatttttctgaaagttactaactttgtgttttttctgttggactgttttgattcaggtactacgaatcaccagcttcaccagtcggtactcgttgtatgcaaacacgggcataaggaaatcagaatctcctattcaacgataacatcgaccggattgctcgtcaactcagaacacaaacagaaacagacacaatggctgcagttgtagatgagcaagtgcaactaaacaacataggtgcaggcgatgcaccacgctaccataatcagcgtaatggcatagagcctccactagtgcagaacaacaactttgagatcaaaaacagtctcgttgccatgggtcagaacaacaagtttcacggcctccctatggaagatccactcgatcacctggacgagattgataggc

SEQ ID NO: 28702 - DNA, 710 bp, Arabidopsis thaliana landsberg
cataccaaatacagctgcaggatcaaccattgcatccctgcaaatgaaatatcaatcacaaaccgaagttggagatgcaaagttgtaaacagagaggacaaaacatactgttggaccccttctttgccatatttgtcataagctgctcgcttatccggattgcttagaacctgataagcctcacctaaaacctttttcattcatgaaaatcaacaaatgagagacgtcatcagcaatttgatgtgattccagtaaaacaacatataaagaccctggaaagaaacagtaacaatatgacaaaacacctgaaagtttttagcagcttgagggtctccagggttcttgtctggatgaactttccttgcctgaagagcaagcaaagaaaggttattcacaatataaaatttacattatatcacaaagaaaaaactaactaaaagcagagtttttgcacacaaaaagaaacgaaaaaaagacttacttttaagtagtaagcctttttaatctgagcatctgaagcatcagttttgacgcctaagatctcataggattcagtctgtttcaccatgacttttgttaaccaatgtgaaacaacacacagatcgacaccaagattgcagatttgatcatgataccaatgtatgctgaaatgtattacgatttattttgccaattttcttgagagcattgtatagggatcaaagattgat

SEQ ID NO: 28703 - DNA, 2714 bp, Arabidopsis thaliana landsberg
agtataagttccaaatacactggagttaaagttgtcacaactacatggagtttaatccatcaatatgaagaatcaacatgtatatgcaaatgtatacgtaaaggattaaatcaaaaccttaggaatgccgacagtgttgcacaactcctctgtttttgccagcttagagcccgagaagagttcataaataaggcatccttcaaaaaagtaagtaaagggctttagtgaaagaatagctctcaagtgcactaagggtcgaggagcatataatctccattgagaattagtaaggcataaaaactacagtacctaatccccacgaatcaatggcccatggtggagatttcctaatagcaacccaatcagacttgaccatttccattggcttgtactgtgttcccactagccattcatatggctaaaacaagaaaaataaggaagcaaagatgaaaaaaaagcaataaatactgacaggtattcctaccctgaacatatgaacaaggtctatgatactacattgtacgctttatcaaggatatcataaaataatgttaaagaacaaatatgacagcaggtttgaattctaagattttgggggagaaaatggctttcaaattgacaagatcaagaaagtgaacaccaatagtgaatgatgtgtaccagcataggtccacttgcagattcattgctcccatcaaactctgatagaacatcaagagcatggagtttccagtccaaagtaggtgtaacaacaacacttgccagacagacattaccatgcacctgttaagacagtagaacttaagagttttaactaaaaaatcgactagccaccggttatatactctaatagctgaattatagtgttataaacagatacttacaagtttgcagtcattgttcagaaagctcacagctttacctatctggtgtagccccagtgcaaagtactcatccctaaaagcaaaattttcggaaggtaattaaaatttaccatgcagaccatgataatgtgcagtggcaaagccattattatgaaaaaaagacagattaaagtgtgacataatttgttggaacagattaaatgcctagatcctcataataagagtcatacctctgggtagctttcaagcctagctcctttatcttatctgacagcggcataacaggctcagtgactatatagattgtaactttggtagtagagccatcatgagtttcgacctcagtactgtggagaaatgaaagaatatttggatgcctcacctgcaaaacaaaatagtcgatgataatctaacagaatgatgccaatgatactaacaagaggagaaaggaatccataaggtccgacattcagataaatcaaaagggtacattgatatttatgatatttatatccatcaagtccgacagtcagaagaaacaaaaattatgcaggtgtcagttcaactagggaattcttaagtaggaatgaattacggattatataaatttattgcaacttcatacttccccgtacacactagtttgatgaataagatttccaagtgcttagagttacaacttagtactcaatggacgtttatgtcagtaatcagaaaaaagaatctcgtttgtatgaatcgagcctaaaccatgtgataaattaatgagaacttacggtacgaaggcgcttgacaccatttcgtccagcagccaaatgcccatcttgagcattgttcccagagagagcaaatattgaaactggagatccatcatcctgaagaaaccaacagtaaagaatataagattgtatcacaacttacagtatctgaaattagatccaataaagcagaaaagcagaaaaaagacataaacttaataaaacaaagccaaaaatcttaaaactcagagtactcacatattggaagaaccaagagcaataataattcgaattggtaattcttaaactacagctactaagcataaaaatcttaaagcttctgaatcacgttacatttcctttggtatcgtatttcgttttgacataaagcaacactaaacagaaccgaattcgattacacagctaatctgcagaactcaaaatcctaagtataacgataaaacaaacaggataaaaaaaatactagaaagaagagctaagatcaaagcaagtaacaggaagaaaaaaaacgcagaattacaaacatccggagagaggggagaaaagagaaataaccttggaggtaccacgaaagtgactccatgaaccccaagcagaaggataaggatcaccgatgttataaggtagatccttgagtcccgtcccagatccagccactactccttttaagaacttaaacatgtttccaccttctcaattgaacaacgttgctgctattaaacggatctatatggaatcagaagaacgaaggtggagcaaaacgggataattcaaagctttattcttatgattcttctccttcttcttcaatctgcatcttcggaaagaggagaatttcgtagatttgttttttcgctttctaattcgtcggaattattatgatcgacctgaacggacttactccattgccgttttcgtgtttgcttattacaattcgtgttgttttatttacttataaaaacgtcgtagagtttggatctgttgacatttttattttgggccgaattaatagtatgtgggccgtataattttgtgggcttatattcttgtc

SEQ ID NO: 28704 - DNA, 6010 bp, Arabidopsis thaliana landsberg
tgaataatggttgatgtaggtgtcaatttcaagaaggcattgtttgtaccaaacatgtcggtgtatcataaggttggtacagcagctgatttgccagagaatgatccacaggttgacttgtcatggcagttcacacttcagaaagtgtgggaaagccttgtgcagagtgaaagaggtagtcctaaatctttatgatcatggaataaaatcaacacgtcacaatcgttatctcaacttaactcttcttgtttggtcacgcagatggagaaaaagatggtgaaagtaatggaaacagtgaggtgtttacttcactacccatggcaataaaatgtctaagggacactgtacatgagagtagctcagccacacgtttccaggtataaaacacacccgtttttctgaacgagtgttcaatccgggttttcagttttcggataatgaatagttagcaatgtaagatggctcacggccggtttgtgtgggcaggtccttgtaactggttcgttacatcttgtggccgatgtactgagattaatcggaaaatgaagagaaactcagcacaagtctcctttcacccttcaatacacgagtcgtcatccaaaaaatcacaagtacccggctgtggaagaggatggcatttcttattaaaagctattttgtattatttcggttttagtttccagcttaagtactaacaaagttgtggtgatctttttcaaattcaagagcaatagttaacaaaaagaaaaggaaacatgttggcaaacgttgtgacatggttaatgatttgcttcctccagattaggaaacgcagtgtttcaaattatacaagatctctaccaaaacccaaacggatcaatcataatatgaaatcaaaacggattcgatcggggagaggaacacatgaagagtaccaaagagaaagatataaatccacacatcatttaaacacaaaaaactcacaacggtctcccctaaagcctttgtctgagctcttgattctcttttcgcaacaactttaactccttcatttgctccgcttggttctccagaatcgagcttaacaccttcgacatctccatctgttaaaaaagaaacagtttcagtcatttaaagaagacatggatgagattcgagtaagagcaaacgatacctcgtgcatgtggaactgtctgaggatctcaatgtgaaggttccttacgtcgtcatgaattgagttttggaaagaatccagagttccttcgagcgttctttgaaatagctgaagcgtgaaattgctactacccatcacttgctgttgatccgtttgagattgcttcaaccctccctgctacaggtttgcaaaagttagtgaagttacagatatccaaacaatatgaactctcaggcttttgtgaaacttttacgtacattcataagcggcatagctcctgcttctgttgcaactactgtctctggtcttgccaacagatgatttaaaacttcctctctcgtttctgagcctgttttctttatcttgggtgagccacccagactgagagaggccccgtcactaaaggaagaagtggtgctgattctctcagcatatgttgagaacctacgagtaaaatttggtgatagcctcaacgaatcaatgttaccaggagctgtgatgccttttgtaaacaatgggcttgaaggcaagttgttgtctgtctgtgttgaggatgtctcaaaggttgaagagaagtctctgatccgtgggaattctaagctagcgtttgcgaggtttgtctgaccatgcgacaaggggaaatctcgagagctagagaacattgatccagatgtactagcacctgtgcttgaaacagcgagacgtgaaggtgcatgcaggtggctaaatttatcagaaaacttctcattggccaattggttaaacttctcagaaaatttatcaccaccccatgcttctggaggtgtcaaggcagagtcttcacttttggatgatgctgttggcgtaatagatccaaaagacgaaaaagcagccctcgggtcatcctgtgtaaacaatggaaaacgtttgaaaccgatgaaacatacgaaagagaattatagaaggcaagttaaattaagtccagccagtgtattctgtacaaccacaaataaacagactagcagagacttgggagacgtaatgaagttatgaaattgatttataaaaaaaacaagcacttgcttgatgaagaaacacgaacctgtttcgaagtagagcttggtttccaatcgaatattggatgttccttgtttccattgtctccaaacgaatatcccttggtggatgacggaaatagcaaagaggacggcttgttgtcaactactaaatggtccttattattatatccttcactatcagcccacttatcaacagatgatacgtcaataataggtgaaaaaacacccatatcatcattataactgtcatttgcacgaagtgcatgcagtctgcccagtggcccactaggccatagatgatttctatttggtgtttgttcaactgatgatgcatttacagtactcgcggatactccacgggaacctggtgccatagcggactgtgaagctgagggtgtcgttgagggaagtggatctggaatgacaactgaatcttccacagtactgccaagaagagccatctcagaagtgtaatttttctcattcacaataactggttttgatgtttgccatgataaacttgttacatcctgatcgatacaaacaaatgctgttaactttgcaatccaaagtattatgtatcattagtcagttgaccccaacaatatacaccaaaagaaaaaaacattcgctgctactattggagatattaaattgatgaagccgctgacaaaccaggatagggacaacaaataaacaactaatactgataagcgcaaaatgtaactatccatggaaccagattcgttagataggacatgctaaatagattgcagtgggttaaatatttacctctgaattactgaaagcgtgcaggacagtaacaggctgcggttttccacggacgtcgtaaaacactactctaccgttactggttccagctaccagaatatagccattatccccaaacgccaaagaggagaaaggtgcctcataggcaatgcaggacgaagatcttctggatccagaatcataagtgtaaagctttttgtccatcccgacactagcaattatctgttacggtagataatctagattgtaggttaggtagatactatgtttataaactctatgtcaagagcattagacaggcttatcaaaattgagggtgacatgcacattgtttgcagaatcaattgcaaccacttttttctgactttcttgcgtatctgtagcaagagtgataaggattcagataccttttcgtttgatggagagaagcaaacaccagcagttggtgccgaatgctgcttcaaccaggacatctgtggaaatgaaagcagagaaaagttaattggcttcccaactgcccccccttcccccactaaggtgtacaacaccatcaaaataaaagttcctaatagcttttcaaaattgacaggagagccaatgtaatggaaaatacagtcttttccacatgaacaccaataagtaaaagagtaaaccttcgggctacgaccagttgtgtcccacagatgtacagtgccatcatcacctgcagtaactaggaggtgtcgactagaccttgaataatcaagcaaccttaatacctggtgtcttgaatcgattaaaaagtcaattaatttgatgaccaatgctctggtctatagatgtaagtatacatgtacaaactgaacaacctgcccatttggatctttgagttcggtagcccttgctccagatgcaaggttatggactattagatccccaccaacactaacagaagccaaatgctcatctttgcaattgtacatcacacccgttattgtacttgtatgacctttcaacttcttaatacaaagctttctttgcagatcccatatcttaacaatttgaccagttcctccagaacaaatgtacctggagccttttttgctgaagctaatagccgataaacattcctgaattcatcaagacacaaacatagtatcatccaagagatgcaagacatggaaattagaatcagtggagagaaaggaatataacctcagcactatcaccaccgtccttcccagtaactggaactgttcctaaactctgcccatttttccgccacagggatatcttcttatcttctcccgtactcgccaccactaaatctgcataccaaataacataacttcaacaaatggaaaagaaaagagaacaaataacgattttcaccagattgaattaaagagcatctaaaacacaacgattttcaccaagaaacttgtttgcttccagcagaaattgactaattgcattcccaattacgattcctaaagttaaacagaacctcaattttgaacagcagatcacagaaaatccagatttgttaaatactaaaactcagctgaatcattacagaaacctaagatcaaaagtggaatcactacttcagcaactttcctaaactctcaccaaccaaaagaaaccaggaaatgagactaatcggagaatacatactcgtatgattccacttgacggagttgacagcacaaccaggtgacggagtatagctcaaaacgcagggatcgccggaatcggcagaaacgtcgaaaagcttaaccgtatctccgccgctcgctgccagaaggcgccacgatggctctaccaagttcgacatcatcgctggattcgggtttggactcagagtcagtgaattttcccgggaaaagtcagattgatgaatgaatcttagagaatctgaacaatgcgggaactctacttttttctcgagagaacagcagaaaccaaattttgaaccctatgagattagagacagattcgaaatgacagaaaaacaaaaaaaaaagtatttttgaattaaattagtttctcgagcgcttgtccgtccaaatgataaaggctttttcctcctttgaagaaaaaaaaagagcagtgaatattaacattttctgaattaaaaaaaaatatagttttgctacatactatggaaatgtttaaaaatatgaaataaaaccaaatattataaatctactaaacaggtttttttttttttttttttttttttgaacaacatctactaaacagtctataattagatttccaacgtttatgagtatttttcgtttttttttcttaaaaaaaggttcctaatgtattattatgtacggtaaagttgaaagtatgataaaatacaaaattttattaacttactagaattagctcctcaacgtattttgtgcaaacttattcgactatatactgtgttgttggtcttgtttaagaggtttcaaaatgaaaataacacatttgaaagagtattaggatttgatgagtcaaaatagagggaaaacgttacattttggtttaaatagtgattagaagctcaatttcagtttcatttgctatctacacatgtgagatttagaaacatattagtgttgaatagtggaatcactacgcttaacacaattgtaaaacatgaatcgagaaccgatccttagatcaccatgatttgatatccatgatagagtgactgagtgagagatttaggagtggaagaattaatatttgtgtataaattaacttcacatagattcgaatcattcgtctaaactttaaactactcgaactctagaagacattgcagttcctaactcctgctgccttcgaattaattatctactttttattcctaactcctgctgccttcgaattaattagctgaccacttttccgattcttagcttcagcggcccttgaagtcatttgaccccaatatatcggagaaaaataaaatctaatttgttttctaggtaataatataaatttggaactggtctagcgatag

SEQ ID NO: 28705 - DNA, 2661 bp, Arabidopsis thaliana landsberg
aatgtgtataccagttaatttgacctgtctcgccaaataattaactaacaaaaatctaaaactttaacagtgaaatcttttcatattgcacaagcagtcaagcgcatgaaatgtcgtcgcataactattaaatataccatgtactttacattaacctacttatttttactcgatatatctacctaattatgtttataaactatatatacagtctatacttaagaaactttttacggtgatctatcttttaccttttaatttttattacttgaataacaataatctagatgtaacatgtgttcgcttttaattttttgtaattgaatagatttagcttcgttaaacacatattgattgatgaatgcttgaaattattgttctacaaaaatactccaacaagattttgaaccaaactagagatcaggcttgcatgattaacataactatccattgatgtaattataaactatcaaaatgaacggggtcaaatatgtgacaaagtcataattattgacccaatatgggctttttgataaggcccacagacagtttttacccaagttcctaagaagaaagttgggtttttgctaatcaggaaacaaattcgtagaagaaatattactgcatttggagaagaagtcaaaattaaagaggaatagactcacaaagtcaaaagatcaaaagataagcacaagatttgtattaattaaatacctaatgtatcaaaaacgactatttcgtagtgagaatcaggaaaaataatgacacacaaacacgcaatccagaataaacataacacagatatctacctaatctattttatcattaatttaccaccacaccattttatgaaacgtagtcaaataatcaaaataatagcttttattttgtataaattaattaaataatacataatctactctaatctaccccaccaaaccctataataagttgcgtgactttcttatattaatcacgatttgattgaattaatacattttttctcacctaatcaaatctttctcgttctcatacaatatggagagaaactcttgggccgagcagtgggacagcaatcaacaatcgtcgggaaaaacaactcacggcggagaaggtggtggtgcatcgtctaaatacaaagagaaagtgggggctggattagggaagacgaaagcggcggcgagttcggggttaaagaaggtgaagataggaacatcgttgggtcttaattgggttaaagacaagtacaacaagaccaccactaagaattgactcatcatatctttgtttttttggatttacatattcgtcttcttcttctttttgtaaacgataaaaatctgttttgattcttgctatattcataatgatcggagatattaaagacttttgaaaaagatgatttggcttggtttgatctttttattgttccgtggaaatggggtgaatcgtttggtttgtgaataattttactaatcattttatatagttcgaatcaaaagttgaaaaactcaaaaaaaagaatctggatagtttgatcttgtgcggaatattaaactgtgatgaagaattggaatcgagtctagattcttgatgactctttaagttttaaaccggtttagctaaaaatctgcaattttgttgaatgtcccttttgattaaacaatttttacaagaaaggtaaaaaaaagacagcctcgtataggatgcatataaaaaaatgatgtaaaaatggttagaaatccaaataaatgtaaatatccatgaattaaatcaatcttatttttaaaaggtaaaaaactattttatatgagcagctatcagaaaaatgggtcagatatcattcttagaaccaaaacggaaagtcccaacgatcccattttactccttttcaccacctctagtagcagagagagggagagtatggcgattacggtgccgagacggcaactcttcatcggcggtcaatggactgagcccgttctccgtaaaactctccctgttgtcaatcccgccaccgaagacatcatcggtactttttattttttccaatcatatcttgtgttactcactttttgaacttgatcactcgattttcgcgagtttcgattcaatctatcgttatcggaactacgcatttcccgatttgctgtatacttagttcgcgaattgaaagagctttgaacttttgtctgtttgagacgatcgtcatttcttctgtgattattgtctatgaacgggagcggaagttgtttttgcgttagatctgtgggattatataggaggagaatagatagatatgtagttgaatgattggattggatctcttctcctgctgatggagttctttgtagtgttttttaaactgggattggtggtggttttaggttatattccagctgcaacttctgaagatgtggagcttgctgtggaagctgctaggaaagcatttactaggaacaacggaaaggattgggctagagcaactggtgctgttcgtgccaaatacttgcgcgctattgcagctaaggtaacaacaatgagttaatcaaatctatgttcctctcatgtttcattctctgttagctgttttgcctggcaataacataatggaaatatccaggtaatagagaggaagtctgaactagctaatcttgaggc

SEQ ID NO: 28706 - DNA, 2345 bp, Arabidopsis thaliana landsberg
ttcatcaatgttgaattaaagaaactatgtttgaattaagagggatagcatcgttttgagcagccatggcgaaaggtgtgaagatggcggccttgaaaaaaaaaattaggttttattaggagcgtttatgctctgataccatatagagaatggtaattcttattattcatagtaatgggaagtacacatatatatacagagcctaagaagtgattagggtaaaactaattatataaacacccttaactaagtgataacatatatatatatatatactcttatattctccaccatctttatctctatgcttggtttaataagctgtgtttaatacaaatagaacacacattataaggaacgaaaacatgaactaaatgcaggatttatcacagcatttagagtaaaccgataaaaagacactaaaagaaaaaataaccgtcaatgtgaatagaaagttacgatgaaaagacactagcgaaaaaaagaaattattaatatattaacgaaaagttgcgataaaaagatactaaccaaaaaaataaccatcaatcttaaaatgacaaaaatacaaacgaaaaattgcgataaaaatgtactaacgaaaaaatacaatgttagcgaaaagttacgatgtaaagacataaacaaaaaaaagtaactatcaacattttaaatgttgcgataaaaaaatacaactcttcagaaatgaaaaagacattttgtttttggatttatcatgaaataattaaataatatgtggtaaagaacaaaaatttagaaattatttaagaagaagaacgacacaagttatgttgttttggggattaagggattgagttttcgatttggggattttgttttgtttcgtttagtacaaagcgacgccgttttcggttttaacagaactcattaacgtctgctaacggggttaatcggatctattaatgcgagttaacgtttcgtgattttggacagattaacgttttgtttttgttaaaatggctggtcaatgtttttatcatatttaatttggccgaccttagaatttacgtattgattggctactttttgaatgttcagtataaaacaacatttttcccgatctttatgatatcatttttattgatatgtttctttttttctttttgttaaaggatatgttcttattttgtgacaataatatataataagagttcttgattatgatcaaagtaaactttttttgtagaacccatgacataacatacatgatacaaccaattattcccactttgaggttcctttcactaatattcaactaatattagattattattttattagcttctatacttttaaaaagtttacaataaaaaagtgaacataatctttaaaacagttatttatcgtgaattattttgaaaatagcatttattaacacacattttctcttaaatatctttaatttcgtatttatttcatcaaaataacaatatttaatcgtaattacgaaaattcaaaattggaataaattgttttgctaatcgttatttattgggccataaccagtagagaaagcccgaactaaatatgggccgatacagagagaccctaactcaaatctggaaacaaggacaaaatggtaattcagacaactagtaatgatttatcattattgattcatgatgaatcatcatcatatgtgtaatggtatggtcaaaactgtgttaaaaagatctctatctcttgaaaataaacatacattaaacaaatacgtggcagtaacaacaacaaagttacctctcgctcaaaattgtcccttcttagctcatcattgatccactgagagagaggattacgaatacgagatcggagacatggcggagagtcacggtggtggtggtggttgctgtccgccgatggatctgatgcggtcagaaccgatgcaactcgttcaagtcattgttcccatggaatctgctcatcttaccgtctcttatctcggcgatctcggtctcgtccagttcaaagatgtacgtatagagtttactctctccatgatcgtctctctcgagtgttaagttttattgtattgcgattgcattagaggatatctttagtgaatgttgaactagtttagttgttcttcttatatcggctatttttgatgttgatttcagcttaattctgagaagagcccatttcaaaggacttatgctgctcaggttagttcaagtttatgcgaatgctgaaatgattattatgctatttacacctattgtgtgtgtaatggtggatttgatggataaagataaaaagatgtggggaaatggcacgaaaaatacgtttctttaaagagcgtatgc

SEQ ID NO: 28707 - DNA, 1473 bp, Arabidopsis thaliana landsberg
gatcaatggagattaatttaattccttataccagtaactagcaaacaatccctaatcttattttaaatcttcgtaagtcttaggtataataagcctaacggtttaccctaggaagtgcttctaagggttattccagaaggaccagaaacagagttaccattcaagaagattcagtcccggatataggtgaagacaactcggaaccgacattaagatctctttccctaaagccgatttgacgaaacagttgacgaacttcaaagcatctcaagcactcaacttcatacacaacctttatcccaaacgcaacaagaagttgtttgtcttgtgtagttatgagcactatgctccctggaccaaaacagttaaaatattctgcaagagcatctaactgttcgagtttgtcgacattgttagccacaagtagaactttctgactcatgagccttttttttatcaaccctgaggtcttcatcctcgagtaccctccttgaatcctgataagaaactcgtctattagattcgacatttgacaatcgtgagggatccctttgacgttttcgagaaaacaatgactttggaatttcttaaagatcttttgataaacgtatctagctagagctgatcttccattacctcctcttgcccaaattccaaccactctcacaccttcattagaatccaaatccaacaatggatacaactctttcatgcgtgcatcaaatccaagttggttattgatgctctcacttggtggtgttaccgagaataacatgtcagaaattctcttggttatctcatcgagtagcttcgagtcatcttcgctataacagaggaaagaacgaacttgattcaacaaaaccacttaggattcaaattgtgataataaaacaaagatagaaaagtaccaatcacgagaacaatggccggagatactggccaaattggtcagagcttgtctccatgacaccacagtctcataattttcccttccttcatgtttcctaaactgtttagcgacctgttcgatttgtcttctcacatgagcaggctcgacgttgtaaaagattggcataacgatgatggaacccttcttttcgacatccatgatcatcactagctcttggagacaccagggagacgcagagtaattctttgagataatcacaacggcgattttggagttttcgatcgcggcgaggagatctgaagcaatccgacgaccactctggagttcaacgtcgtctttgaaagttcgaatacccatttcaatgagttctttgtaaagaaagctaatgaaggtcctgcgagtgtccttgcctctgaaactcagaaagacgtcgaacttttgtggagtagctgaagaagaagacgatgatgaatacattggactgaatcaaaataaacatcggtttttttactttcaaactttggaagatgatagatggcttgatttgagaagttagctaaaga

SEQ ID NO: 28708 - DNA, 2148 bp, Arabidopsis thaliana landsberg
  unsure (1)..(2148): unsure at all n locations
aggaccaggagagtcgatgcttcagagcatgctcgggtcttgtaggctgcacgggaatgtgaaaatgggagcaaaagtggctgagcttgcaatggaaatgaaaccggaactgtcaggttcttacgttcagatgtataacatctatgcagagaaagaagagtgggataaagctgcagagatcaggaaagcaatgaggaagaaaaacgtaagtaaagaagctggattcagttggatcgatgttggtgacactgaagggtctttaacgatgcaaggtttctcttcaggggataagtctcatccaaaatctgatgagatttatagaatggtggaaattattggattggagatgaatttggaggggaaagttgcagtttaggactcttactcagagttctaaagagttgtagttatagatcaaaaattagaaatgttagctatagatttacatgaactcactgagtgtatgattacttttatttttgcacctacatacgtgcacattgattttgtaaggaccatggtaaaccggtaaagcatggttctctgattttgaccttattgaccggttcgattgattaatccaacgctacgatcaaaatagacgactctaacttttctaggtcaaccgtaaaatatatatactttaatttctacaaatagtatcttgaaactattaaactatttattaggttcgaatttggttggtattattcccaatccaaaggctaaaatcaaaaaaaaaaaaaaaagtcaaaataacaatggattttaactacaaaaagtttcaagtttatgggccatttcaagtttgaaacttttgttgttttttctatctaacgaactcaaaaagagaatatgatggctttaaggtatgagtttggtgttgtactcttactcacgtctctttacatttatcattgtataacaaaataagattttaatagtaactttgaaatgattcttaagcaacttaaaaagcgagagaagagaatgtttacgtcgtcgataacctcataatgcggattattcttcctaacacgttaccctctacgtaccccacttgataagccagtttacactttcccttccaatttactttttctaataaaatacttttgtcttccgtcgtcaaacaaacaaatgtatgacttaataagttctatcaaaatgaacgttcatatactcagctgattataattgacgcaacttaaaaaaaaaacagaatgaagactcatatattgtaacatggcttgtatcaactataaataatatttgtctagaataaagactccgatggtggttgaaacttcaaactaaaccacacaggacacagcttaacgtatcattataaattaaagataggatagtaccatactagttagtaatttgactatttattaactacacaaatttttaagaacttgagtgttatacatattgaaagtacctgtaacttgattttatcaaatcagattttaagtacttattaaaggctgaagcatatgaaaatataaatcaatttatatatgacttgttgaagcttttaaattaaggagcgtatcaaaaaacttaaaacacacaattaacgcgcgtgtccacgctctaagcaaagcgagtgaaacatattaatttacacaatcgaaccgtcattaatgttatgggttgtctcctatttctggtttaaaagagatattaacttaaatcccacgtcaccaaatattaaaaataaaataaaataaacaaattatataaatttcttaacgcacaatttgttgttttccataattccatttacccgaaaccctaatccccaatttctctttcaagttttcgatcacgatctctggaaaattaagagagaaattcaaaaacttcgggagttcaaagtctcattcagacattccagaaggtgatctcttgtttcagtttttctccctttttgttgattgtttcaatattggtgttttatccttcgatctctatgaaagttgnnnnnnnnnnnnnnnnnnnnnnnnnnnnnnnnnnnntttacgatacccttttcaatcgtttggaagtttttttggtttgtcctaattcgaattattcttgctgtctgaagaatctgtttggaagtaaatttggattaatcttgcttagctcgtatct

SEQ ID NO: 28709 - DNA, 2217 bp, Arabidopsis thaliana landsberg
acataatatgtaagaaacctcaaattggtacatagattgaagatcaggatttagaaagaaaaaaaaacctcgcgtctttgagaaaatcgatcagaatctcgaagattcttgatgagccctctggtgtacaattgtttctcatgttgctgcaaagacgctttgatccgaataagcagagtttggctagcctcgggtgaccataaggttgcataggaacggaacaaagaactcttgtaaccgcaagcaagaatgcgctttgcatgttgttgaaaaatcggtgtcatgctttttattaaagtaaatgattaacaacactccagtagagtgtttcgtattcgtgacctataaggacaactatcactcacttatagctaaaaattggtagtggccttagttaggtttcatattcgtgacttaacaaactcttcacacatctagcatgactttttcaactaataaaaaaatgattaattccgtaactgattcaaaaaagaagttatagagttatgttaatgattggtcagtaaatcaaattagtccatatatttcggtttgaacaaattatttacacactgatggtagcattttccttaaagaacacttcaacaataataacaaatcatgttctgaagaattgaaatatatgagctaataatcgttaagcaacattcgggataacccaagaaaatacatatattcctaaacaaactcctgtatagtttactttatatatatacggaattatctacctttaagcttacactgagcagtaaaaaaacagagtgaagtcattataacaacgaaaaccttttcttttctcgaaatagtattatagattccagagaaaggtaaagaaagagaagaatgtttcctctggaactctaatatgattaatctctcctttttatctgaagattttagcttcccctgtttacctgatggaacaagagaatgacattggaatatgactgaagctggaaacatcgaatatctccatgaatctttgatctgaaactctagctttcgctgctgcaaatcgttggtactcgtcgaatatcgatgtcaaacaccatttctggagcttcctcaagcaaccaacaagacaaccggtccgatgctgcaaattccagattcatacttagaaactcattttcttcttcagtggtggagacaaaagatgaaatgtttaggattggagtgaatgatttaccttgcctcgcttacaatgaatcagaacaggatggtttttctcatctgaggattttaaaaggagagttgttaataaaccaagttagaattagaaagcatacaaaaagtgtggttacatgtgttcttttatttcagcgcttctatatgattcatagttacctagaagcactttcagtgccatgcggattttatggtctggaatattcacaaatggctcctgaaaataagaagaaaaaatgtctttttaaaattgtaagattatatgtcaaaagatcaatcacactactaaattgagcagattaggaaagtctacaagttatgaagcatgtctaatgtgataccttttactggttgcgtactgagagaaagattctttacttttttatatcaaaaagttatctccacacacaacaacaacaacacggaataaacacaaagtcccattgaaagacgaatctatgagaagaaaaaagcatagcaagccaagaatatcagcgataaaggtttcctatcaagatcgaagttgtcacactaattataaagaatctgagtccagaaacaaaaacaaaagtcaatgagatccagattcttccaataaaatcactacaccaagaagagaaagccactttattttcatctttagtgtaaaagcaaaactagggaactatggtagtaagtatctaaacgactccccacataaagaatcgactatcctaggagtagaatcgacagggaaaaggtggattctgtggggggagagaatgatagctactgcataccagaacaaacatattttctttcaaacatatcaactcaaattagattcatacccatctcttcagaaaggcgaatggtaactcatgagggtaataagttcaagactctatggtgaagtttttggttattctatcactttaccaacgatttgcccaaacatgagccactaacacatagaaaaggaaaggaactaaaggttcgtattaaacaacatttaccgacttacaacgt

SEQ ID NO: 28710 - DNA, 6026 bp, Arabidopsis thaliana landsberg
  unsure (1)..(6026): unsure at all n locations
acggcgcacagcgccttcaggcaaaccttgaatacactagagaacataaaggacgattttttcactcaaattgccagaggtagaacttgctttaagaccaacgcttaactcaatatgaagttgagatacttaaattctgtgatttatgatacctgaaatatggcagaatgttctgaatctgccggaagaatctttacattatgtttgttggcaagcggaagcacgaaaggaccacctgcgattaatgtctctttgtttgcaagagcaatgtcctttcctgcttcaattgcagcaaccgtaggctgcagtaaaaataagcaacaagctttatcatctgcaactttcttttttcatattctcttaacaaggtttaataacaaaaaataagagtgtataccttcagtcccgcacaacctactattccggtaacaacggttacagcttcaggatgtcgggcaacctgttgatgaaacataataagtaaataccctatgaggatagaaattttgtgaatatctacactgcaatcaaaactaacaaatgaactaacctcaatcactcctagctctcctggaataatctcgggtttatagtccaaatcagctaaagcctctttaagctcattaatcagtgactcgtttctaacagcaaccaacgcaggcttaaatctccttacctgccagcattcaaaatagagtcacagaaccatactatagagatttcttgagatcgcagaaggaaaagcctaaaccagaacctgatttctctggtttgatctgatacataactagttaatactatcttgcttatgatactaccactgaactgagaattaaactgaattccaagtggtctgaatgacaaattgaagagactcaatactaatttttttagaataaatagtgttataatatcttgcttatgatactagcactgaattgagaattaaattgaattccaagtggtctgaatgacaaattggaggtactaaacactataaaccaattttacctgatcagcaagtagagtaacattcgaaccagcagctagagccacaactctaaatttgtcaggattctcagccacaatatccaatgtctgcaaaatggaagttctcatcaataaaaatgatgcaacaataactcagtaagaaaaaaataccattcttctatgagtctagtcattcataagacaaattatangtctggtcctactcaagaactgcacaataatgccttaatctaacttcatggaacaaaaaaacagaaataaaacctgagtgccgatggaaccagtagatccaacgatagagatgggttttggtccatcccaagattgacgaggcgcctcaggaacagctctcccaggccatgctggaggaggttgttgttgctgctgcactttcactgaacacttaacaccttttccaaaacctctcccttgatccctcctcctcaaactaaacccacctgtgacacactccaaagatttaaaattttaaactttacgacctaaagcaaaccaaaaaaaatcgaaaagaagaaattaacagattacccaggtggagaaattcacaagagcctaagacaactaaagaaagtttgcaactttaatgaaaaagagagttgagcaaggaggagataagaagagaggaagaagaagacacctgagagtttagggattggattgaacctggaggtatccaagaaagaaatagctttggattcagctggagatagtgagtttaatgtcatcatcagagtcttttaaaaatcgaatattttccagagaaccgcactactactcttgattatcagagaagacgaatcagataaacagtgtgagagagagagatgatgataagaaaggaatctggatttgaatggtacccaacagatttttgacattttttaaagatttcgctgagcatttagtaacaaggacctttttattaaggtaacgacaacttgtaagtggtaaataatccagtcttactatgttcccattttctatttgatttctttagagtattaaacagcagaatctgtatcatcaattatatagtttgtcaaatataattattattagaaatatgcattacaagggattaatggttaaggatttctctcttacaaaataaaaaagaaaaagtttatggtattcgttcgtattatgaatttttgatatgaatatcttaaattgaatatgttttgactaacatgttgtatgctgtctttttcaaaaataaaacatgttacatgtttttttttttcttcttctctttttttttttttataaagtacatgttatatgctgtaacaattataatccaaacgtcaaacttagtttagatctttgacaagtatataatatacttttctttttaaaaattatgtattgaatatttttcactatcattcttttttttttgtcaacatttttcactatcattcttatttctttgatatgttcctcaatgttcaatttgtaaatttaaatttcaaaagccatgtaactttaaccaacttgaattttttacgtatataattctctatatctctaattagagtcatgttaggttcgattgtttaaataaaattagtcttcttgtagactattagatcatccgttcaaaaagattattgttgtttgaatggtgctctcttttctttcttcggaaacgaataaaattatcccataaaaagaaaagaaaaagaaaaaagataatttactttatttaagtgtgattaagctgttatgattgactatcacattacatagtgttttcgtggggatacagagatcaatagataaatgataatggtaagataatggtatgttggtattggtagatgagtcagtaaatcatttactactgctaatggatcatctgaggacaagtgttgtacgttaagtgacacatggcaaaacagtgaaagagacgttaaacaagtgttacttgctgcatccactcaaattccatcccaagtcatgcatgcaactttttctttaaacatcggaaatcggagcctgaattaatgcgttaactaatggaaacaaaaaccataattacggtgtagccatctctccaattccgattccatttcaagttaaccttatcgatatggaggatagcaactctcacccgcaaaatcaaacatcaaaaagaaaaagctctcacccgcaaaagaagcaacgtatggagaatgaaacacgatcggctaagttgttggatcttgatgttcttgactgtccggtttgcttcgagccgctcactattcctacctttcaggttatgttttgaacttgcatgcattttattttgtttcatgtgacattttgatttcgcttttgttaatttattttattgaatacggctttgattgtatctcgtttggtatattatgcgtttcagtgtgatgatggacatatagtttgcaatttttgctttgccaaagtgagtaacaagtgccctggtcctgggtgtgatttacccattggtaataagcgatgcttcgcaatggagagggttctcgaatcagcctttgttccatgtcaaaatactgagtttggctgcacaaaaagtgtctcttatgaaaaagtgtcaagtcacgaaaaggaatgcaactactctcaatgctcttgccctaacctcgaatgcaattacactggctcatataacatcatctacggtcactttatgcgtcaccatctttacaatagtacgatcatttcctccaaatggggatattccactgttgatgttctaataaacatcaaagaaaaggtttcagttctctgggaatctcgtcagaaacttttgtttgtagttcagtgtttcaaggagcgacatggtgtttatgttactgttagacgcatcgcaccacctgcttcagaattcaagaagttctcgtatcgtctttcgtatagtatcgacggacataatgttacttacgaatcaccagaagtaaagaggcttcttgaagtgaattctcaaatccctgatgacagtttcatgtttgtccctaactgtttactgcatggtgaaatgttggagttgaagcttggcatcaagaagttgaaacaaaagtaactagatctagtttggtttggggttacgagacgttctgttttgttgtgtttgttttaattctctgtttaagaacctttgtacttttgtagtagcccactcttgaatttattgatgttgttgttttgagttagttgtataatccaaaagctttctggtttggttcccggttcggttttgtacatagtaggatttttaataaagcctgctaatgaggttcagcaagttaccattgctcaggaaactgttatggaggatcctccaacgtctatgtttaagaattcagtaccaattcgagaggatcaaattcagaacgctatcacaaattccattcgctaatcttagaattgggcataaattctggaataatgggctcatttggtattagcgtccatacacattgtaggcccaattaaataatagaccaagaaaaattaaaaaccggacaacgccgttatctcttcttcgtgtgaccaccacacatacatacataccactcaccgtaccaaaaagattagaccaacaaaaaaaaaaaataaggaccagctcagatgagtctggagtttccaagtttaaaatctctctacctcgatttgagcaaatcctgatttactctcatcctcatcatctctcatcatcgagattcatagtctcttttgccgcttggattcttccaaggttagtgagctgctatggcaactcatcagcaaacgcaacctccttccgattttctcgctcttgtcgatgaaaattcccagattccaggttcaaattatactttctaattattattttttaaaattttatgatggattccattaacagattctcagtatttcgcctggtgatgaactactacgattgcatggttacagatttttattgaactattattggtgatgaatgttcaatttacaccaataccaaagtttaaacctagaaaagattgatccttatggtctatatttatttgatgatatattagatatagagtaatacatagtaggatttctactaatgttattgttgataaatgtgtttgttctaatgaggttcagcaagctaccatagctcaggagcctccaacatctgtgtttaagaattctgaaacaatacgggaggatcaaattcagaacgctatcaaattcctttcgcacccgagggttagaggctctcctgttatacatagaagatcttttcttgagaggaaaggtctcactaaagaagagattgacgaagctttccgccgtgttcctgtaagcttcctccttacttcttttgtttggagtctttttccattcctattgcttacctctctgtgaaaaatcttaatcataggatccaccaccaagttcgcagacaactgttacaacaagtcaaggtaaacagcaacgacatgtatttgtttgtttgttcctttgattactagactgggaggtaattttgtatgaattgttatgtgacaagcagatggacagcaagcagtgtcaactgttcagccacaagctatgcagcctgtagtagctgctcctgctccactcattgtgactccacaggcagcttttctctctcggtttcgctggtaccatgctattcttgctgttggagtacttgcagcctctggtgccggtacagctgtttttattaaggtatcatgatcctgttctccatttatatgcagtgtactgagttttttatgttatgaatttactttgtacactggatnnnnnnnnnnnnnnnnnnnnnnnnnnnnnnnnnnnnnnnnnnnntgggataaaatggttaggccattaagaaaatggaagcagactatataggaatttggcttatctaatcaatttcattcctctgacactcgaacaccagaatatagttgccaagaactntcatgaaaatattatccgtaagagtttgttagggtgttagaaaagttgta

SEQ ID NO: 28711 - DNA, 1386 bp, Arabidopsis thaliana landsberg
agaaagagagcgttatcggtttatgaatgtgaagaaaatgaaagtgttttcttgttatgagaaagttagagggaggtctgttaatattctcgaaggacttgaattgcataccggtgtttttagcgcggtggagcagaaaaagattgttgattttgtctatgaactacaagagaaaggccgtagaggagaattacgaggtttgcttctggttttctttcattgctttttgcataatgtgaatttgaaaactctaaacggtacttatctaatcttgaatttttggttctttttcgatatctagagcgtacttttaccgctccgcataagtggatgagaggcaaaggacgagttactattcaattcggatgttgttataactatgcaccggtaagtgactctttcctcatctttaaaaatgaaaacattttatcaactatagtgaatatggaaagagttttttgttttttggataggacaaagcgggaaacccacctggaatccttcaacgtggagatgttgatccaatgccatctattttcaaagtaataatcaaaaggttggttgggtggcatgtacttcctccaacttgtgtaccggatagttgtatcgtcaatatctatgaggaagacgattgcatacctcctcacatcgataaccatgacttcctccgccctttctgcacagtatcattcctcagtgaatgcaatatactctttggttcaaatctcaaagtcttaggacctggtgaattctccggttcttactctataccgcttcctgtcgggtaaatcactaaagtttgcgtaccctctctgagtttattctactgaagcttctgttgcttaactttttgacgagtttttcacttttttttgcttcagatcagttctagtgctcaagggtaatggagctgatgtcgctaagcattgtgtacctgccgttcccacaaagaggtaatttgttagcaccttgattgtttgtcaacgtttatttatatgtttggtaatgaaaccattactctctctttttacaaaaggatttggtgttttgcaatttatcggtgttatctcgttttgttttgttcatactgtttttgctatcgtcggttctgctttcaggatatcgatcacgtttaggaaaatggacgagtcgaaaagaccagtcggattcaccccggaacctgatttggaggagattaagccgttgccatacgaacacaccacgccgagtactcctgctgatgcagtcattagctcttcaagatccagcattgatcaaaatggtagtaatcacaacaatcgaactgcacatggaggaggaagcaagtatcgtaggtcgagagattatcattctgagagtcgagagcggtcatcatcgggccaacga

SEQ ID NO: 28712 - DNA, 1856 bp, Arabidopsis thaliana landsberg
  unsure (1)..(1856): unsure at all n locations
caacacaaacacagcggttccatcaactacctttatggattctttggtttctttggaatagcagaaatatcttggattttgagcgacgacatgttccatgggagactacgttacagcttgctcaaatggatcttcaggagtggaatgaagctgtcacaccatcacacatcaacagccatggtacaacaattcgaagtcatatccctaattggaggcgtccaacaaatgggtgggtcaagtgcaatgtagatggctcatttattaatggaaacataccaggcaaaggaggatggattgttcgggaccacaacgggagatatgagtttgcgggacaggccattggtaactgcatagataatgctctagagtgtgaannnnnnnnnnnnnnnnnnnnnnnncaacattgttggagtaaaggatatcgacgcatctgttttgaaggtgacaacaaggagatgtttgatcttataaacggattaaagatgcattttggagcctttaactggattcgagacatactatggtgggcatcgaagtttgagcagacacaattttaatggaccaacaggcagaacaacaaaccagctgacatcctcgcaagaacaccactacaacatcaatttttatttgctaatcatttctgggttccccgtgtaataagttttgctttacattgtgattatacttcttcaatataattcaatatgatgatgacaaaaaaaaaaaaaaatctctttcttctataatgactatacaaatcatattaatctatacataatcaatttcggagaaagaaaaagtaagttataaaaagaacttttttcacggcggcgccggtggaggtaaatcactgcacgttgtagacacaattacttttccggcacgttcaccggactctataagcatcaacactacttctctcatcgtcggtcgatcagacggcgaagatttcgtacagagtacggcaattttcgtcactgtgatcatatgattgagaatcacatcgtcctctacctttgttagataaggatcaaggatttcagatgttaacgaatgatctctgatatggtttcttgtccacgtggcaacgatctccgccttgctctagcggctgaaccggagctttcccggttaacaattcaagaagaacaactccaaagctgtaaatatcgcatttctctgttactttcattgtgtatgcatactctgcaaaaaaaaaaacagttaaaaaacgggtagctttaagttagtgtaaactcgaaagtttaacggttttttacaaacttaccgggagcgatgtaaccgtaggatccagcaacggctgagacggattttgatagtggcatgtcgatgactttagctaacccgaaatctccaacatgggcttcgaaattctcatcgatgagaatgttattcgatttgatgtcacggtgaatgattcttggtttacaatcatgatgtaagtaagcgagaccttccgctgcaccgagtgcgatagcaaaccgagttggccaatccatgctatgtgatttcccgccgtgaagtaactcgccaaggcttccccgagacatgtattcgtagagcaagaggttcgagtttgatccttggtggtaacagaaactgtatagcctgacaatgttcctgtgacggattttgcctagtgttagaatctcggcgcggaaactgttatcagtgttgttgctgttgttgttgttgccttctctgttggattcgagttttttaactgctattgttttacctgaaggcataactgctttgtaaacggtcccgcaggcgcctctaccgacaatgtagctatcgtggaagcctcttgttgcttccaaatgtctttgact

SEQ ID NO: 28713 - DNA, 1707 bp, Arabidopsis thaliana landsberg
  unsure (1)..(1707): unsure at all n locations
aaagtgagaatggagattatgcatttacagtacccccctgctccctgcccaaagccaaatttaaatttcaagctctgaaataagaaaaagaagcaaagcccttgcagtattctgatgcaagcatgcatgaaagatattagacatcttcttnnnnnnnnnnnnnnnnnngagcacgctgtgttgctgattcgataagatttccagcggcggaatggtgtttcggaattggaatggcaaatagaatccccgcctgacggtttagcttcatgtttgcatctggcaaaagtggttttatctcaaggtggtaagggatcaaagtgcataaatacgttttaaaagaggaaattttgagagaaagactacacttgcctattactctagcacagtcttcagggctatttacacgggaaggtgcctaaagaagtcaatatatccacatcagaactaaatatctatgcagaagcacctgattgagttcagtgataatgaacaattttgcaccttacagccacttttttctgtgaaaaatgctggaaactcatcgctcttgtatgcagcaacatacacttcttgagtttcctgcattgtcaacaaatagctgttgtgaaaacttaaactcttgattgttgactattaagatatgcctcggcaacagactatataccaaatattcaagagtctttggaatatcaagtattgatttaacgcctgctgatatcactgctattggagtcctcccaagtgcagtaagatcagatgatatgtccatcgctgcatcacaaacacaaattagcagcgcatgcagggtgaatattggcatcaacaccatcatctaaacagagtttctaatcatgtaactaatttttttttgtaagaaaggaataaaacggacatgaaacatacaatggttggcatgtctatggacaccacctatcccgcccgtcacaaaaacttggatgccaacctacaataaccaaaaatcctctgaaatgcaataaatgataccaaaactactaaagaaagatcctcctaggaacaaagccaattaccattgaagcgaaaaacaacgttgcagagactgtagttgcaccgtttcctcttgtagccacctgaaggaaaacatttaggcatatggaggagcaaaaagtccatgcattgattgatagaggtgtggaaatgtaaataacgtggttgtctctatataagaagctagttcagggtaggttgcttagattgatgcaatttgattttgtgaactaatgtaagagactgttcctacatgactgagtgtgtaaacaaatcttaaactggagaataaacaagtttgatgtttttcgattcactgatgaacataatgatggtgcaataagtagaaaaacaaccagaagtgactcacaacatttgctatgtcccttcccgctgtcttttggacactttttccgagagatgcaagacgttctagttcttcctcgctcagacctgtttactatatattagcatctacattctataggacgtagaagaagtctagtgcagttgatccttggcgaaaaaaatttataactctgatctaagatcttgaaaccaagttggttttaggatatgtaaacggccaaagttgactaggagattagtgttaacaggttcaataagtccaaatccaagaatctaaaacattatgatccaccagatataactgacctatgc

SEQ ID NO: 28714 - DNA, 2122 bp, Arabidopsis thaliana landsberg
ttttaagtttggcactagtgtaacattcgcttccccacagaattctaattgtcaagtgaaaatgcttgggaaagttgttagattgaattttgaccttacagatttgatctgaataatatctatgttgtttcgagcattgattgcactgaaacaaacataatttaatgatcatttatattcataatgttgtcttttttcttttttttggtctggaaacaccaacagattctcctcgatgttgacgcataacaaaatgttggttatttacattgctgcaccaattgcgatcatagcgattctaatcgctcttttctggatttccatattactgtgtggcaaaaactccctcaagagttcaaccggtaagtctaatcttgacattataaccacacttagtgtttttaatacatttgatgtaataaaaagacaaagaaaagttttttacaagtcttttaaatgtgtcttttctatatacaaatattaagttttattgggtttattatttaatttaaacatattagttaatgtgctgatcatgaaagtaattacatcttttgattctcttgtaattcacgtctacaagtgacgccacaacccctgatcgagtactcgatggaggaattaaggcaagcaacgaacaattttgacatggataatactattgggcatggaagtcacggaacagtttacactgggctgatcaaggacatgcccgttgtgatcaaaagggagtggtgtagtccccaacctagattcttggatgaggtacacacaaacaaaaaattggtgatttcattgaaaataatttatgtatttgtgacatattgttgtatgtgtctcaggtttcttacatccaacataaaaatttggttaatctgctcggttattgttgcgactacgataaccaatcgctcgactttgagtatatggtcaacggtagcgtccgagattatctaggtggtaagtaatgcattatagtaaactcttgaaatttgatccatacatcatttttatgtgatcatctctctttttggttattgagtagagtctagcgacttaacgttcaagaaaagaatatctatagctcttgatgcagccaaaggtaaatcaaaatggatgatccaaaactcacattgattgttctaaaaactaatattaaagtctctctgtttttcaattcagggttactacacttgcacaacttagatcctccagtacaacacaagagatttacggcgagtaaagttttgctcgatgccaacctcaatgccaaggtatcagatggggcaatgttgggactgcttcaagcaagtgatattcatctcgctaatccaaggtattaattaattcacttatgatcatataagttacatcattccttcaaagtcctaacaaatatgttcttatgaatattttctatagaggtggttcagaggagaccattgatgtgtatagcttcgggttgttccttctagagcttatcacctgtcaaaaccctggactgttacaatcagactatgaagttttacaatgggtacgtaatagaaaaaaaaaacctctctttctccatttacaacttttttttgtttgttaattgtatgtacttaaaaatatattgtttggaaatgtatttgtgatttgtagataagtccgagactttttacaaacacattttgggataagaatatacctgcagaaacattcacgagaccatcgttccaagcttatctgataattacgtcggaatgcttggagtatcccccgataaatcgcccaaagatggatgtggtcgtgaccgagcttgagacgatttaccttaatgtcatcagtgagaaccatgaggtttctctaggaagtgagctttttaacataaccattgagtaagcgaaagacatggtgttgttgcttcagtctatttcgaaaacccctataaaggactataataaaattcaacttgactattacaaaccagaattaaaccgcattggattcgaactgtgtggtttaaatttggtttaaccaatccacatccaatttataaaggcgaaccgaaccgaattggatttaaatttgtaggtttgttttaaaaaaatgattgaatcttcgcaaattatctatatag

SEQ ID NO: 28715 - DNA, 1729 bp, Arabidopsis thaliana landsberg
cgaatctctcaatgttaggagttcttcgaataaaaccagtttctttttagggtacccgaacgccaacaggaatctcattttgaatctcccgaacaaggatgagatttggcaccatccttggttgctgattaaaaaaacccctgcctcgattggaaacctttacgatgtgcttgcatccaagtggtctgcgaaacctggtagaaattaggtcacatattttcccttttgctttaatagattttattattttcatttcgcagctttcattgctccaactctcccgactgtagaattcgtcgaattcttcaagattgttatcgaaggggagaccctctggaactctttcacactcgaccggttcattgaggctaatcataagctcagaatgagtccacccgggaacctactccaacttccaccacctccacctctacctcacggaacttctgccagggctatcgcttctcgtcgaaaaacgttgtccaagccgatgacagaggcttgtgaggcgaacaaatcatttctctagtcggttgtcgacaagaaagaatacagtagaacactgctggtcgatgatggtagcgccgaaggggctagatctgctggtgccttcagacccacacctcatcgtgaaggtcatggtggctggtcacctcgaagagaccaatcaactcgtcgtgactcacctcggccttcctttggaataggttgagcagcgaaccgatcgcggatttacttcggaagaaaagagaaagaccaacccgtagcagttcttctactaagagagataagacgagggcctgaactgatcgttctcctcgatcatctcccccacctcgctcgatgggtccccctcctccagtcattacatccccctcctctagatttggggttgaaaagactggccaaagtgcaaatcctcgacatgaagagtctgagccccgagatgctaaccctaaacccaaggccgttgtggtttctcaaaccaaatcactcactagttagaaattactgtttattttccttatttgctatatcgtttgaacccttagtaacgcgtccttcatcccttattttaacagcgatggaaacagagggaaatgtcttcggtgcttcaagactcggaaagacacaatcctgccaacctttgacaggtggcgtcctgcgattccaagcgattcttacttcatgcccatcactcatctcgggttagcttttttttttctttgtgaacttttagctccactctttgcttatacacgaactcacctttgtaatctttgctccaggaaaacagcgagctcaatgacatgattgagtattacgaaaggttgctgcttgacagggaacatgatggtattgcgtggaaagacaagttttcttctcttgagtccgatctccactcttgcaccgaagtcaagcaaaaactagaagatcaactggacaacttttcttccgaactcatgatgtcaaacggcgagttgcaggatcagtatcaaaggtatgaaaaaatctaggaggaactcttgaatgctcggggcagactctcagaatctgtatctagtgcttacgacttgtccaaccagctatccgaactgcatgccagatacaaagcaattgccaaactacgagatgctgagttagcgagatgctgagttagaaagacaggaaagaggtaaagggtcacggaatggagttgattcaaggggtaatcattttcatccaaacc

SEQ ID NO: 28716 - DNA, 2003 bp, Arabidopsis thaliana landsberg
  unsure (1)..(2003): unsure at all n locations
gaagctagcatggagtgtatgttttcttttcatttaaccatagattttttcttttgtctgtctgaaaatagggggggcatcaaatgtatccaattttgtattgcttaatcaattgattggttttttgccgtaattcatcaattcattatgattgtcctatgtgtccaattctgattaagcttttcaaaccggaatcaacatctcacccaaaaaaaagttaatttattaattaaccgggtttggtctatgtatattcttcttccgaaccggaaagaggattggacacaaacacaagtcaaacaaatttcgttgtgcaaacgaaagtaagcagagcaaagagtttttgtgtggctagtggcatcaatggagctctcgatctcacaatcaccgcgtgttcggttctcgtctctggcgcctcgtttcnnnnnnnnnnnnnnnnnnnnnnntccttctgtgcatttagctgggaagtttataagcctccctcgagatgttcgcttcacgagcttatcaacttcaagaatgcggtccaaatttgtttcaaccaattatagaaaaatctcaatccgggtatggtttcattctaggtttctctttcgttgacaaagcatattagccgttgctttgacttttaagtcaagatgtgtttatgtgaactatgagattcctaaagatcaaatcttggtatacttaatactttatctgaaactgggcagctcataaagttcaaatcttttggccatcgatttgctccaattaggaaaatgttttctttaagggattattgaggtccaataagattactaggattggaaatggtgaatgtttgttatagaatctggaaatttttattctcttaaacaacatcttatcttacttctctaagatttgctcagttctcatgtaattctattattcagttttatttagagtgtttgtgcgttttgtaatggcactcacaaaagtagatactaccaggcatgttctcaggttggtgctgctgagtctgatgatccagtgctggatagaattgcccggttccaaaatgcttgctggagatttcttagaccccatacaatccgcggaacagctttaggatccacgtcagtatttttgttgcatatttatttatgaagaacttgatagtttctgctctcatttatcttgactgtaattttaatggcagtgccttggtgacaagagctttgatagagaacactcatttgatcaaatggagtcttgtactaaaggcactttcaggtcttcttgctcttatttgtgggaatggttatatagtcggtatcaatcagatctacgacattggaatcgacaagtatgcagcactattagatgcagatgtacattggtcactattattatttaatctaacatcactatgaagtagcatgttcctaacatgttaaatgatcttaagctaattgtcaaaactcttcactgatgtgcatctacaaaattttgttatcttggaactgttattagattctttattgtttgcttcttgaaaatattaccggtctactcatatattattcatttcttaagttcaagcttttggagcatcttgatgtgttattttggtttgaatttgaattatttgttttgcagagtgaacaaaccatacttgccaatagcagcaggagatctatcagtgcagtctgcttggttgttagtgatattttttgcgatagcagggcttttagttgtcggatttaactttggtccattcattacaagcctatactctcttggcctttttctgggaaccatctattctgttccacccctcagaatgaaaagattcccagttgcagcatttcttattattgccacggtaaatgctgttttatgcttcttaatcaatatacaactatcaccttatgtgatatttttcgtggcttgggaacttttaataacataattctgtattgacatttcttatcaggtacgaggtttccttcttactttggtgtgtaccatgctac

SEQ ID NO: 28717 - DNA, 2800 bp, Arabidopsis thaliana landsberg
  unsure (1)..(2800): unsure at all n locations
gctgtaaatacgtgtaatatatcaccaactgtgaataaatctatataaatattattaaatacatatgtagtattatctctacctctatcattgatataaaagtaactattatttcagagtttattatactaaaataactatttatgtagggttacacatttaacactatgaagttcgaccaagcctaactgaatttttttcttcaaagtatgtcaatttttcttagttcaatatttgtcaaaaagtttctaatatattttaaaatctcgagttgatcaagtaatatactatatactaatttaattagtagtttcctgattttttttaattttagttaaatcgtttcatgattttatctaaatctgtttttttaaattcatttttaatacatcaggaaaatgacaggaataaaaaaaaaatcagtagttgctttttcgcgattcgtgcgaatagattctgatgcaaaattcggatattattaggagcacatgtttctccttgtgtcgtgtcttttatttaagagagaatcatcatctctcactctcatcttctagaagttaaaacatcacgccatcttccgaattcaaacgccgatgttctgtcgttttctgtctcacatattggaacgagcgtaaagatgcctaatttctcagttaacgttccccaactctcatctctttacagtacaaaaacgcccaaagtgagaatgaatctatgtgccgatcaggtgttcgacaaaatgcttctgtggagagatatgtcaacgaagatgaaatttccttctttttctgctgcggaattacctgatttgaggaaaagtaacaagaggaggggatctcttaggatgatcaagtgcagagccgccggagctgacggtggacgcgtggctgttggggatgatgtgttttcggttactacttcttctaagtatgaagttgactatctgggtcaaagtactaagggagatttgaatctcaagcttgaccctcttcagtcatttggtatatatacaatcttcctttttgttttgttagttttcgaaattcagattggttttagtgaaatgtgggataaagttttggtctttggttagggaacttgattttggttgatgtttgtttaattgagataaataagagctaaaaagatcgaacctttgttgtgaatgtcacgttgtatgagcaaaatgtaactttggtgtatctatgtaggagatgggcnnnnnnnnnnnnnnnnnnnnnnnnaggaggtagcgagaacagaggctcaagcggctgaaaatttgattagagagttgggtatccaagttcgttatctaatccttacaactttgtgttatgtatttgaagtttgagtatccctttgttgcgaaaacatgaatgtattgagttatttgtgtctggttttatatggacttttctttttcttttgtgtcacattctcatgcctggtattgcagggccctttctctgcacagcactctcctcggggtatattttgtagtcgtacattgaatcttcggtccattagtgcaattggatatgatatggattacactttgatgcactacaatgtcatggtgagttcttcctttctcagacataagtaggaaacattttatgcacccatatttgatgctaatttatggtcttgttcaggcttgggaaggaaaggcttatgactattgcatggaaaatctaaagagcatgggtttccctgttgatggacttgcttttgatccggaactggtgatatgtttattttcttgtgaaagttgaaaggttccacattgtagtaccctatctagtttttagagtactcaaactatgttttctcttattataggttatcaggggtctcatgattgacaaagagaaaggtaatttagttaaggccgatagatttgggtatgtgaagagagccatgcacggtacaaagatgttatcaaataaagctgtcaggtatatttgacttttcaacaccattggtaatgtgaagaaaaaagagagttgcaaagtcattgttctgttttgaaggaagtctcattctcttattgtctttgtatggatgaaagtgagatctatggaagggagttagttgacctgcggaaccagagtcgatgggagtttctcaatacatttttttcagtttcagaggctctggcttatgcacaggtacgttcttttattacaagaaatggtagctgaacaatttgcagttgattttggacataatttacttttttttattatttgtaactcatataattttcacattcgttttctcaactgatgactcttcaccccaatgaactttcttttttacaaaattttccgcacggcttctgctaagcaatgaaagttcaaatcatttcagatggttgatagattggatgatggatttatttcggcagatcttggcactcttgattataaaggactgtataaggttgtgtttcatagaacctaaatttcattgaactgaaatctttgcatatatattttttaatctaatcattttttccaggctgttgcaaaagctctcttcagagcacatgttgaaggacaacttaaggttgatagtttgtccattccataatcattttcttaaatatcagttttctccggtccctcttgaataatagttactttgcagagtgagataatgtccaagccggaactatttgttgagccagacccagaactacctttagctcttttagatcaaaaggaggtaatggttcagtctttacacaataaatcaaactatgatggtttcagttgttaatattgtcatgttc

SEQ ID NO: 28718 - DNA, 1795 bp, Arabidopsis thaliana landsberg
ggcaaaacctattcaactggggaacgggtcccaacgaagaagtgcgtaggaggagatgtttacactttacactttacactttacacataggccttcccaaaagctcaactagctgcaagaggatccaataacatgtaagagccactaacgctgtgccacgtgtaggcactcaggattcgatctcccctctacttattctctcacaccagatataagctttattagccccttctttcagatacaagctcccacaccatcaaacttactacatctgagttattatgttgaaacaagagagtaacgacataggtagtggagagaacaacagggcacgaccctgtgacacatgccggtcaaacgcctgcaccgtgtattgccatgcagattctgcctacttgtgcatgagctgtgatgctcaagttcactctgccaatcgcgttgcttcccgccataaacgtgtccgggtctgcgagtcatgtgagcgtgctccggctgcttttttgtgtgaggcagatgatgcctctctatgcacagcctgtgattcagaggttcattctgcaaacccacttgctagacgccatcagcgagttccaattctaccaatttctggaaactctttcagctccatgaccactactcaccaccaaagcgagaaaacaatgaccgatccagagaagagactggtggtggatcaagaggaaggtgaagaaggtgataaggatgccaaggaggttgcttcgtggctgttccctaattcagacaaaaataacaataaccaaaacaatgggttattgtttagtgatgagtatctaaaccttgtggattacaactcgagtatggactacaaattcacaggtgaatacagtcaacaccaacaaaactgcagcgtaccacagacgagctacgggggagatagagttgttccgcttaaacttgaagaatcaaggggccaccagtgccataaccaacagaattttcagttcaatatcaaatatggctcctcagggactcactacaacgacaatggttccattaaccataacgtaaggcttttgtatatttgttaccccttcaatttagcatcttcccataaagcagcagggtgaattctttcatcatacacacaaatccactgatccactgccaacagttgatctatagcacatagaaatttcaccagaagtctataataaaaacaatatatgcttccttttgcatcgactctctttagtcctcttaccagggggattgagaatgtctttgtttctgtcattaggcatacatttcatccatggaaactggtgttgtgccggagtcaacagcatgtgtcacaacagcttcacacccaagaacgcccaaagggacagtagagcaacaacctgaccctgcaagccagatgataacagtaacacaactcagtccaatggacagagaagccagggtcctgagatacagagagaagaggaagacaaggaaatttgagaagacaataaggtatgcttcgaggaaggcatatgcagagataagaccgcgggtcaatggccggttcgcaaagagagaaatcgaagccgaggagcaagggttcaacacgatgctaatgtacaacacaggatatgggattgttccttcattctgatactcctgtggcaaaaagaaaaactagattgcaagctgtaaattacttttagtttgagattatgttaggtttggtgaaattcttagcttcaagaagtattactactgttgtgcaaatgggtttgtagttttggctaattaaaactatagtattcttctt

SEQ ID NO: 28719 - DNA, 1806 bp, Arabidopsis thaliana landsberg
  unsure (1)..(1806): unsure at all n locations
cttcagcttgttttaaatgagttaactaataaaagattaatgttttcttgtatatagcaatgagagttacaaattgatggtatactttcgtcttctccaccaaccaatgtgaagctatcattgatgtgtaatgtgtttcctcagaaacgcctaatagattaatgctaaactaaataacaaacagagtaactaaaattgtaattgatatgttaatcatctccaccaacgtatcctcctcctctcattgcctccaccatcttcaggctcaatcggtttttgtccattgcatgcgacacttgctctcgcttattcagaagtctcagaatgtcggctgtactctccatgtctctccgaccctccacatattgcacgcaggcaaaagcggagagagccatgctgttctttgggttccagcggtcatgcagcctcccttccatggcctctgccactctcttcctcctctcctcttctttagcatcttcatcctccaccaaagtattaaccttgtgagccaaactctcccatttgctctccttcttcccaagcatatcaacaaccttctcagcctcctacttcacgcatctatggtggagaccaaagtccatcagatcaagattgggacactcattccactctttcataaccccatcgagatcacccttcttcgtaaacgccttgacgatatcagaacatctggaactgtcaaaggatatcccatagtccttagccaagttccagagacggtgaacatcctctgttagattctcgttacaataaacagtcatgagacatccatatatgaattctctacagccgtcatcaacaaatgtctctgacctacgaagcaaagctaaacccttttccataaatgctgctcgtatgtagaccaatcctggaaagtagaatgtggtccatttgtcctgaatcatcacctcccacttgctcaaaaacttctccacaccttgtacatctacaacagatgccatagagtaagaagtcaagagcttgacaaagcatagtccttggggttgcatctttttctcgtccatctcgccaagaagcttcaccaccatgtcgtgatcttcagcctgatggtagagacagagcatggtgctatagaattgaggattnnnnnnnnnnnnnnnnnnnnnnnnnntcttctgaaaagtagtctcagctatgcccaaagagctgtgtgttttgcagcagctcaagagagcgttgtacaaataaatatctctcttttctacaggaacagtctcgaagaacttagccgcttcttccacaccaccaactttagcagccaagaaaagtcgtcgctcaaaatccattgaactcagcttataggctttttgttcaatcatccaatccgatacctaatagcacaaaaaaaaaaccctaagattaacaaatttgtacaagtcccaattttgcttgtttttgaaatctctaacctggagagcgtgagagaagcgattggatctgtgaagagaggtaatgatgctcctgagttctgaaagtcccgtttgatttccgcgttggcaccattctcggagcaacggagtgatggagactgacgaatcttggactctctcgatccgacgcttgagagtgtcattaatgagctccggcaaaggaatggttttggggaaatgaacgaaggaacgtctgcaaggaaggatccagaagaaattactgaattgttgtcggagaagatgcttcatgctcaagccaaagaaaaacaacaattcccagacacacgacaaaacaaaccctaggtcttctctgtctctgtccaagaccaca

SEQ ID NO: 28720 - DNA, 1446 bp, Arabidopsis thaliana landsberg
gttatagacagtgaaattacagtaatcgtcctagaggctcataaaatagctcgtccaaataggcgtgaggtttatgtaaacatgcaagtatttcgcaagatgtacattcacaattacatacacatacaagagtgattatgtttgaatgcttgaaggtgcatgacttccgtatttgattttatcatgtaaactgaaataagtaacttccaacagtggggaattacctcgaggaagaaaggttcttcagagcgatcccagcgacgcatggagcggtcatgagatcctgttacgagaaaatcaccacggttactgatagcaaggcaccaaatctctgcatgatgtccttcaagcgttaacaaatgctcgaatttgtcagcatcccaatacttgacgaggcggtctttcccaatgctgaacagataatgggtattccgaacaaattttacacccatgacactgtaaaacaaagtcgcgtgtcagttaagctccacaatcttttaatgattccaaggagtctttaacacaaaatataatatttgcggtaataatcaacattttactagccaagtaaatctgttgggaagatactggaaaaggaaaggggttttctgcttatatatcatgtcatgcaattagtcatactgttttcttacacaaaattataatattcaaggaaaaactgggtccacattattgagtacgttatgccattttcagaaatatggtacgaattatggaagtacctgtcaccatgagcaaagatagacttatgacaatcaccaaaatccaaaccccaaattttcaaatttttgtcctgagaaccagtaacaatcaactctccatctgatgagatgtcaatgcacatcacaggcaacttgtggccatataaggagaggtagaattttagggaatccatgtagaaaacctgaaaccaatataaggtacataagttagtgttacatacgtcaatgtaaatgataatacgatagatacgattataagaatgtggttagcgtatcatttatatgacgtaatgaaaattattattttctcatttacatatgccataaacagaaaatctaccttcactgtggaatcaagcagtgcaactgctatgtgtttagcatccgggctgatagcaacagcaagtacatcgtcattcatcttcatggacttaacatttgaaacagtgagtttcttggtcgcctgcaggttatcaaacacaatatgttttgatcgaatcattttagcacactgtaatatactactcaaataacactaataaacaatgtgctcatcaacaactttcttaagagtgagcaattccagaaaacaaaggcacggaaaacaggagatggaaaaaaagagagtagagaggcaatctatgatacaaaaacgtttacttatctaatagagaaaataaaagaaacttaaggtcaggaatct

SEQ ID NO: 28721 - DNA, 1082 bp, Arabidopsis thaliana landsberg
tgtgcggagatggagattcttggaaagattagacacagaaacgtgttgaaactctacgcttgtttggttggaagaggttctagatatttggtgtttgagttcatggagaatgggaacttgtatcaagctcttggcaacaatattaaaggcggtctaccagaactggattggctcaaaaggtactctctagtcaataagaaccagtttcaaaatggttaatcatggatccaagattataagaaagaaaagtgattaatttgtccctttttgttggataaacagatataaaattgcggtgggagcggcaaaaggaatcgcatatttgcatcatgattgttgtccacccatcattcacagagatataaagtcaagcaacattttacttgacggagattatgagtcgaaaatcgcagattttggagttgcaaaagttgcagacaaaggatatgaatggagctgcgttgctggaactcatggctatatggctcctggtgagtttccaacttaactataaactttggttcacaagatgaaaactgggaactgattcttttttgttgtaattgtgtgatatgatcactgcagagctggcttactccttcaaggcaacggaaaagagtgatgtgtacagcttcggtgtggttcttctagagctagttaccggtcttcggcctatggaagacgagtttggagaggggaaagacattgttgactatgtctactctcagattcaacaagatccgaggaaccttcaaaatgttttggacaagcaagttttgtccacttatatagaagaaagcatgattagagttctgaagatgggtcttctctgcactacgaagctcccgaatctcagaccgagtatgagagaggtcgtgagaaagcttgacgacgctgatccctgtgtctccaattctcaagacacaactggaaagattacagtatagattgatgattcacctaccacgttttagttatggttaagactagtcactggtcaaagaagtatcagttagttcgataaattagtccaagtactagggattggtttttgcttatttactaatccgttgactaaaagt

SEQ ID NO: 28722 - DNA, 3317 bp, Arabidopsis thaliana landsberg
gacaatgaaaatagctttaatataaactaattaaagacaaatccttttgtatgtatgtgttggatttgattcattgaggatgtttgagagagtggtaggttatgataataaatgtcagtatgtgtgtttggcaggtgggtttgtttttaaatgctcactaagaaacaagaaatggtgaattttcatgtccccaaatatttattacaagacaaataattcaatgtctaatgttttgaccagagacatagttctttttagttaagtctatgaatccaaatctttgagtattgtacactcttttggactagttctagatatgttgatactaatggtttagttgaaatcaatatattttttgtaggttcatatattggagtaaacatagggactgatctttctgatatgccacatccaacacaagttgttgctctactaaaagctcaagaaatccgacatattcgattatacgacgctgatccccggttgttgattgctctagcaaacactggtatcaaagttataatcttcattcctaatgaccagcttcttggtataggtcaatccaattcaaccgcaccgaattgagttataggcaatgtcattgcacattaccctacagcgacgataaccgcggtttctgttggctctgaggttctaactagtctctctaatgcagctcctgttctagacagtgctataaagaacgttcatgctgctttactctcgtcgaatcttaacaagttgataaaagtttctactcctttatcaaccaccttgattcttgatccttttcctccatcgcaagcgttctttaaccgttctttgaattcggttatagtaccgttactaagcttcttgcagtctacaaactcatacctgatggtgaatgtgtatccttacattgactatatgcaatcaaacggtgtgattccgttagactacgcgttgttcaaaccgatacctcctaataaagaagctgttgatgccaacactcttgttcgttactcaaacgcttttgatgcaatggttgatgcaacgtacttcgctatggcgttcctcaacttcacaaacattccggttttagtaaccgaatcaggctggccttcgaaaggtgaaaccaatgagcctgatgctacacttgacaacgccaacacttacaacagtaatctcattagacatgttctcaacaagacgggaactcccaaacgcccggggatcgctgtgagcacttacatttacgagctttacaatgaagatacaaaagcaggtttatcagagaagaattgggggttgtttaatgcaaatggtgaaccggtttacgtacttcggttgactaactcgggttcggttcttgctaacgatactacgaaccagacttattgtactgcaagagaaggtgctgatacaaagatgcttcaagctgctcttgattgggcttgtggtcctggaaagattgattgttcgcctattaagcaaggagagacttgttatgaaccggataatgtcgttgcacatgctaactacgcgtttgatacttattatcatcagactgggaataatcctgatgcttgcaacttcaatggtgttgctagtatcactaccacagatccaagtaagaaacaaaaaaacttaatttgattatacattacattgtgtaatactgagctatattttcttgattggttgatttcaatgcaggtcatggtacatgtgtgtttgctggaaggtaaattattctgttttcttatgcccttttgttggtagatatgttcaatcttggttttggttagaaaatggatcgatttggtatggtttatgttcggttctggttggagttttatcaattatatccttagatggaacaagtactaacttttaatcgttgttttgttcttcaattgcagccgcggtaatggtagaaacgggacgtctgtgaacataacagcaccatctgcgaattcaacgacttcttctggaatacggagtgatttgtattacagtcggggtatatggagtatcttgacagtgatgattttgaacgttgctaatatcttgtgagaaatctttgggacataacaatgtttttttctgttccgagaagttttttttttttcgttcttaggtgggattggagttagaattgaggccgattgtgttggattcgattttgtacacaacaaaaaccaagataacattctaatggtctttttttatcccattgttcgtttttgatctgtttacacagaaagtggaatttagggtttctgtagatagcaagtacaattcacagttgactataagataaattcgtatatgattagattcaaccaactaacaagaacagctttctcatttacagctaaatctcttttaacttcaataaccaaaagtgactgtgaaagtgtgaaacaagaatagaggaaaacgaaagcagagtagagccatcctaaacgtaattaaaccaaaccagactttggcacatatttagtcagagactacgaataaagaacacaaaagtacatgacaagatgcgaagtcttgctttaagagatgttcatagcttcagcatgatagctttcgagatctttgtcgagatccgcagcagacttctccaccggcttctttccacctcggccaccacttttattccctctgcctccaccagcacctctgcctctaccacggaccccgcctcgaccacctcgaccaccttgttggttttgttggctatcataaataaacaatacgatatgataagatgataaaacagatgcatgatccagcccatatgaatgagaacgagctcagactctttaacacttacactggaaggcgtcttccagaaggacctgaacctcttcctcttcctactctcccacctctaactccttgtctacaataatcagtgatacattcacttcagcacataaactcaaaactattctcttttaaaaaaacacagaccaagagatggcaacatacccaatgaagacactcctcttcatccttccattcaatccagtcacattaacacgagctgcgacaggagcagattcagtacttccacccagaatctccagtttcataggccttccatccaaaagtacattgttgtatttcctcatagcttgaattgcatcacttcttctcatatacacaacttcagccgatccctgtatgatacagaacatcagatatcaaatattacagaaccacggtaatgaacggataaaccatagcaaaaagaaaacagaacttacacttggacgcccatttttgtcatagtgaattgcatatcttttcagctctccaatctc

SEQ ID NO: 28723 - DNA, 2365 bp, Arabidopsis thaliana landsberg
  unsure (1)..(2365): unsure at all n locations
gagtttaaatttgtgtaccctgatgaatagagctagtgtgcatgatcaatataatgatggagcactaacaaagtgcggtctcaggtgattaaattagaaatggtcgctgacaagagggaacagacacatgtttatgtgggatcctacacatttatagagcttaaaacatagacacatttatagctcttgtagatcgaacctttgtttccatttttgtacaaaggaatcactataaagcaaaagcaacattgccaagaaaacataccattatcgaaagaaaataaaatatatttacttataacaaaaaaaataatggacggtcacaaagagatgataaccacccatcactttcatgtaactgtaatattgatacgtcgattttccgaatttctcgtcagtatctaccttaaaaataaaagtaaattgacatttgtcgcatttctgatatctcgatttcccgtatttcacgtatccccttaaaaaacacataatgtagtttttgggggtgaattttaaagttttatacccatccgatcaagcttatggttcatacttcatatcttatacgtactacacgtatttattggaagctaactagttctagaagagcactagtttgaagtttcgcttaaaatcaaaaccgtaagtttttaatgtattgctttggtcggattagtgttaaaaagaattaatcgattaatatcaataatccatttatttcatctctcggattagtatatactagtatttacactatattatgagtagtttgtttatcaatatagaatttccaacactttgcttctccagtttctttgattaattgactccgattaatgcacaagaaatattttaatattgatatttgatattcaccgtaaacgataaccctagttcaattatacatgtatcaaagatatattaaattactaataaatatcatatattacgaacctcataattcatcatttgacttgggtttttgttcttacttacctacatacatcccaaatctcttaagcaccgaataaaatcctacatttaatgacgtggtaccctccacactttgaccgatttgtcaagacttccactatacaaaaccaacctcccatctcctccgtcttcttcttcacctcccgatggctccaccaccgccaaacacttaactggtccggtatgaccggttaacacagagacacacgtgtgtaccttcccttccctcctccacacgcatatcttcttatccgccgcaccgctaaacaacaattttccggctgccgcgatacagaggacagcaagcctatgcttcttgaaaacttcacaatgcttcaagagtttcttgtctcccatctcccaaaaattcacagctccgtcgcttgaaccactatacactgccatgtggctcgtgaccaaagccgtgaccgctgattcttgctttagcaaagtttggaacaaagagtgcgccgtacgcttccctctgatctcacgtttccaaaccttaaccgttccatccgccgatcccgtgaacacaaggctcttggcggtcgttacagaattcacagcgtcatcatgagctttaatagactcgatacatttcaagtcatggatacgccaaaccttgaccgtccgatcccatgaagcggagtacaacagcccttaatcttccgctaagctcaaacacgaaacggcgtcggaatgcttgatccataaggccgtacgacgtcttctcacctccacgtagttactcggtttcactgaactcttcaaaacgtctttcaaagccggcaagctcccggcgcgtgtgtacactcgcgggtttttggacgaggttttccaaacccggatcttaccgtcttgatgacccgtaaataccttagcctcccgacttatcactatcgctttaaccaatccgctgttcgatttaaacccactaaactcgtttaagtttttccaaaccctaatgtaattattgtccgatcccgtgtacaaaagatcatttgttgccgctaacgagtaaatgtgaccttcctctcggacaatttctccgaccaggctgtctccatcagagtatccgcgggttaggtcggatcgaggcattttggtcgtaaaatttagagtcttgttagagtttcttaagaggttcagaaagttaaacactccgaagatggaggaatgagtttgagggtagtttgcattataagaaggtagttaagcaatgaaagtaggacacgtaacaagttataatttcngtttgttatgtccactttttattactaaaataatcttctgaagtgaaacttggggatgttggcctttattttgctaaatatagctatataggggaatgaactcatgagtgtatatg

SEQ ID NO: 28724 - DNA, 2640 bp, Arabidopsis thaliana landsberg
  unsure (1)..(2640): unsure at all n locations
ggattctagagctggatcctacttggcaactgcacttgtaacgctagccaaatatattcaagcacaggaacttggaagaagctgcaaatgtaagaaagaatatgaaagcaaaaggcgtgatcaaagagccnnnnnnnnnnnnnnnnnnnnnnnnnnnnnnngtttcagcgtttgtatctggtgatcggttccatccgcaaagtgaagatatatacaatatcttggaattagcagtatctggtgcagaagctcatagatttgattgcacattaaagagagcttttggggttaatttatattcctgaagaaacaattaaatattctcatagttcagctttttgtttaatctgctcagctgattcagtcaataacaatcaatgtagatatgaacctttgagaaaataagaagaaatggattagtttgcattttgcagtaatactaataagatatggatgagtctgatttatacatcaatcaatatgaacacgttacagctacgaaaaacaaaaagatataggagaagctggctaattccatggactctgaagccgtgattctctgaaaacagaagtgccaccaaaacccgctggtgaaggagatgaagcaatgtagtttgttccagacgcagaaacagtgactgcaggaccgggttgagaaggaccaacgagcgggctccatcgagaagtatgtggaacctgataaacagcaacaacaatcaatcatcatatatacatatatgaatgcaaaatcagagattgaccaaagagattctaagtagtttggttatattgttgtttaaaatgaagatattgaatatttaccatattgtgttgtgacaaggctgctgctcttctcagaggagattcagatgatgaagaagcgccacacagtcgaagcagagtacgagtttgagcattattatgattcgctgcatcatcagtttccccgccttccatgtgagtaccaacattacctcctgagtcattcgagacatccacatggagtggaagagaaggacgagtggctacggtggttccttgttgttgcatgtagctgcgtcttttcaattcttcctcagcatttaaaatctgcgtatcagttaatttgacgagtatgattacctcaataaatgggaatcggtatacaggtgaaacacctttatagagagaagggcagacactgaactgacctgcttaagcacttggactagattgtgtttctttgcattcaaaacttgtaatctctcctccacttctttccgttttaactctgtctcgcttggtactttttcagctgcttcattcgtctgtttcgagaaaagagaatacagtcacgaaacgaaaaacaacaaagctatagagaaacaaaacaacttcacagaaaataactacgagatttaagccttcaaggttccctaattggtaactctattgcagcctgcctgattgtttcatcaatagacttgttgcatcacaaattcacaacatctatcaacgtgacttaaactacttgagcacacacatcaatgaatcaaactgcttgtgaccatggcggcttcgcttatacaacgtttattctacaattcaacagatcagccacttaacttcagtaaattcacctaaaatgacataatctttcccaatcttcctatgtacttcacaaaactcaatgagcatggcgattctagacttaactcagctaagtagtactcaaattctatcgggaaggtcacatagagattaatatcaaagaaattcaaacatacctcctcctccttggccgcatacttgtgtggcacattatcggtttcctttgattccgtcactctcccgggacgatctccaccgtctgatcgagctccttcaaaacctctgtcgttgatctcatctcccttaacccgattcccacaaatctcctctctctttacctcaaatagcttctgcttcccagaagaaccgttcgcttcagatggaagaattggattctcctgatcggtaaccaactcagtcttgacgctaaggttcaaattagggttaagggggagacgagaaagggcttttttacggcgatgaagaagagatttgaaatccttgaaagagagattacggtcaggcattatccaccggcgaggtacgtcgggaactttgtgaaggttgcctctgtacatagatatcgccaccatcttcttctgcttttgggtttcttccgttcgtcgaattcgccgttgccttctgcttccgtgatcatacggcgatgggatttcgacttgcatgacgttttgctctgagaggttagaaacgtgtgtcgtttgttttaagtatctaccgacgaatttgggcctttcacccttgcaaacccaataatatatgtttaaaaagcccatttaatattcaagaattttgatacaccttttgggtttggtagtgctaggtatcagtgcttcacggggtagttctcaacgttgatattctccgttttgatttattctccagattattttagtgcgatctaacgaagaagcagaagaagatctcacttagatatccaaactccgaaagtgagtatcttgcttggtttacttatatggtattgtgagtactaaatattagacggtgggcttccaacctaccggtataggg

SEQ ID NO: 28725 - DNA, 1364 bp, Arabidopsis thaliana landsberg
tctcaatagtacacaaaagctttagcctaaggttttagcttccttcactctttgcatacattgtgaatctgcggttttagatggaccatagtggaaaaaggctttcatcaataactcgtggacttgatcaatggtagaaaagagaacacatagatggaaaactagatatttgatatatccatctttggttcaaactcttatccagtgttgaggtgatatacacatgaagacataacaatcgcattgccgagaaactagtattcattaacctttttctctaaagacattgtcctatcaatctaaaatttagatgttaaaaaagaaacccaaaagatgtagctatcttaaaatgacagtcgtttgcgagactggccaggccatcccatgggccataggctcaagttgtgcttggcagaatttagtgattgtttttttttgtataaacaatcattagtttaaggctttacttgcaacaaatgaagagtttaagggttctttttggtaattttcccgaatcacacaagtgagctagctcatcagaacgagcttcccactaaaaaattgaaaattgttgcttctgtcatctgaaattaaacaaagcgagaaaaggcgatacaaacgatttcgaatgcttcatcttctcctttgaaaatccttcttctgcttaatgctgctagatatggatctcggtgttcttcttccatcattgcaatctgtgagctgtctctttagcttttgactgttgcaattgttattgtgaaatttttgttcgcttttgatcagcttttgttaaattcgttccgagattttaggtttatgtgctggtgttttacttcgtttacttggccgttgccggagaaattctccccgggaaagttattcgcggcgtccttttatcagatggctctcaacttcgttaccgatgcaatggtatatttgatttgatttactctctctacaattcctgagagtctgtgagctcgaaagttcatttccattagttttgttaattcaatttcaggtctattggcactaatattgttggtagctattttgggaatctgtgcaaaacttggcattgtatcacctcttgtaagtgtagttacaagatttcgattgtatttctatgaatccgaatgctatatgctatatgaatccgattgcaattgctttctcacactcattccactgagatgttttgtaggtggttgcggatagaggacttgagttactctcagctacttttattttctgtgttttggtaagatgattcaatccttagtccggtgtcttgattttagttgtgttaccatcagatttgattttggtggtgtgatttgtaatcgccatgatatctcttaata

SEQ ID NO: 28726 - DNA, 1889 bp, Arabidopsis thaliana landsberg
ttcccctttcttttcttcactgaaaacatcgtgctaagtgctacatcacagttcataagcaaactcttagtatccaatagacttaaaagccacccttcatatgcaaacagtaagtatctgttagacataatagtcaccctaagttggtttttaagtatttggttgatttggggccttagggaagacacattttggggttcttgacaagaaaaaccttaggctactatctaaacttcaggaagagtataaagccgaaatcttttctaattgtaacacatggaagttgaagatttacctttctgaagctgatcaggtgatatatcctacaaaaagatagcactcagaataagttcacataaaacgaacaaggacaagaagataagagctaacatacctttgtttgcttaagggatgataaataagtagccatgaaacaagcaataccgtcagctatatcttcttccctaacaacgacataatcatcttccgtttgacccacacattcctcatcccataaatcatcttcactaactacatcccaagagctactatcttctgcaaattcaacagctagcttatatagttagttatctctacaaccaaattacacacacattggcaatcttattgagtagataaacaaagctgaaacatcttaccagcaagaacttggggaactgaaacttgagctaattctatcttttcacgaaagtcattacattcaactctagatttgatgagatcataaaactgcacataagaaaacagatcacagaatcatgaaattgagcttctatattctaagttgagctaacatcgatcaaaatcctacgaaacagagagattaaagtaataaaaaagcatactttatcagcttcaggatctcctggatcggaagcagacggttcttccctgtccgattcttcctcctcctcctcctccggtgattcactctgttcgccaccgttttcatcgccgggaagttctagaagctcaagagctctctggcaatccgcgagcagattctgtaacgtctttcgctttacacgaatactatccaaatcgatgcggtttcctttggtttcggcatcatgagtcgagcaagagacttcgatttccatggaatcggaaagttttaggctgaaatttgtgaaagagaagaagatgaatttgatggttctcctccacaattgcgacctacaatatttgtttgttttatttccaccggaaaaaggggaaaaggagagtcgtgactcgtaagacaacaagcaactaaatttgctgaaattagattctattcaatctttgggacaaatattgctttatatatatcttaaagaattttaattgattttaaatatttttattattttgtatataatttttagaaatgtattcttgatttttaaaattttgaaatcagcatacttaaccaccataaaaaccataatcatcaacacttaatcagaaagcaattgagtacttattaaaatctcgataagtgttatggaatacagatggcatatttggcatacataaaatattcccacggtgacgggagctgtaacagtgacggtgacaaacacaacgaagacgtcaaattttttacatacatcacaactttatgcaagaagtaacaacttgttactattttttatgacaacgatctcttgttgtttcaccttctttatttttttttcctttattttttttgtctctgatgagaactatacaccatagagtcatagacaatagtttgtgtagggtgtactattctccatttctccttgagtagatgattgatcagtatcagttgataaaggcctttaaaacttggtgaagacgatctctgaggaaaattaattatacttaaataataagatttattc

SEQ ID NO: 28727 - DNA, 2130 bp, Arabidopsis thaliana landsberg
ttgctctatgttcattgaacaactccttcaatatcctcaggtgtcactgagttgcaacttctttctctcctgccccagctgtgacacaacaaagaactgtattaatatgacatgaaacgcaaatattacatttattacttggtattgacacttaccacatgctttactcgttcattgaccatacggggtcctccatagacacaatcagaatgataagggctacgaataaacacatctcccattaccagcatttctttgttcacccagcgtataggaagcctggagaatgcagcatcacataacaatgaataaaaaaagagtatatgctaaaagtcaatagaatgattatcatcataagcataaaaccatttgtcaccacggttcttagatgcaaaacagggaaaactcaaggtccacaacataagtagcctctgaccatgtcgagttttatataatgtaactcacccaatggtagcaaaaactacataattactttctttgacaattttactccattgtagcttatactttcagctatgccatgacaagtagtccaagtgtccaacataaataaactctagtaaagatttgtgacttgatagcagcaacaactgaagcatagctaaagatacaattcgtcaaatatatagtcccaaaaagcttgcatcttctaaaaaccacaagcaataaaaacgctatgccatgacaagtatgaaaactctagtaaagatgtgagatatgatgctaatttacaggcattttcacagtagcaacaaatgaagcaaagcaaaagacacaatcaaccatagcgcaagtattagttccaaatagcttacatcttctggaaaccaagaacaatacaaacactaaattgaatccagattcaaaaactaaacgattcacagttacttatataagcaagcatctgatccaaccctcgttgctaacagaaacaaagcacaaatctgttcacaaacagtagcaaaagcagtaacaatgtaagctattgttatcttcttcacacaaagaactaacaaaaaccattaacaagatttcaaacactactggattgtattaaaatcatcatcatcatccattcaatataaagaaccaaagagatccttacgtcttagaaatcgcgtcaaagatcatctgcccttctgcggtaacaccaaaaccaatcttctcgacgttactgcataatacattaatcaaaatcagtgataaaatcgaaacaatcatagagattttcacaacaaattgcaaaaactatcacctaatagcatgattctctttctctatgagtccatcaagattaaccaaagtatttttagcgagacgttccttaaccctccccagattcttcatctccgttatgtaattcacattcaccatccgtaaggatttcgaatccagaggtttaggcttcgtgccttcttgtaaaatcactaatccgtcaaggaatacgcgaaaacaaacacaagaagatgaaatcaagaaggcgaagtagcagagataagaatctacgagctgcgagtagcgatttcgaaaaaggatatcgaaaacggcgaagttgggttcagaatcataagccaagacgatgccattgaactgatctccggtggtcagcttgacagcgtataccttccccacctcgaatttcttatcctctcctccgctgtcgactttagccaccgtagcacttgctggtttcatggcggcgaacgaactctccggcggtttctaaatcgcggttttgaaaaagtgacggttgcaaaatatcttggtttatggcgcgtggacaattaataacaaactgtaaccgtaaatgggcctctgttcagagctatataggcccatataaatctatcctgggtcgtcactatttaagctattaccaggcctagtttattaatatagcccaattagagtttagaccagcttactcttgactcttgagctttgcatataagttgttttttttttacaacaatttcaattattttcacaaagtatatacaatactattcttatccactggtagaccttttgttacttaataagatgtttatgctagatttatttttattttacttttatctgattttatttgtatgtctttttgggtat

SEQ ID NO: 28728 - DNA, 1576 bp, Arabidopsis thaliana landsberg
tagtaatataacttaaaaaatgccaacaatcatactcgcaaacatacatagctggtgggtggtttttccaggttattattggtacgtagtaattgactaaaatatattcataacctcatgaaagcgtattacaaccacaaaatgaaaccaaacttcgttcatgtctttcagccaaaaagataaattgcacagaattttaaaataacaaacgcaatagaataggacaatcctctttagccaaagatactttgtgtcagtttttttttgctttaaattaataatcgtaactatttctaaagtaaatgattgtattattttttagttattgattaatccgtaaggccactaatacacgacatacgagctttggggaaacttcactgccttgtttgattatatcaatgaatggtatttatttgacggtgaaagttatgtcattgctctgtggaccttttcaatacacaatagggaaggaattcatggttaaatagttttatttttgctaatattatgctataatcgttttattctttttatcactgaaagtgatcccactgagcagagtacaaacacttactttgagaaaagtagtctcagaaccgaggccgtaaaattccaaaaaagcatagtctatgcatggtggtcataagataacccaaggtaaatacagagacaaacacacaagcaattatagagatatttataaagacccatacttaaacccggaacttataattgattctcgagaaatcaactaacagagcaaaaaacagagtataaattataatgccaagacctgatttggttaacgaatcacagtgcacctccagctacacagacatgaaaaggcggtccacgacagaagatgggttcgtttggagaagcagttcctgctcgtgctctgagtacattgttagcgtcttcaattacagcagctgctaccatcgtgtactctcctggaacaaggaagtagagtgaaaaacagtgtcttgcttcttgcagcggcgctacttccattgagattccactaagagcacctgacaaaagtataagccaccttttacatatctcattgtaatacacacggctataatggcagcaaatatctatgttacacaaatatttattacttagtgacaggaatcttaccagcccagaggacagtggcatcagctccttcagtgcagttctgtccagctacatctctgcaagtaacacttagattcaacttgatagcttcgctagtgttattgcggaccagaacctccataggagtgacttcatgtgacagaacagatccctttgaaaatggggactcagcctttgtctcaggatccttctccagaccgtttctgaccagtctgaaaccaaatgttagcggatctgggagcaaaacatccatcacagtcgtctggagagctgtctgaattgcatccttgatgtccagttctcctgagctgttccttcctgattgccaccgaacttttatcttagagatgagattcttgatcaatgtgtttatctcagctttcgtgttcttctctgagaagctcggatttctactacttaagggctc

SEQ ID NO: 28729 - DNA, 2014 bp, Arabidopsis thaliana landsberg
aatgactatacattcacacacgactcgcgaggctccatttacataaatatccctcaaaactccattactactaaccttctaatctcttcgcccaccaaacaaccaaaacctctctgcaaccaaaacgctaaacgcaaccaaactctacaatgacggggagatactgcgaccaacacaacggctatgaggagaggaggatgagacgcatagcatgggcatgtcttggcttaatcgtggcggttgcgttcgtggtgttcttggtgtgggctatacttcacccgcacggaccgcgttttgtcctccaagacgtaaccattaacgacttcaacgtttctcagccaaatttcctctcttcaaatctccaggtcactgtatcttctcgcaatccaaacgacaagatcggcattttttatgatcgtctcgacatctacgtcacataccggaaccaagaggtagcgttttgcgttttaatgcaattttcttttgtattatttggtgcaatgtgtatggatcagcaaattttagtatgttgtaacgttaaacccacaaaatatcacccatccttacctatgtctacgaatatttaagaatcaattcgaattcacaatttgttttgggttaaattttatactattagtcatcattctgcagtattcataattgacaaatctgcaatgttgaaaaaccaatacaaccatatgcatatttgtgtaccacttgcagaattatttttcttcttttcttcttcttggaatgtcattctgtattcacgaataattatagaacatttacatgaatacttactgtttaaggaaatagaaatttggcaagctattaaagttgaatgaaatacaagagaaaataaagtcttttataatatgttcatatttactaaaatgttttaagtcttttcaaacatttttttgttttttttttgtttttatcttctaagcatttacgtgttaatgtaataattctaactttagttttccctattatttaggtaacgttggcgaggctcttgccgtcaacgtatcaaggacatctggaagtaacggtgtggtcaccatttctgattggctccgccgtgccggtggctccttacctatcttcggcattgaacgaagacttattcgccgggttggtgcttctcaacatcaaaatagacggttgggttaggtggaaagtgggctcgtgggtctctggcagttatcgcctccacgttaactgtcctgcgttcattaccgtcaccggaaagttaaccggcaccggtccggcgatcaagtaccagcttgttcagcgatgtgctgttgacgtatgaaaaacaagaagaagaatctttttttttctagggtgttaaaggagatataaaggtaaactatagggctgtagcaaattgttgttgatttgacttattagttaatttatctaaagggtgttaaaagaagggaagaacaaaacgctaattaaacttgttcgtttaagtaatgtccatggtactaaagcgaaagcagaacatattagtaagttcacatcatcacatgtattcctttttatccaattcaattttaatagtagatagttttcattaggcaaacgtacgtatgataaacaaatttgatgatttagaactacgagatacttatttgaagtactcatgttaaatttacgtggagttttaggcttttagcatatatataaaagatttaacacatgaatgaaattaatcctgacatttttagtactctccagcctgcacacgaaattgtcaggattaggcaaagcttacaatagtggttttattttctagttggatatgaatcacatgacaacgactatgtagctgctggtatttatggaatgaaatatttaaatataaaacacaccaaaaataaattttaaaaattagcaatctgaattatttattgttagaaacactttgtttatgttttgggaatataaaaatttgaaaaatgtactacaagatattttttggatttcatgggggaatgac

SEQ ID NO: 28730 - DNA, 1332 bp, Arabidopsis thaliana landsberg
acgacatatgcatttaagaaagagaaggcgattgttgtcgcagaaaagaaccaaagtggtttgattctttatgtcaacgacgaaacaaagcggtgtgggtcgactgatgcttctacgtttctttagtcttaactgttttggatgttatgttgttgggattttgatagatctctgccattgatacttctatagttgtaaatttgtaatagaatgagcagacgcatgattttgacgcaatattggtaatgaaatatacttttctttctgtgcaccctttcgtgattagtttattccatgataataaaagtgaacgaaatccttcttattgacaaaagaaccattacctaacatattattctcccagattagaaccatgacctaacatcaataatggaaaccaacccatgtggatagaagaccatacatttcgtgaaaatcccaagagaacgaaattatttctttcaatgacgttcaatatcaaacctaatacttgtctattgaaagaatcaataatagatggacgaaaactggatcattgagatgtgaccatacgaattatgaacacaaagattttaagatccaagcaataaactatggcatagaatagtgtctcccaaccaatttacattcccataatcaaatacaaactaaggcagaacgtcgatagacaatagttaaaatgttatgaaccgaaggacattacacataaaacgaaagagaatcatcgagagattcatttttaatgccccacaaatcaattaaggtttttgtttaaccacaaccctcttacaaataaatcccgaagctttatgcagagagagagagactccaatcagaagcaagcatccaagagacagcaacaacacagagcagcaagactgcaaaagcaaaaacagtgtttacatttcacaatcagtattaaaaacaaatccagttgctttaagacatgcaatgtagtaagcagtagctagatcatgcaaacaatcaaatcctaaaagatgcacattcatcaaaaacaacatccgattcacactgttaagtaaagccatcaaagaacaacaattatcctgtattcagtgaaggaacagagaacacaaaaaggatccatcttgctaagccaatttacttatcaaaacttgtacaagtatagtttcaagtactcataaacagttaaacactaccaaaccaataacgacaagaacacaatcacaattctagtttctttaaagcatgcaatgttgtagtaaccagtagctagatcatgcaaacatgttaaatcctaaaagatgcaaattcattaaacacaacaacaattgtcctgtgatcagtgaa

SEQ ID NO: 28731 - DNA, 1287 bp, Arabidopsis thaliana landsberg
  unsure (1)..(1287): unsure at all n locations
aatcatcatactttcataaacacacaaaactataacaaagaaacaaaataatttaccttgacatcaaatttagccaaagacttcttgcaatagaatcgctgaaacagaacctgcccagtagccataactgcctgtggtctaaaataaacaatctaagttaagaaaatcacagctacgtaacatttgagtcttgcttaataattagaccaagaaaaaggatacagtttgagcaatattccaccctcttggatgagatcacatccatagattctaagagagatttcagttgtttcatctatcccatctttcctcgaaggtgaagccttcagctgctcgtcggttaggtaaaaattgtcgatagcagtgtaaatcatcgattcactaaacaacaacggtcactgtttaaaatcaagagaagaaaaacttagattacaacagctttacttcagatatcacagccaagaacgtaatatcgcatacgagaacaaaatcgaaataatgaacattatacacatgaaatcaatttgtgactaacaaagttaataaaacatctcataaatgaaaaaacacaattacaggttctatattagccaaacttcagaattaggattctgccaaaattcagaatctcacaaattgattgctataacagagagacgagactatattgtcgatttttgctacatttagtaatgagattacgccctagtttcaactgagatcaagcaattaaacctnnnnnnnnnnnnnnnnnnnnnnnnnnnnnnacaggttggattaaaaggggaaatggtttaggatgtaccggaattgggagatagacggcggcgaaacagactcgcggcgaggagagcggagagacgagaagaggcgacgaaatcgggaaatcgagtttgttggagaagtgagggaaaaaaaagaagagaaattagcaaaaaggaagaaaataaaataattgggcctactctaactaggcccttattgggcttaggaaggaagaaaaatgtttttaggattcgatgatacatgtaattaactaattaagagatcgattgtttgaactgtggtgatgtctctgctccttccatagatgttaaataatctaaaattaaaaatttcgataaaaagttctgatggatcatgaatctaaattttaaaatgtgttgccaacattcagggagacaacacgacaaatttataattttcaatttggaaaataaaatatttgattgctagcccgaaaaatatattcaaatcacagttacaaatgcagccgataatttttgt

SEQ ID NO: 28732 - DNA, 2108 bp, Arabidopsis thaliana landsberg
atgagttagcaaaaatcattaaaattctctattatgatttctcatagtgtgtgtgtatattgtggatctactaaaaattctttgttattattactttattttgtgaattagtttgatataggtaagtacaaagttaactttattatttactcaaaatttatcagattaactgattttatattgtttcctttggtatatagacgtactatagtttttagaaaaaccataagattcctttatatttcatagagtgaagagatgagatgagatcttggctggagaagaaataagtttccacgaggaggactctttttttttggtgaagacgaggaggaggactcttggttgatccagtctttacgttagacatcgacccctacatttatttgcctttctctatcaacatggcaggtaaaaatcttcattcaaccgaaccaaccaaagtctcttcccaataatattcaagcaccatcttttgggaaactcatacatactacagtctacactctttcattttctttcaaagctcaacttaacaaatgatatagtctagttgtcaattatatgttttaattagtgttttcacatcaaattctggttttgatatttgatgactattttcggaaacatctcaatgtcccgcaaatacaatcgtctatcatatataatcccgtacgttgtattcttatagatagaataatatggcgtgatctttataatataacatatagaatcgtgtagatttattttattttatttttatatatcgcataaattgcaaaatacttatatatgtttgttatatatgatacccattttatagttacttaaaaaaagttaagcgataatatatatatcaactttttataacaaaaaagtataacacatggtaaagaaaaataaaaatgaagacatggcgcgacacgaaaatggcactaaatatacatatataatagatagctacaatatcccatcatacacacttttttaattgactaatacataacttacacacttttttaattgactaattcataactttttatcattgtcaacatgcaaattcatatttccgttgaactattattcttattttggttttaaaagaagggcttcctggtaataaaaatatgatttccaaatgacgttagagcaaaaaaaaaaaaaggttgtctggtctggtaaaatgaaaaagcaaagcgtcttggtatagaaaagtaatatactgcctcctaatttcttcgtccttctaccgaagaatctctccactcttgccctctttcgaaaccctaaaccagaagcaccagattttttcaactttttcccagagaacaatagaaaacccaacttgtgctctctagggttttctttattccttctcatctttggattttcttgggtcatcattttggaagcttacccaccagcgaaaaaattataacttccatcgattcctggcttctctctctcgctctctctgcatgtgctaaatcgccggactgatcctcactgtcacctctgttcccggcttattcgccggtgaaatctatggttggtgctcagatttatttccaattgtttgtgcatctggtggaggataaatgctccttgttttggatctagggatttctagtctagtccttgtggtctctcttgttttacctttgatcggtctctttgttcgtcacaaatggagggtcgctgcccaaagaagggaggagattagaagacttcttattcatgcttctgaagaggctgccagggctgagctagaggcctctgttgagttctcttctgttgccgtctctaatgtcttccattgtcctgtttgctattgtcttgccacgactcgttgctctcgctgcaaagccgttcgatattggtatgcaaaaattctctcactttctccatgtccaaattacgttgtatgatcttagagttatgattgcatctgctgcactctctgctgagacgtgatgaattggagtgattagtaggcaaagaatataagttagttctgtaactttagcgatactggatcagagatttaagaaaattgacttctttttctatgttaacaaaattatgggtaattagttagcttggga

SEQ ID NO: 28733 - DNA, 2088 bp, Arabidopsis thaliana landsberg
  unsure (1)..(2088): unsure at all n locations
gaaataacaagtaaacaaagatgagaagaagtttttgtttcactttcttcttcttgttggtgactctgtttccaaccatcttctgcatctctacaagcaagttgttaccagtgtcatacttatccaattagttatattaaatatataaatttatatgtagttattatcttagaaaaatttaagtttttgcttatgttttgtttatattaaataataactacatataaatttattagataaaaaaaagattagcaaaatgttaaaagcactaaaagaatcgacgtacaaactttcattagatgattaaaatttatatatatatatataccctctacttatactcttaacttcaccagtttaatttcccaccatcaaaagcttggtaactatggagaaagatccaggtactgttcaatttattgttaatttcccttacattgttttgattttgtatcttcattgtaaagttaagaattttattttattttatctcattgttttgtcctttcattatttatccagatttcgcagtctctctgttgtgggatggtgaaaacacccctgttgaggttgatcaggtagataatttgataaacaacattgaagcttctgtgagaactgctgacccaagatatcatcttgctcaaaggaaggttctagtgggacatgaaaatctcgactttatcaaggagaatgaaaagtctctacaggtacaaggtttccgcttgatcaaaccaccctattgagagcgtaaatgcgtcatatgtgatggttcagttcaaacatcacgtcacaaacgctacccttacgagcggccttatgacgtagctgacagactaatactacaagaattacttgtgcaaaagttgctatgtttttaacgaggaagacaaacagataaagagtttagagatcttatcagctttgccaaatattgttctacatgaagtttttaatttaatactctgtcacgttcattctaatttaataaagagttttgtagtaaaactttgacttccaactcttattacaattcgtatcagatgtgatgccagtcttgtaatatattgacatttgattagcactaaagaaagatgtggtacccattgtactttcttatacatctaaagctttctcaaggtttccacgatttgctccaccaagtaaaatacttgaagcttcaagcagacgagcaaatgagatctgaaatctttcaagcatttttagctgttaaggtgctcagtagtagaacgatttggctttattatctgcagggtccttgcaaagaattgaccggacctccatgatcgatctcggaggctccaggtcttgctctcttagcgagttgccaagcagctgttgcatctgtgctgcaaatgtatcgtctaatatctgaaaatacgcatcattccatgtaagatcaggtgactcatacaatctaagtaagagcagtttttttattgggacttaccgagacagcaactctagaacccttgtaccaagctctgttctctttcctgttctccaaaaagcttaaaacaatctatcacgcacacaagaataattagctctccaacaacgcaaaacaaaatgtcaggagaggagaggccattaaaaatagttacctgtcccatacgatcccaatatcctctagacaatgcgatgaagacatgcgtctcacaaaccgagtgtagatgattcactgtgttggtgagctgctccttgaggttattcattttgcttctgatgtctgattctccaacactttctttagagtcctgaagaatcttcttcaacattgtcgttttttgtagcttgctctgaaaagaaacaagatatccggttacaacacaagcatataatgaagggaagatctcaaaacatgctaacccaacaagataacaaaacatggacaaatgttacacaggaaacatcaaaacagtagaaatcgcaataggaatgcactacaaatcattctatgtttgctgttgacaacatattttgatccccttatctctaatataagatcaatgctctaaaacatacgaatagctaggaaataaaagagttaagggaaacgcacntttt

SEQ ID NO: 28734 - DNA, 4581 bp, Arabidopsis thaliana landsberg
  unsure (1)..(4581): unsure at all n locations
aaccgataaaagtttcctgtgtccgtccttgtaaccgctcaggctaggcagcaagaaagtgaaaaattctttcttttttgtttcttttggtgaacaacaaattttacagtctgaaacagattgggacaattgtataggatctccataaaaatcctacgcagtgtcattacttttggtgctccaaaaactcaaaaaacatcatttttaaatctactataagcaaacaaattacaatagctcaaaaaatcaccaaatcagaactctgggtgcaaagcgatttaccttgaagaatcgattctcaattgggtccacgaatctcgttaatggagccaagctacgatttttccaatcgatttttgtactgaaacaacaacgattatcccaatttctcatcaagatggcagaaatttggcgcctttccgccatgaatagtcacgacgagattattttctctcttcagattgtgatttcaaatttcacttcgtttgtcacacgcgtgaagcaacaaaacacacgtgtgtgtatatttttattttattttttgctgggcggtcaggcgaagcagaggctcctgaagaaaatggcgcaacaaagtttatttatttcattaatattacttcttcttcttcttcgttggtaataataataagcaaatcccaaaaaccctaacggtactgtgtagaagctatatacattcctcttacttcacctcaacacgcaagaccagattcgtttccccgagagattcctttccttaagccctaaagtttcgatttttgatttttattttgaaagaatccaatttttggatgtctcctgcggcggtggagattgggtctccggttgaaaaagtctcttctgttctaaaccctatggaaaatttctctgcattttttccggagagtgttcactctcacgatcaacgaaccatgggctcttcgttctccttcggatttggagctggttcaggacaaaccacgaagactcgacacaagccgaggctcgtgaaattgaggaagaacggaagagaggtgaaaaaaccttctttttccggcgagatcctctcaggtttcaatccgtttgcgccgccgggtaaaggtatttttttttgttgcatttgtgccgaatttgatttcattgaagatccgggtttcgatattttgtgagctgattggtttagtttgtttctgtaggtagtcttcatatgaacagtgggaatgatagagatgctggccaatcacctggggataaatgttttgtctttggagctagtgggaacagttctggtgcaaaatctagtccaggcaatgccacaatagcttctttgtctgatgaagaggagtttagtacacctataggggactctgagttggattcggaatccattaaagaacattcaaatggagttaggggaaaggttgataatgatcgggaaaacatcagaccgtgtagtgagagcacaatttttgatgccacaaatggatttaggtttgatggtggtgttaacggaagctggaaaagtgttgagaatccagatgctgtcaaggagttttttcgaagacagaatggcatggacaaggcatcagcgagtaaatcttgtagcaagtctaacagtgtacaatatgctcatggtaaaaatagggatgatcctgaattgaacctgcatgctgacatggagaagcttaatatcagtgattccagagttcatggtggcagcgactatgaggaagcaagcaaatccaataagacacctgtatttacttttagtagctttggaaaggttgatcctatatgtaaagaaggtgcggcgacatcagagccatactcgttcagttccaatggttttcagcaaagtaataatgcgtcgggtgaaaaccccacttttcattcccagaccacctacggaaacaacttaacaaacactagctttgctacaaaaacattctttgatgatttcaaagtacctgaatgggatccttcgttgcttaaggacagtctgtttccagaagtagacagaaatccagtacatgcgcgaagtaatcgttcgtccaaggacaagagatcaaagaaagttaaggaaaaaatgaaacagggtgagccagatcgatgcaatggtcaaactgctgagggaattgaggctcaagaaaaactcaattcccctggatattgctcacccatggattattctccttatcaaggtgacaaaacgagcaatcaatttccaacagaaactcccctggcaccatcacattcaagagaacatattgattcccgctctagcaatgactttaaggttgcgtcagccagggattcatctctcttcacggcagaggatcatgggagtacttgtattccgaatttttctttctcagcgtccacctctcaggaaacaatacgacataaaaagcttcaagctgtaaagaaatataggaggaaagttaacaacagtttgccgaaaagcaatcttaatgccaccatgcgaaacaatcaagagaatcaacctgtgaatacaggtcaagccaaacaggactcgggctccacatcgatgatgcctgatgtctgtgaggtttggcgactaaggtatcatatactaactcaagagcttcaacattggccctttttgaatattttctttctcagaattgagagatgtaattgtttgtatcaggggaaatcaagcctacaaaaatggttatatgtctaaagctgaggaatgttacacacatggtattaattcttctccgtcaaaagataattcagaatactctgtgaagcctcttgcgctttgctatggtaaccgcgccgcagcacggatttctcttggaagattgagggaggctataagcgactgtgagatggctgcctcacttgatcctagctacattaaagcgtatatgagagctgcaaagtaagtttaaggcgtacctttcagagttgtttggttatgattcatatgaatcatatctgttgaataaaggaacataggttatgtccagaaattattgtttcacctcaagtcaatttgtctttttttttgcttaagctttatagcttgaatttagtaaatcccgtctgctaaggttttagatacgaattttcttgcagtggccaagaaagtctatatctaagaaataatgttcacactgtgtatctagtaaaatcaataattatgttatttattttttcttctatgtttgctttagttgtcatcttgtgctgggggaacttggatcagcagtgcagtattttaataaatgcatgaaatccacctctagtgtctgcttggatcgacgaactactatagaagcagctgaaggtttacaacaggctcaagtatgcattctcttctcagcttttttattgttctaccatggtctagtcaaaattgttttatactttatcagttaagatataattggatgttaattttgcgaacaatgtgctgaatcagcacatagttctgttattgtcttattgaacacatttttattttacttacctgcagagggtagctgactttaccagctgtgcatccatatttttggaaaagagaacacctgatggcgcatctgacgcattggttccaattgccaatgccttatcaattagttcatgctcagataaattgcttcaaatgaaggccgaggccctatttatggtgagtagcctttcgttttcacttctcaaaatttaaactttgctttcagtgggcatgatcttctatgtcaatcctgcagatccgacgatataaagaagttattgagctttgtgagaatacccttcagactgctgagaggaattttgtttcagcagggattggtgggacgacaaatgttaatggattagggtctacgtatcactcgctaatagtttggagatggaacaaaatttccaagtcgcacttctacttgggaaaccttgagaaggcccttgatatattagaaaagttacagcaagtggaatatacctgcaatgagtaaacactttttctatgttctgcaacaataaatttattgtcatgtatgcattatcttcatctgttatcctaactgaaaatgtacgatttgctccccagaaatcaggaagagtgtcgtgagtcaccagcttctttagtggccgccatttctgaactcttacgtcacaaggtatgctctatgttagaacttagggattcttcatatttctatctttaacatcaacaggtctgatacaatccttcattatgcttccttgttgaataaaatatttttttatgcgttgattacatttgcctaagttttcttttgtgattacagaacgcaggtaatgaagctgttcgggacagaaagtatatggaagcagtagagcagtatactgctgcactatcaagaaatgttgactcacgcccttttgcagcaatnnnnnnnnnnnnnnnnnnnnnnnnnnnnnnnnccctagttcaaattgctgatgcaattgccgactgtagtcttgccatggctcttgatgaaaactacacaaaggtatatcgtaatctttcttttgcttttgacattgtgtacgatgctcgtcatgtactcatgtgtgctagagatggaggca

SEQ ID NO: 28735 - DNA, 2353 bp, Arabidopsis thaliana landsberg
  unsure (1)..(2353): unsure at all n locations
tattcattagacaatacaaatgaaaacaagaaagaatcataatgacacagagataaaagttggaggcgaatcatctatcaatagagcctacgcctacatacggcagcaccacaaaagcaaagtttctgcttgatattacccttagagtcacgtacctgatcgagcgcgtaattgtagtcgtaacagagttcttgaagcggaggtatattgtcctgtgcgaagaacatcacgtgagggattctagagtcttcatgatcatacaaaacgttttgggcgtacagatttggcgagcagctatggtttatgaacctcccaacattacccttacttgctgcatcaatggtgaatccactcgactcatcaccttctgccatagatcggcctgcctgtgtccccagcattagctctgacatcccttgagctaaagagttatcatatctgttaccaatatcaaagagatactcgtcgttcccgattcttctttctgcttcactatcctctaaaagttcaccaacgtattcacatatgaagctaccaatagggatcgacttaagacatctcactccccaacctcttgacttggttttgaagatctcaagcggtaacttgatcccatgctgtgtgactcttaggtagcaactagaagggcatttgcagagtgggccacattcatagatagtaggttttgcaccaacaatggctccatcgaagttgtacggtatctctccaccgtttttctccacacaagcgcacaccctcgcttcagcttcggtgcagcgcgtggtgcaacagcatgactttggaggaactggtctgcaccaatctgggtaaatcagtttaacagtgtaggtgaacaaaggcggtttctcgtcgtctatttcgttcacagcgctaatgggtgactgctctttcccttctgagatgtcaagcttgcatagaccttcccggtattttgacttagatttcttcacctctacccaagaaagttcaggttgtccaggtatgcgcctaagttgaaacttgaagacattcataccgtgagatccgacttgttgccaatacttttccacaagatataatccgtcgtaaacataatttccaccttttgatttatcatgagttgacttatgtttgcctctaatgacacgcacaggggtttgtttttctatgctggttgctaacgcgaggtttccggtaataagcttttggtcttcaggctctttcagttcctctcccttcttctttacttgcatcacgtttccgccttgaccagtgtaggtcaagacatccgagttatnnnnnnnnnnnnnnnnnnnnnnnnnnnnnnnnnnnnntgtcgcaactttgcccttaccatatttcatataatcgataccggcctggcttggtttatgtataccaagaatgttcagctccatcctatattggaactcatcaccaacctcaaccccaggcacttctcccaaaatatgcacaccagagttgagaaatttgccattccttttgagaatggtcgaagcctcaaaatctattctaagacctttaccttttctcctttggtcctcaggctttgcttcatcctcctgcagaatctttctgcaaacgccatggaaaagacgtagagtttcctttactttgttccgactactatcaccgctgcttgaaccgctgcttgtcccaacacctagtatccgaagctgctcaggagaatccagactttccctatcacgccaatataaattcttcttactcttcttcttcctagatccttcaccaaactctcggctaacaaccttcaaggatgaatgacatgcaattcctttctttgccttctttctacccgcaacaagcctcggttttgcaactgcaacatctgacatttcaatttctagcggctgagtttgatccaaattatccattcctagactgctctcatctgcgtaaacaacgatatccctgacaatgttttcagttccgctgctgctgctaacaccagaacccgccacaatctgttcactgtttgaacactcgtctcccgcggtaacagacaagtctcttaccacatcaccttctggcaaacaagttctcagaggctgaacctccaccggctcagccatcctgatatcactcacgttttcagaggcatctctctgccccaaactctcctcctctttaaccaaagactcaacaaccttaacatcttcaacaacattcccattctcacaagcaatcttcacttccattgctctcgaaccacaacccggtggaaagtccctcacagaaaaaaccaaccgacgcttaaacttaagcccactcattcgatcaagcttgcaaacaccaccattctccaaaa

SEQ ID NO: 28736 - DNA, 345 bp, Arabidopsis thaliana landsberg
acattgctgatggagccgaatgctggcgggaaaagagtcggacatcttcactgaaaaagctggaggtgccgaacgagagcccgattaaaacgggacgtaagagccgaacatcgctgctgtgaaagtcagacgatttctgagtagagccaaccaatcaacgctaaaaaagccattgatgtcggaacagatcagtgaaataacttttcttatctgaaaagtttgaaagagagaagagagaaaagcgatttgtccaacacacccacatgatatctttcagagcttttatggttaatgtaatgttggtttacccctaaccccatcactcttgtcggaatccttattgct

SEQ ID NO: 28737 - DNA, 3337 bp, Arabidopsis thaliana landsberg
  unsure (1)..(3337): unsure at all n locations
ttcagcaatttctttgtcctttgggtttccgcgtgaactgacttgcgctgcttggaatgacccgaacagtccacttcgtggcgcaaagggaaaagacagtaccactactgagtcatatgttccttatggagtcattgagaactcgtttctaacgggtctgaatccattggaatcttttgttcattcagttacaagtcgtgacagttcattcagtggtaatgctgatctcccggggacactgagcagaagattaatgttcttcatgcgggacatatacgctgcttatgatggcactgtgagaaattctttcggaaaccagttagtccagtttacttatgagactgatggtcccgttgaagatatcacaggtgaggcacttggctcactttctgcttgtgcattatctgaggcagcttacagcgcgctggaccagccaatcagccttcttgaaacttcgccgcttctgaatcttaaggtcttcctcttcttattcttcgcttcttgatttattgaatcatttccacttaagtcgtttgcatttctctaactagattttatctctttctacagaatgtattggagtgtggatcaaagaaaggtcaacgagaacagacaatgtctttgtatttgtctgaaaccctttcaaagaaaaagcacgggttcgaatacgggtcacttgagatcaagaaccacttggagaaacttagtttctcagagatcgtttcaacatctatgataatgttggtaacttttaactgtctatatgaatctttttggttaagggcttctcttaacaaatgtttattgtcttcttggttcatagattctctccaagttctaacacgaaagtaccgataagcccgtgggtttgccattttcatatctctgaggtataaactcatacccatataaagccacaaacatatatatatgtgtacagattctaatgaacctcttctttaatttcacagaaagtactgaagcggaaacaactgagcgcagaatccgttgtttcttctttaaacgagcaatacaagagcaggaacagagaactgaagcttgatatagttgatttagatatacaaaacacgtaagaacattcttgaatttgtagcagacatgttttgtttcgcttttatgtctattagaaactgatttgttatacatttatgtgttgtggattagaaaccactgctcttcagacgatcaggcaatgaaggatgataacgtttgcatcacggtgactgtagttgaagcctcaaagcactcggtttnnnnnnnnnnnnnnnnnnnnnnngttttgatcccttttcttcttgactctcctgtcaaaggtaaagccggatgaaaaataaagacgagcgagctgaacagatcgttgttttgttattgtcgttcttatgagttctatcatctgtttttgcaggtgatcaagggatcaaaaaggtgaatattttgtggactgaccgaccaaaagcgccaaaaaggaatgggaatcatttggcgggtgagctgtacttgaaggttacaatgtatggagatcggggcaaaagaaactgttggaccgctcttttagaaacctgccttcccatcatggatatgattgactggggccgaagccatcctgataatatccgacaatgctgctcagtttatggaatagatgctggacgcagcattttcgtagcagtcagtatcggtttctttaacaatttcttcattttcttggtctctctcgcagcttctaaagtttgaagttttttttttgtgaccgcagaatttggagtccgcggtgtcagatactggtaaggagatactaagagagcatctgcttctcgtagctgatagtctctctgttacgggagagtttgtggcattaaacgccaaaggttggagtaaacaaagacaggtcgagtccacgcctgcaccttttactcaagcatgcttctcagtatgtaacaaaatcccatttcttttggttatacaaagcttatataggatttcatttgatacttagtgcttgcttaatctctgcagagcccaagtcaatgctttctcaaagctgctaaggaaggtgtcagagacgatcttcaagggtctatcgacgcattagcttggggaaaagttcctggtttcggaactggagatcagttcgaaatcatcatttcgccaaaggtaaattaactttacatcttttgatccgtttagaccacataacttcagtggtctaatttgtgtctttatgcatgccatcaggttcacgggtttactacaccggtagatgtgtatgaccttttgagtagtacaaagacgatgcgtagaacaaactctgcgcctaaatcagacaaagccccggtcccagcctttcggtttgctacattccgcattcctgaaagatatcaaggtactcgatgggaaagggattcctatgtcactgcttagaacgatctttacatggaaaaacatcgagttgctttcccagtcattgaaacgcattctccacaggtaagattctactgttcaaaaaaccgtaaagattctttcttccttttggctgatgcaaattacaatggcttaatctttgttagttacgagatcaatgaactgttgaatgagagggacgaaggacttgtgaagatggttctgcagttgcaccccaacagtgttgagaaaattggaccaggcgtcaaaggaatccgggtaaatcaaggctcatatgtttcagaatccttaaagacataaagatcctgaccatgtttcttttataggtcgctaaatcgaagcacggagattcttgttgcttcgaggttgtaagaatagacgggacattcgaagacttctcataccacaagtgtgtattgggagcatcaaagataattgccccaaagaaaatgaacttctacaagtcaaagtatcttaaaaatggtacactcgagtccggtggtttctccgaaaacccgtgaacagccaagtaagagtaaaaaaaaagactggctcttctgcggtataatatcgaacaatgtatgaagttgtatgtaattttgtttaaaaagtgattagatagatataggggaaaagccttttggctttgctctaagcttctttttgctcctttcactatgtaataccttttgccttccacctaaaggcttaaaggttaattacttagtggaagcagcaacgagaagctggcaaaggaggcttctgttctgtttctgtttctgtatgtaaaccatgcaaattccggtttgactatgaaatatccggttatgtttctgttctttaccttgtttatatccgtcttcatgcaattgcaaatgatccttattacatcctt

SEQ ID NO: 28738 - DNA, 2700 bp, Arabidopsis thaliana landsberg
agggcaaattgcaatgctacaccatccataaccatgcacatccaaagtttgtaatattactttctcctataaaacgaatatactctttgcctctttgataagcaacttttgttttcttcagatttggcttacgaaaaaaaacttgaataatcaaatataatccacctaatatacttttctgtaaataagttcaaccctaatataaagaaaaaaaagttttttaacaacaaatttggccaaacgaatttctttatttacttgaagttcggaactatatatgactatataaacacacaaaatatacccatatgccataacaaaagtaaatgtaaccaaaatctcctctgaattagtaaaaaacattaataattaaaattgtaggttattttttcttaaaaaaacagtattcgtctccttacataagaataagtctaagtggaccccacatacctagcttatcttcaatcttaaaaccaaactaaacttggcgacaattccgccgatcataccacgtggtttcttgtacatccgttagatgacaaattttcttgcttgtgggacatagttatataattttcattattggactcaccatgacgtggcaatttccaggaattagagagaatcgaagtttgcttatcttgacatttagcaaagcttcgactttgaccaaaaaaaaaaaagtagaaaaacaaaacaaattatttcttattataaatgaaaatgtaacgtaacaaattataagcttatagttgcggcggataaaataatcagatctaacaagaaagaaccgttacttggaagatggaatgatccatggtaattgaatgaaacactcacctagtccgacatgatcgcacttggctatgcaatgggaatgaaactgtgcgttttagctttgccgttttgttctcaaatatcttctccatgcactttttctgatcggccgaattaaccacaatcgccaaactctcacaattgttatctttagtttcttttttcccactcttctcggcagaaccgtcgacacactgttcttcttccaccatgaagctagcaacttgcattgaaccgtggcttgacgagaaaatcatgacaataccgagacctagccagatgagaataggaagaatgatcagggacaaggcgtagtagatgatccattggaatccgctatggttcttgccatttaatgcccattcaaaagcaaaagcaattccggagaaaaatgtggcaaaactgcctataaaaaagattctaacgattctcgggttaggaacgtcgaaaaatgtcttgatgtggttaagccaacgctttggtggttgcggcggtggactagtgttggtggtctttagcttttggtccatgctttattttcttttctttaagtggaactttgagagtaagcttgagatgaagagactacataagtcgttgaagcttgactctaatataaggagattattaatttttttcctttttatttgttgaagttgttcaaattcttgcgatttaatgggtgagatttcgaattttgaaattacaataatacaaagtagatgataatgtaactatttacataaaacaacaaaaccaagtcaaaacagtactactagatatttgccttttaacggaactatcgacagtaaaagcaataacgagcctaacttcatctttcattcgacttttgatcctaattgttaaatctaaagcgacaaaaaaaaaatcaaaagggatgacgagagagcaatacttgatatatagtggctactggctcataaatcttggttacttgatagtgatgtagcggtttgtcccgtgcctagcccaatagtctttaagatcaacaggacacgagagatcatatccttctgctgataaacggctgagtaatctcgagaaaacgtttccgctcattttcctaccgcccatccgagaatgcctcttgtttggcatctgcggtaatggatactgggataaggtggttgtgcagcaagacgattgccagccgccatttccccatttgtaacactgacgcgtagagcctgtgcacgaacacatgggtacaggcattgtcgtctcatcgaaggtgactaagttcaaaccgacatcttgactgtcccaatctgttctagatttctttccaggagcaggaactcgacggttcagatcttcacccacttttttcacctttgatagtccctgcttgttctctttcttccttttgttcaccaccttcgtgtttgtaacctcaggcggaatagttgacaaagggaagacttcaagtttgtggggttccccaataccaaaacaatcatctccatcaacacacttcccaccagacaaagcaaagttgagactattttcatggtgttgaagagcagcataagcattatctctctctatcaaagctttatctctctcagaaagagctttgtcacgttgctgaagcgcttcgtcccgagcagcgacagcttcctttttagcagagacagcttgatttctttcatgtacagcagcgtctctctcagcaaggatggacatgatcttcttattcatcaccaacgcattatgttgttccttaatctgatgctggggaatcatattccactgtaacaaacattctttgcttatataacttcaatcacactaacaaaaacatatctttaggaaaccaaaaatcttaagtcttaccataga

SEQ ID NO: 28739 - DNA, 2038 bp, Arabidopsis thaliana landsberg
aactcttttctcttttcgattcccctcggattacgaaacataggcgtctagagttcaatgggacggcccaactctaactaaaggatccactaacgatccaccacgtcactgatgtcccatcacctaatcataatcacaccagacgggagcttcttatacttatttgtcaaacttgatgaattagtagctaattgccatcatgtgttattttcaactttttcattccataagactatatatatatattgctgaccaaaaaagaaattgcttatattgattatatgcttactgagtttaataatgaaaattagaaatgtaataaagttatccacaaatatttatcaaatgaccgtgataaatcgtacaaaattatgtgttaatttaaccactcataatttttttaataaacatttatcatgtggatttggatttaaataatcacattcaatgatagtagcacaaaccactaaattgtacacgaaaagtatgaattaaccaaatcatgatatcaaagaagttaagcttagtagcttaccaactattcagtattcaccaaccagtgaccaatctctctttattaactaacttcacttcttttctgttcaaaaatcttttttcctttttgatagaataattcaattactgaccagaattctctaagaaatagatgaaaaagacaatccataatcactattgccataatctaataagctgcaaaataattcagaaacgacaaaaaaaactatcagaaaatgtcacaagaaataaaccaaaaggtccaaacaataaaatccatatgaactataaggcttatacgtggcccattatactgtgtaacccattattcttcgaatcgagccatagcaaccaacatgcaacaaatatagaagttttacgtacataggaaggaaggcaaacaaaaagtgttgtttcgtgaaccctaagagaagaaaacacgaacctttgaagtcaagaagaatttctccactgaagctcaatctgaatacgaccattcttggaatcaatcagatgatacttatcgttgattctccgattactcacaacatccccaagatttatcaccacgtaaccaagagtttcctgatcaaatcatatatcaaaatgttagtttttgctttctcagagatacgattttgatgcaatctttaaagagagatctgattttgtttctaccttgggatgaattagtcttgaagaagaacttatgacttcaacgtgtagcttatcgtttatgggaggctcatctaatgggaactgaaaatcttcatcccatctcggttctctgtttttcttcacacgctacaaaatcaaaccaaaatgtgtaaaatttgatgtcctctcatatgtttccattttgagttttaagagaagttttatatatacctttgtcttacgctcttctcctctgaatagcaaacgaacagaaggattagtgtgatatttgccttctagatcttcagcttcgtgaactatcaccacaagcaagccaccagtagaaggtgtgccttctggtgctttctctactgcatttggatcatcaatgttctctggaatatcatcatccttaaaaggtttatattcgacttcaaccacgagctgtccacgcgatttctcgctaactggctcttttggttccatgtgatttaagagctcaagtgtcatgagttttggctcctctggtgtaaggtctttgagttgaatcacattcattcctatcttatcatgttttccaacctgaaatatatcaagtgtacataaggcaaattatctccagcaattattgaaacaagccaattcacaaactggttttacctgttcccagtcataaacaatgagctgtagttcttggctctctggttctttaacaaccaaatcgaattcttcgttccattcaggattcagattactgtgtttaacaactgtcttcttaccaggaaccttgtctccagagagtgttaatttcacataaggatctgatccacccagaagatccttcttcttaagctttattgccttt

SEQ ID NO: 28740 - DNA, 1934 bp, Arabidopsis thaliana landsberg
aatgtcaatctagtgttactagtatatgaattactaacaatttaacttataaacacacaaattttaatatattatggatatagatagaactcttaaaatatttacaataattcttttagagatttatgaattcctaaaactccctgaaaacttaacaaaacttttgcaaaatttagcaaatctatcgacttcttaaatcaatcatcgactctatctaattccaattcccattaacaccccttctaaatatgaatatggatacaattgtagaattacctgtcataaatgtggtagaagcattaccaaccttcaaaaagtgtaaaggtggaagatatgattaaaccatcatgacaagcgtctggaatttttggatctagaagttcttgaagacggatgtggtgatacttcctgcaaatttaacaacaattttgaaatttttacaaatctatcgactttttaaatcaatcaactcaatctaaatccaattcccattaacatcccttctaaatatgattgtggatatcattgtagaattacatgtcataaatgtagtagaagcattaccattcttcgaaaagtgtaaaggtggaagatatgattaaaccatcataacaagcgtctggatttttggatctaggagttcttgaagacggatgtggcgatactccctgcaaatttaacaatacttttgaaatttttacaaatctatcgacttattaaatcaataaactcaatctaaatccaattcccattaacatctcttctaaatatgattatggatatcattatagaattacctgtcataaatgtggtagaagcattaccaaccttcgaaaagcgtacaggtggaagatatgattaaaccatcatgacaagcgtctggatttttagatctaggagttcttgaagacggatgtggtgatactccctacaaatttaacaagacttttgaaatttttacaaatctatcgacttattaaatcaatcaactcaatctaaatccaattcccattaagacctctaaatatgattgtagataccattgtagaattacctgtcataaatgtggtagaagcattaccgaacctttgaaaatgtaaaggtggaagatatgactaaaccatcatgacaagcgtctggatttttggaatctaggatttcttgaacatatagtgtggtgattttttggggagaagagatcattgttgatgtatgttgcctgagttacggccgcggcgaaaaaatagactgaaatgtgtgaaaagatggtataaatatctttacctaggtttctaggttttgattactgggcatgtgaaatgagttttaataaatggacttgggcttgtaaaattgtggaattaagctattgtaatcaggcatatgagttatctaattggataatgtgcccttttatgaaaataaataaaataaggtaaaatttggaaaaactgtcaattttcgagaaaattgtgactaaatcaccataaaaagcgtctgaagttttggaatccgagagatttagaaaatgaagtgtggttgtttttcctacagaggataatgttgttgttgtaaaccattagagtcatgatggcatcgaagaacagtaggatgtgtgaatcatagaactgtgtaagagaaagtaaaagttatttggttacatttctttggttgggttttgatatttggtaaaaattttgaaagtgagcatattatattgtaatcattaataggtaagaaatgagtactttaccattaatcaagaaaatttatgtatattatattatattaaatatagctgattgtattacttataaaatgtaaatacattttgtaataattctacatttataaaccaaagaagcttaaagtttttttaaatatttttttatatggatttttttttatccttaagagcttttaaaattatgaaa

SEQ ID NO: 28741 - DNA, 2156 bp, Arabidopsis thaliana landsberg
ttttttttcttaaagagtttttttatagatattgaagaaatggaattatatactgtttcaggtcatttgtagggagatatatgatggacaattgtttattaaactcaaaaaaggttttgagtttcctgctttagatccatgggtgtgtgttttacgattcttgaagcaatatgacctaactatttctatgtttttcttttttactttgatcattgttattgttcttattggttttgtgtttagggaacgagtgatccttatgtggtgatggatttggatggtcaggttgctaaaagcaaaaccaaatgggggtaagtttcttatgctttttactgcattttcctttgggggatcgtgtttcttagccgaatttatgagcttactctgttaattagatgcatacacaatctctagcctgatcatagtggaagtgttctggagcagtcttattttcgatatgatatataagttgatcattgcttctcaaacctttcatttaacttgaacaaagaatggtgtcattgtcatattggcaggacaaaagagccgaaatggaacgaagactttgtttttaatatcaagctgcctcctgcaaaaaagatagaggtgaaaatgtttcaactattgtggcctggtgaactctgaatatatagagccttgcttgacttcccaaaaattgttttaatgagcttcagattgcagcttgggatgcaaaccttgttaccccgcataaacgtatggggaattccgaaatcaacctggaatccgtttgtgatggtgagaattagttcacctattcattatcaatttattcagtttacaagtttgtgttaaaaatgaggaaggaagtctgtgttgttgttgttgagtaaaggattttaaactagcaagtcagaatttctacattcactaacaagcactaagattagtggaatctagagatatatttaaccacttggcggagttgtggtttatacactaacaaagatgaagactttcctgaaaatgcttccttggcaatgagatcttgcaaatattctctgactaaaaatatcaactgtggattagttatacgcaagtagtgatacatctgatgaatttactgaacttctaagttgtggcttttgtctctaagctgtattgttctgttttgcttccgaaggaaacttgcacaaggtgctagtagaactagacggaattggaggtggtgggaaagttcaactggaggtcagtttgtgctgtcaaagttttttcctgtattattgttctgttgacggatagaatcaacttaacttccaaaaatacaatatatatacctttacatccaaagaagcacaagatatcatgcagccttgatcctccatagattcacatgtttgatatgctaaagtaaaaaattagtctctttactagtttggtctttgtcttaaccgtatttaaaccttcagattaagtacaaagggtttggggaagttgaagaagaaaagaagtggtggaggttcccatttgtttcagaattccttcagagaaatgaaattaagtcagttctgaagaattttgttgactctgaagcagttgagtcagttttgaaaaatcttgttgactctgaagctgtgccagcacgtcaatttgtagagtatgcctttggacagttaaagtcactcaatgacgctcctcttaagaatactgaacttttaaacaatactgctgaggactctgaaggagcaagttcagaggattcgtcagatcaacatcgcagtactaatctgagtagttcaggaaagcttagcaaagacaaagatggtgatggcgatggtcacggcaatgaactggaggatgataatgaaagtggcagcattcagtcagaaagtaatttctgggataacatccctgacatagttggtcaaaatatcgtccagaaacttggccttacttcacctgagaaattgaagtggaatggaacggaactacttgaaaaatttggtctacaatcgcgaaaaactgcagaagccggttacattgaatcagggcttgccactgctgatactcgagaagcagatgatgaaaaggaagatggtcaggtcgctattaatgcatccaagtcttcccttgccgacatgaagaatgcgacacaagattacttaagcaggctgata

SEQ ID NO: 28742 - DNA, 1827 bp, Arabidopsis thaliana landsberg
caataaaaaagagagagtggtatcatcatcataaacaataagaaggctccaaaaaacagaaagttaaaaactaaaataaaagaaaatctaatttggatctaaatgaacttctgaaaaaagtaatgacctaatctccaattactacaaaaaagaaggatcaataaataattaaagaatcgagaggtaaaaaaagcattatccgtacgaatgaattaacgtggtcgtatctcgtgagtcatccaacgagtaaaaataaaacacgtgtcgtaacaaaggaggtgcacgagtactagcctacgcctcacacctctctatcatattctcttgaataaaaaagctgaaaaaataattaaaaaaaaattctggcaaaaatgaaccgttcctctgttgcctgcaaataacgcgaaaatctctctgagaaaaaataaaaataaaataaaagaaaccgaaccagtcgtgggaaggatccgaaagaagatgaaccagagaaatttgaagaagaaaccctaatcttagcctcgcttttattctatcttcttcttcttcttctttcttcgttcttaatctgagaggcgccaagattggtacgggcggagctaggctagggttaggattttaggctcgggaaattagggttagggttttgattttattggctgtttctttctcctgtggtttgggaggtgaaattgaaaggcggagttgtattggaggatttgggattttagggttagggttaagtgttttctcgttttttcatgggaggtgtgggagtttatggtggtggtttgtgtcggttatgaacgttgaccaatgccagtggcggaagaagatgatgggtaggggagtggacggaggttgtggtgctgaagagaagccttatcgaccatttcgtagggttgcgttagataaggagaatgggtatgaggatatgggttcgttggaaatcgatttcttagctcaagctagcaaaaatctatctgagaggtctccttttgatgttcctgaagatggttctacttctgtgttaagtgtgcctactctacctattgctttagctaatttgctgaagaaccattcggataataagaaacggcataagaagtctcattctggtgcggataagaagaagaagaagtcttctaggcaaggggataagttgagaagtgggagtatctggcttgaacatgaggactactttaggcgcttagattttcctgatttagaaactttgtctgatttagcatctctacgatctttatcttctagaaaattgcttttccattccatcggtgaaatacgattctattgattgtcaacagagggaaactgatgcgagtgcaaagaatgaggatgttgtttgtgaagatggcgttgttctggaacaaattaagaaccttctcactaaagatatatctgaaggcacagtaagaaaagaagaggatgttgttaagccaatgggtgttgacaatgtagggaatggaatctcctctgggtcagactattctggtagtttagaatgggttttaggtaatagaaataggattttgttgacatcagaaaggccctccaaaaagcggaagcttcttggtagtgatgcaggtttggggaaattaatggttgcggctccttgtgaagggaatgcgttgttatgtgatttttgctgcactggtcatcatcagttgattgtttgcacttcctgcaaagctacagttcacaaaaaatgctatggcctgcttgaagattcaggtaaatcatggttgtgctcttggtgtgagctggagaatggtcgtgctgattctgaaagaccatgcttgcatagtccaa

SEQ ID NO: 28743 - DNA, 822 bp, Arabidopsis thaliana landsberg
gagtaaagttcccgaatctattggctctttgtcgcttagctcttttccaatttcaccgacacggttgtaaatcgtctgacgtatgttacgatgctccgtgtgtttgaattgataacatgaaattaatattattccaaaccttgcatggtgaaaccgtccaagattattttcaacgattgatttgttattttatgagaagaacaagaaatagaattgactctcaattcattatctcttacaagcttatatataaaaaataagtttatattatccaagacatcagggttataattactatattacatatcttatttcaagaacttcacctaacttagctacaggttcgctaaggaaagttccaaatttacaattcatagtatacgacttgcacattttgcctaacgaaataactaagcataagaaaatctgtttttctaggtttctatataaagtagaatgacttgaaacaatataaaagaagaaagacgaagaaaacatttgtaaggcgtaatatatgtcttgatcatgggtcgaatcatggcatggtgaggaagcaaccaagcgaccgaaccatatccccacatgtcttctcttaactcttgagttaatttggttcatcatattcattttgtgtacgtgtgctttattatttgaccacagtaaacaaattatgaaaacgaacgttgctttcatccatatgttttgtttctaataacgtgcaaaagagattttagtctctataaaaaacaagaaaagaaaacacaaacaattgaatgcgatttaacgaatgacacggtgcgttttgattccactgacttggct

SEQ ID NO: 28744 - DNA, 2341 bp, Arabidopsis thaliana landsberg
  unsure (1)..(2341): unsure at all n locations
attcttggcttccttcaatgggtctaacttagctttgtcactttcatagctaggtttaatacagaattgggatgggtctactctgtcctaatggctggtccatggcctaacacttgaagaatttcgagaagatgcatgatgctattctactgctttttcagggatggcaatttgccctcgacatgtgcaagagcaaaaaagatcactgggctctgtatgcaaaatctgttcttgacagaagccgactagcactggcaagcaaagctgagaggtaccttgaaattctgcaaccatcggctgaatatcttggatcttgtcttggagtccatcagtcggctgtaagttacatttcctgtgactgaacccgtcctcttttttcatccataacttattaatgtccctggttttgatatttcattaaaactctttaccaggttagtatatttactgaagagatcattcgagctggatctgcagcagcattgtcgtcacttgttaaccgacttgacccagttcttaggaagactgctaacttgggaaggttagatagctaagcaattgtctgtgactgattgacatgttctgtagcaagttgtatctattgacgcatggtagttacacattagaaaatctaatgttgcttctctttctcttgatcagttggcaggttattagtcctgtagaggtcgtcggatatgtcattgttgtggacgaattgctcactgtacagaataaaacctacgatagacctacaattatagttgcaaatagagtgagaggagaggaggaaatccctgatggtgcagttgcggtactgacacctgacatgccggatgtactatctcatgtttctgttcgagcaagaaatggaaaggtaaaaactttcattctnnnnnnnnnnnnnnnnnnnnnntcatggcctgttcattcacttttttttctggcttttcacttgcagatctgctttgccacatgttttgattctggtatcttatctgacctccaaggtaaagatggaaatttgttgagcctacaaccaacctctgcagatgtagtctataagtaatcatcctttttacctatatttcgggaattcgagctgagatcttctctccttttgtgctagacagattataaagtagaattcacttaattcatgttgagaagattatttggacaaaattatgttcttacttaattttctctttcatgtagagaggtaaacgatagtgagctttcgagtccaagttcagacaacctggaagatgcccctccaagtatttctttggtcaagaaacagtttgcgggtagatatgctatatcatctgaggagttcacaagtgacttggttagtgtgtaatgttattggattcttactttcccgtatttatctgttttagtagttttctttcttctgtttgtaactttgcatcaaataacatagttcttaaattatatatgaatttcctcatgtttgaataactgacttcacgggtttgggtaatacaaccctatttgttttttctaggttggtgctaaatcaagaaatatcgggtatctgaaaggaaaagttccttcttgggttggtatcccaacttcagttgcgttgccatttggtgtttttgagaaggttatctccgaaaaggcgaatcaggtatcttagacactctcaactcattctggctcaaaaaaatttgaagctactttgctgaatttttgctacctctatgtttatctgttctttactggtggtattagtctggggatattagagtagagatagttcctatgcttcttaggattttatgtggaattgcttagaacatatctttcgtgaggtctcttcataagcacgggtgtgcatgactatcatgctgtcaaaaccgatataatctctttagacttaactttttgatgattaagttcacccaacctcacttcccactcactttctctccctctggatgtggcaggcggtgaacgataaattgctagtattgaagaaaactcttgatgagggagaccaaggtgctctgaaggaaatccggcagacactgttggggctagttgcacccccagaactggtatgttcatattgttttgtcgtgagaaccttgagacacaatcatctgttgttgttcctgcatatttcgaatctgggctgcggttgttcttttttacaacacatgatactaaaccacattaaatttcacattcggaccctaaagctctgttctttgacctgattccctaccaccaaaccattttgcttttagtttatgcatattcctgatgctgtcgattagcttaaagcctataattcatataaaagtttatatat

SEQ ID NO: 28745 - DNA, 1042 bp, Arabidopsis thaliana landsberg
  unsure (1)..(1042): unsure at all n locations
ccataaaaccaacacaaagattccatctttcaatatctctacaatgagaaagccaatgctttgattttttcccccaatctttcttccaagatacctcaaagcaaaaagagaccacaagaagcaaaagagtctacatacaaaaatgggtctttcaatctcattcctcagcatcatcatgatgatgtgtctactgtttccagatctcaatgtcgtagtaaaatctgctacaacggaatacacaaccttaatctacaaaggatgtgcaagacaacaattctcagatccatctggtttatactcacaagctctctctgctatgttcggctcattggtctctcagtctactaaaaccagattctacaagaccacaacaggaacaagcacaaccacaatcactggtctgttccagtgtagaggagatttaagtaaccatgactgttacaactgtgttagtcgtcttcctgttctctccgacaagctatgtggcaaaaccattgcttcaagagttcaactttccggctgttatcttctctatgaagtttctggcttttctcaaatttcaggtaaaccctttctttcttctcttccgtggcttcttcaatcgaaccggaaattcaattcctcgggttcctcgaaaccttaaccagatcacaatcaaagggttttctctggtttaattgaaccggtaatttgatttttggttttggtttagccgaaacccaaaaattcatatttttttctccagttttccggtttggtttgaattgaattggttcattcaacacctttggtcagaggtgaagtagggagctttcaatttaggtttaaaactattaaccgattttagaccggtttggttctcttacacctaaatttccggttaaattattacagggatggagaatgctgttcaagacttgtgnggaagaacaacatcgccggnaacagggttcgaagagagaagagaccnngcgtcggggggtgatgcaaaaccgcggtaatatcaggccatgggattctacgctacttacgtacgaaatct

SEQ ID NO: 28746 - DNA, 1174 bp, Arabidopsis thaliana landsberg
acgaactccaataccaacaatgtctggacacaattgcagatttaaagctcaagctgtttcatgctcaagaagaaactcaaaggctcagccgtgaaatagaggatggagttgctaagttaaaatttgcagaggaaaaatgtgttgtgcttgagagatcaaatcaaaatcttcactctgaactggatggtctactagagaaactggggaatcaaagtcatgagctcacggagaaacagaaagagttgggaagattgtggacttgtgtacaagaagaaaacttgcgttttatggaagctgagactgcctttcaaaccctacaacagttacactctcagtctcaggaggaactaagcactttggcattggaactgcaaaacaggtctcaaatcctgaaagatatggaagcccgtaacaatggtttacaggaggaagttcaggaagccaaagaccagagcaaaagcctcaatgagctcaatctctcctcggctgcatcaattaaaagtttgcagaaggaggtctcaaaattacgagagacaatacagaaacttgaggcagaagttgaactaagagtggaccaaagaaatgctttgcagcaagaaatatactgtcttaaagaggaattaagtcagatagggaagaaacaccagtccatggtagaacaggtggaattggttggtttacatccagaaagctttgggtcttctgtcaaggagttacaggaggagaactcaaagctaaaggaaatccgggaaagagaaagtattgaaaagacggccctgattgagaagttagaaatgatggaaaagcttgttcagaaaaaccttcttctggagaactccatatcagatttgaatgctgagctggaaacaatcagaggaaagctgaaaacattggaggaagcttctatgtcacttgctgaagagaaatcaggccttcattctgagaaggacatgttgatttcccgtctgcagagtgctacagaaaacagcaagaaactctctgaggaaaacatggtactggagaattctctttttaatgccaatgtagaacttgaagaactcaagtcgaaattgaaaagcctagaagaatcatgccacctcctgaatgatgacaagaccactttaactagtaaaagagaaagcctactctctcatattgatacaatgagaaaaag

SEQ ID NO: 28747 - DNA, 2186 bp, Arabidopsis thaliana landsberg
acagaagggagaggttgtgatatcagagcaaaacgagaaaaggcataatctttacaagttgtttaagggagatgaagagaaagaggtaaagaaacatagtaaggaaaaggaggacgtaattagggtttataaggagcttcctatagagatggtgtcgtttgtgaggcttctgcataaagaagggtatttgaacaaggctaatttcattactggagaaaagttggatatggggaatcttgatgaagagtatgctagaacttttgttaagtttgctgccgaaagatttggaaaggattaccaggagatagcaaagtgagaatctttttacttctgtattgatcatatattgtatttattctgttagattgttaaaagtttggatcagtgatcctccttaggcttcgtttagagaaaatgtatgtgaaaaatgttcatcttcagctgaaaaacttgtcagtgagtttgcattgtagtatatgtaacatttcgtgtggagtataggttggggttggaaaaggaggggttcactgctagttctttaggaatgaggaatcttttgtgatgaattgagctcttgtagtttgatcgcacgctacttgtagcattggttgagaaattctgatgtaagaagttgttaatacatttgtagatgctttaaatggagttatttggactgtcgagttttagaatctcttgtacggtcttgattgccataccctgcagcatttcattttatttgctcttagttaaattgttgtttggaaaattgatgcataaagattagggttcgtttagagaaatgttcttcatgggtctctgatgaaaaacttgggcatgttctggtgaaaacttctcagtacgcagttcatttctatacagtgcgcaactgctgagcgtttgcattgttgcatgtttaacatttcttggggagtatagtggagttgggaaaggaggggttcagtgctagttctaatggaatggggaatcttatgtgatccattgatgtctcgtgtttcggtcataggctaattgtcgaattggtagagagattctgatgtaagaagtgattaatacattctatgatgcctcaaatgtatggtcttatttggcttcatccctgaagcagtattttgttcgccccttagctattgttgcagctaggcagtttgaaattgattcaatcattctattgtctccacggctttttataacctcaaatttaacttacacaggtggttatcaggtagtgacctgaagaagattgtgctctttggttgcccgaggggggaaaaaagggcggtattcgctgctaaaacattgcgcaactttttcgatatccatgagaataatgtaagcctatcacacaccacactgtctctatctcattttgtaactcaccaacagcatctaaccaagtctttttttgttgcataataggtgtgcgagaaatgcgtgttaaaagagaagtgcaagtttccaaaccagagtgtatgggatggcaaaacaaagcacttgcacttgtctgttgtgatgaaagtcatcacactatatccattagacttgactcatccgaagctacaagttcctatagaggtacaagactcagtttcaagattgctgacggagattcagaacctaagccgaactatctgtactcctctcgcatgagttaacattatcaaatatttgtttgtagtaaacatcaatctagtgatcttgcaaatggaagttgaaccaaaaaagactcttatgaagaaaaatccttcacttctactttcacttgcaacagctaagggtacagatcccataagtagttagttatgttttcagcttttatctcgattttgtgcccctaaatcatctgttgaagaagatattttttcactgagaacaaaggaatatcattgtgaaccttatggctgagccagaaactttctggataagtatgaaaggaatgggtcttgttcagaagagacaaaggcttgcctgaaaaacaagcctatcatcaagagccacaggcattcctatcaaacgtggcggtaaggtgattgatttgtttgcgtctttcttcactttaaagttcactctcgctagattccatagcatctccatcttaggattttttgttaaactctccaagagaaaaaacataagttccaacctttttagtttccaacttctcttga

SEQ ID NO: 28748 - DNA, 2633 bp, Arabidopsis thaliana landsberg
  unsure (1)..(2633): unsure at all n locations
tccgaagacattatcacctgcaattgcaccggaaacatatgccatatcacgagcatgtaatatttctatttctctttgacatttcatgtttaatttgcggctatagtttacagaaaataataaataaacaagagtcaacgattctgcacattttgggtcgtatttctttgacttggtgttcggcccagtaaaatatgtgggtctcaattgtttgtgcccatttgtatacgttttcgatgtgtttttattattgttattggcatctacatgtgtatcgtttgtctgcagtatttgagacgtcacatacatgttaataaatttattgaacatatctccaagggtatcgtttgacatatctccaagggtctcttcccaaagagcttgtagggcttccatttctcaagagatgtatgtaaaaacgtattgtcgtatagttattcttgatgcactgccagattgtgcatcttaggtcttgaattgactattttcgttgagtcttttacagaaatctcgccaggaattacttgagtggttctattccttcagaatggggactcctgccacttgtaaacatgtaaggacatattaacgtgtacttatatatatgaaaatgtatatgatgtctctgaatatgtgtgtacgcatgtatatatatatttcttggatgttgntggcgaaatgcagcacgcttcttggataccggttaactggtcccatccccaaggagattggaaacatttccacgctcgtaagactgttagtacaaacttttcgatgttgtttggttgagttaaagttggtttagttgatgtgaagctattgttcttgtgtctacataaattcagacttcattatgaaaatatgagtgttcatttgtggtcaaatattgagtgtcctgcagtatttatgctcttcattgacaatgctatttctaagactttactatgacctgattcttttaattacatagtgaggacattaatctactcttgatttttgctaataactgattgcccagcctcttattcttgaaacaaaatactctctactttgggctatgcatctagatttggctgatactgatacatagcatgcaaaagtctttctccccttcagccaaactccttttgcatatgaaagttagaaatgtgtttaagtaactatctgaatacaagaaaaggtgtcacagttcatttaaaactttctgttattcattttggtttggtagttagttcattccttacattgtttcaagttttgatcatgataccctttgctagtaaataattcattctttgaacctatttgtagtgtcttggaaaataaccagctttctggaacactgcccccagagcttgggagactctcgaaccttaaacgactgcaagcaatgagttccgcatttgtgtgttttggattgctgcttgttttgttctgttcacactaaaaacccttgattgcttttttgtcagctttctgagctcaaacaaattccgtggaaacattccatcttcattctcaaaactgaccaacatgaggattttgttagtatccttgttgtttaaacaagttatataaatatttgcatactttgagattctaatgttttatttggctttgtaaacagccgtataagtgacaatcagtttagaggaacccttccaaatttcattgagaagtggacagaacttgagagtctgtaagatcctttactacagattactctttaatgtttttaactctgttaaagttttagctactaatgatgggtctgatgtatgtctgcctcagtgttctttatgcaagtgggttatctggacctatacctttgtcaatcgctcatctcacaaagctgaaagatttgtaagtagtctatgtagtagtgttttatcatatttttctagagtgtttattgacttaggctcaatatagttttcagaatgataagcgatatgactggacctgaatttttctttccaccactacagagcatgacacagatgaggcaattgtgagtctttaaatttgattgaattacaaaacaactctgttggtgatgagatttaatgttcattgatgtttgtctttttgcagggttttgagaaatataaatctgaaaggagagctcccatcataccttggaacaaataccaccaacttaacactcttgtaagttatatactaacttattttctgataagagtaaatgattacaaaccaaaggaaacccaaaggatgcaagagtgaaacaaaccagacctaaatcgcctctctgctgtaaaacgccaaaaactcttcttaactgtgtaagaatcccattttcagggatgtcagtttcaacaaactaacaggagcaatacctagctcgtatgaggagcttagagatgtggaaaatatgtaagactatcatcatattatctatctttggtttgttagagatgttgtgttgttgaagtaattgatcatgaagctactggaagtatttgttcttgcaggtatcacagtggatatatgcttagctgatctattcccagctggatgtaaaaaaagacccccacccccataatgtgagtttcctcctttgaattacaaacatctgccaaaagacatgtttattagacttttttgatttt

SEQ ID NO: 28749 - DNA, 2590 bp, Arabidopsis thaliana landsberg
gaaggcttggagtgtggacggagactctctaatcaaatatgtgagtttacatttaagtaaaagtttgtatgatggtaattaagtggttccttaatcgtatgaattgtcttcttttaggttaggagatgctggaacagaggagaagccatagatgtgatccatgaagtgatgagggaagaagaaagagaatattcgataagcgaaatcttgagatacattcacattgctttgctatgtgtggatgagaatgctgagagaaggccgaatattgataaagttctgcattggttgagctgtttctctactcctttacctgaaccaacatttggtaatagatttcttgcagaggaagaaacaaattggccctggtcgccatctttatctcctggtcacagctctgttacgtcacccatatcttcacgttaaggagattgagtgctctgttttattagactgacgagagtgtatgatgaaaagaattgttggttgataaattcaaatcgtaatttgctattgtcttcttctgtttgtgcccaaatccagtaagaccatataggacgattcaacaattatttattacttgggtttgaaatgacaaatctcaaatcttatttaataaaatcttttaaagaacactctaagcatcacataagcaggatagcaacattgttaccaagtattgttaatgttcatcgcgcttccagttccgtttgcgttgcttcgtttatggagaatacgtagtctagctgttgatccccgtttaacacgtttgagaaagttggttgtttcggaatcggaagagtgttatcgttgctcaacatataaacgatttgtgaaatcatgggtctatctttaggatgatcttgaacacaaagaagtgcgatatgaatgcaccgcaccgcttcttctaaagaatacgaaccacacagtgcttcatctataatgcttacaccttttgtttcacaccaagattcccatgcctgaagatgatcaagaacatatagtttgggattgatctaaggtaagttacgtttttatgtatggtagataaatgatattgaactacagaaacacttacataagcaataaggctgtgtttttggtcgttatgaacaaaccgtgtcgcctttttacccgatatgatctccaataacaacactccgaagctatatatatccgacttctctgaaatcactccacctaatgcatattccggtgacatatagccgctgaaatcaaccgcttacgaaatttaatccaaagattctaatgtaaatacataggtagtgattgttttttcctttgcattgacatgtaaaaaggatgggcttacgtcagcacaatgttttacttttttcaaacatcattcataaataagttgcaaagacactaggaatgaaaaaaaaagtatgtgtgttataatactgagaaacataaacttaaactcaacattttagtgtttgaaacaagtggatacataactaactataagagatgtacacttacaatgtcccgacgattctttgggtgctatcatcgatttgcttgcaaccaaaaatccttgcggttccaaaatctgagatcttaggattcatctcatcgtcaagtagaatattgcttgccttaagatctcggtgaatgatcctgagacgtgagtactcatgcagatattgaagtcctcttgtcgtcccatttacaattttcatacgcgtctcccaatccaatttcctagacttaaaggaatctgtatgttcccctaaacgaaacgatgagaagtcacatgtcaacaacactcatccgatacttatggtttcaaattcaaaatcaccactcaccaaagagtaacacatcaaggctcttattcgacatgtactcataaattaggagcttctcatcgccttcaacacaatatcctaaaagcctcaccaagttcttgtgttgaagctttatgatcaaaacaacttcattcttgaactctgtaagaccttgacttgatttttttgaaagccttttgattgccacttccatcccatttggtagctttccctgcccatcaaagtttctatagtaagattgtaacgatgatgatattcaaactgtagctactttgtttaaacctttagccaaacaaactaacaagctcagtattaattgtattgtttgttaataataccttgtagactggaccaaaaccaccttctcctaacttttttttcctagagaaagaatttgttgcaaccattatgtcatgtagatttaggtaacacatattttctccagcatcatcaattaggccaccttctaatagctctctgctatgtttttcgtctgcgtataattcgtgtttcagaaactagtgagaaatcttgtatagtgattatgcaaaatgctaaaaccaatctcacctctttgtttcttttttcttcttattcttgaagaaatgcaacaatacaaaccaacgaaacatgcagcagttgctacaagtgatgctagtacaacgggtaacacaatgcttttgcctttagaatgttctgtttttcctgagtagcaaaatgaatttagagataactcaacgcattcgtttatttgt

SEQ ID NO: 28750 - DNA, 1054 bp, Arabidopsis thaliana landsberg
  unsure (1)..(1054): unsure at all n locations
atctatcgatttgttttaatgataaccaataatgtctttgaaatgtctattgtgatttgtcaatgtgatggaccaaggttgcatctaattctatagccatttaatttattttgacattaaacgtgacatttatgccggaaggtgatcatcaataggtacataagatcagaaaggtgtgatcaatagaagaagataaacagaaacatttttaaaatatagtgtatgatattgaactgcacttgattttaaacaaatacgtaatgatcatttttaaagacaaataaaccgatcttttttttcttccgacaaataaaccgatctaattacatatttatttgatgataaaataccaacgatatttttactagaaaaccaatcgagtactctttttttttccgtagttatttaatataatcaatgctataattaacagtacagtactcatcattacatgtttgttaagagtaatgagttctgaaacctcgaaatctatcttcttcttctttaatcacgttcggttgttcaaattcagacaatcattgccccttttcgataaattaggtaaatttcgtacatcgttttggtaaaataacactgcaaaaaagggacataatctcataacctatatatttgcagttgcagattttagcatctttagtaaaaaaagcaaaattaccattgaactcattgacattaacaacgcctcaaccaaaccggataataatgaattcaaatctaacgtgattgttctctggttttctcaaccttctacaagaacaggccttaatcccaaacaacaagtccgaaaatggttaaagaacttgttgtgaccaaatacagataaagtttannnnnnnnnnnnnnnnnnnnnaaagttaaaatccgacattctcaattttctagtggtgaacattgaccaagtaagatcactaatctctgaaacagaaacatgaaacgttaaatggcagcccacaattatgagtcaacaggagatccaactttggtctcctcagctgcaaagaagggaatgggtattgtcggagctggaagacgt

SEQ ID NO: 28751 - DNA, 1252 bp, Arabidopsis thaliana landsberg
  unsure (1)..(1252): unsure at all n locations
ctcatcatccaattctcttcagattttcatcgtcgttctcctcatcattcccattctctctgtattttcatcgtcattctcatcctcctcatcgtttccattctcatcctcctcatcgtttccattctcatcctcctcatcgtttccattctcttcttccgtgttgtcattctcagtctcctcgtcattcctcttagtttcctcatctattttgcttttccttgcacccttttgcgtagatggttctttctgtttcctcttcttcgtctctttgggcttcgaagcagttccacttgaagatttcaaagcagctacaccagcaggattcgaagcagctgcagcacccgcctttttccccgcattcttcttcttaaaatctgaaaaccagtcatgtggattacactaggattgacatcataagctcaaagtgcacacacctaggccagtgtccataacaagacaaatcacaacctaagccatttctactaacactccatgaaagtaacaacagatagtgacaataggatcttcattcagaacaaaacactnnnnnnnnnnnnnnnnnnnnnnnnnnnnnnnnnnttctgaaaaatccatttcttctaatgccttaaacacatcatcagccttcatagtttgtcttcttgcatctttacaaaaatcatttgccctatatcattcacccccaaattaaactaaatccatcaattcgatcgatcacaattcacaaacactaacattcatcaattgaatcacattaacataaacccaaacttggaacattccaaatcattcactatcatagtgcagaaattcgaaaaaaagttagggtttgtgaagtgtacatacgtggcggagaggtagtggatgaagatcctcgcactctctgagaatgcgagcaaagcttccttgtgaatactgacgtcataatccggcgaacactccgacagcttcttcttcaccacccggcgcacaatagctagcggcagctcgtccaccaccactttctccgactccattcttctctcctctctctcagtcgccgtctttcccgcctttatgttaataatacaacaaaacacatcggcccagtaagctgatcagcccattaaaatatttaaaagcccatattcaagtttataagcactaaagagttatgaccacgccgctcaatattacccgttggattgattgacaaaatcctagccgtcaaatcgtactagcaaatcggcccattattcaaattgataag

SEQ ID NO: 28752 - DNA, 1918 bp, Arabidopsis thaliana landsberg
  unsure (1)..(1918): unsure at all n locations
gaactgatgaccaatgaagcaaagacaatgccacctatacaataaaccgtgtagatatcaaaacaaactccaactaaatgttacttaaccggctaaactcttatcaaagttcaagagtgaagcaaagacaatgccaccaatactgtaaaccgcgtaaccaacaaagcaaactctgattaaatgctgcttacgcggcgctacactcttatcaaagtttgaagatttttcaagagacacaacagattcaagattttctggtggctaaacttacaatgacagtacatggaggatctccgcgaatggacttctgcaatgtactagcgtagaacaaacactttttgttaaagtcatcaaccaacatagcatagagttgtttatctgaacagaacactgaaagtcttggttttgtttgtgttccagtaaactgtttcaaaatgaaagaaaatacttattaacaagttcggcaaaaaaaattcaaacttttgtgcattattatatgaaagcacttctagaaagctaccttcttcctgctcctcctgttcctagttttcagactctccactcgagtgttccctctcgcttcaatcacaaacggctttactacagacatagctgataaaagggtcgaaaaatcatgaaccaagtaagcgaaacagaggataataaacatggaagaagaacagagtaagacgaattataccactcacttgttattcgaattggaaactggggataaggtttcaaacgagttccgagaatgtcagagactctaaactgaacagtagaaagagaagtcaaagcagccatgccaagtatcattcgtaaagcatcgaaagtcagaacattaccctcagcggaatttaatcaaacaccttctgtgcaggaataatctctgggggttttatcaacactccaaaaaaactggaactttgtaaataaaattataaatgttcgtacctttatgcaaaatttctcacagcgtaattatctatttcctttttgtcctttatgaaagaggataaggtttttaaataataaatactaaattgtttttaaaagaaactaaaaataaatggaaagtcttaagcgtcgtcaatggttctagagtcttctgcaactttcttttcatgaaactactgtaatattctgctaacatatataatctcaaacactatcttctccaatttcaattgtcttatctttcgacttttcttcttcttcttcttcttaagagatttttctccnnnnnnnnnnnnnnnnnnnnnnnnntctgaacaaaaaagtctcggtttttttctctttgttttgggtactagcgtgatgtcttctgagaatgatttcgttgagttttcttctatgttcgagagaattatacaaggaagaggtgatggtctctctcgatttttgccggtgattgtagctttagccgccagagaagacgatgatgaccaaggatctaccgatcaaacaacgagacggggagatccgttgagtccaaggttcgtgatgatcggatcgcgatcgggactcgacgatttctttagcgacggtggaaaacaagggaggtcgccggcgttgaagtcagaagtggagaatatgccacgtgtcgtgatcggagaagataaggagaaatatggtggttcttgcgcgatttgtttggatgagtggtctaaaggtgacgtggcggcggagatgccttgtaaacataagtttcactcaaagtgtgtggaggagtggttagggaggcacgccacgtgtcctatgtgtaggtatgagatgcctgttgaagaagttgaagaagagaagaagattgggatttggattggtttctccattaacgccggcgacagaagaaactatgaagactgaggaagaagaagttaaaagtgactcgaaccctcaagatgcaacatggggc

SEQ ID NO: 28753 - DNA, 1377 bp, Arabidopsis thaliana landsberg
  unsure (1)..(1377): unsure at all n locations
tcttttaaaatacttttgcattcctctataattgtgtattaaaattaaaaatcgaaaattttgctttacgcgtgtgtccaacgaacttggagcaggaaatgtaaaaggcgcaaagaaggcgactttggtgtccgtaaagttgtctttagttctagctctcggtgtagtcattgctatacttgtgggtcatgatgcttgggttggtttattcagcaatagccatgtgattaaagagggatttgcatcactaaggtttttccttgctgcatctataacacttgattcaatccaaggtgttttatcaggtataaagatccaagaaaatcttcannnnnnnnnnnnnnnnnnnnnnnnnnnnnnnnnnntctttaaatgtattttacaggagttgcaagaggatgcggatggcagcggttagccacggttataaatttgggaacattctacttaataggaatgccgatttcagtcctttgtggtttcaagttgaagcttcatgccaaggtgaatgttagactctcttatgaaattggtaaagatttttgttgttgctaaactgtgtttgattcattattttgatattgtttttgatgaaaacagggtttatggatcggtctgatatgtgggatgttttgccagtccgcatctcttttgcttatgacaatttnnnnnnnnnnnnnnnnnntgactgctgccactgtctgaaacctatagttcaattttccgattattataggaagaagattgttgttgtggacgagatcaatgtaaagattgtgtccaagaaaagacattattaagtgaacttttaggaattattgaaatcaacatatttttgtaacaaagatgataaagagcacttgaacgaacacaaacgaacacaatgcatatctgcacaaattgttcaaagccaacaagagaagacgacatttgaataaaatcatatgtaaacatttgaataaccaaagctaacaacgaattaacctatcatgagaaacccttctaatttttgaaccaatatgtatagcactgacttgacccagttaaaagaccaaactcataactggacttatttgttgtttttgaaaaagttaagatcccacctgcgtattaacccgtctaagactttccccggtgcactactactacgttccactgtcacggtggcctttgtacctgacacgtcaccagtctcgctttccttctggcttaaagagccgggaacagaagaggttacggttctcgccagagaactcgaggtctcactaggaggattggactcagaagatgacggtagttgatcctggctacgtgttactggactggaagcagaatcagtctctgattgatttgctcgagttgaagttgattctggcc

SEQ ID NO: 28754 - DNA, 1137 bp, Arabidopsis thaliana landsberg
ttgacaacccctgcctcttcaaaacacacatcaacccacactcttgataatcacacttactctttcgaaacagaatttccgaacatttatactcattttcgaccactcctgtttattacaccaaaatattattttttattaaaaattaaaaagaaaaaagttttctttgatttcatatatattgatgtttggaaataatatatatgaactgatattaaaaaaattaacatggcattcacaaacatttattttagatcgtttgtttataatatatttagtcgattttagatatagatacataccaagcacgaaaatgctgaagatagctaaaacggtgaacgagagttgaataagtttagttatcgtagtttcgtagatggtaaaaatttattgacggtgtttttcaaatgataaaagaaagaacatattgtgtctatgtaaagaagttatgttatggcttctggtgtagtggtgattagttcttatcttgctctgcgctgctgacttcgggaaatgaacttggttagagggagcttgcatcttttgctactttggcgtgtgaggttctgctttcgggagagctcatggattggattgaagtatcgctttcacatgtcgcagggaaagtatgtgtttgatgcttttgtgtttcgaaccgttgacggctcaatgtcaggcctccaacgaaaggcttctaaagctcttagtccatcgctttttggtgtatcacaatctgtttcagcccttctgcttgtgcatctctttcgggaaggatagaattgaacgacatcgcttcatctattcccttagattcattgcaaggttgagaagatcgatcgccaatttggatttaatcaaccggtaaagatgcgtcaacggccgcaccctccagtgccatagatccatatagacaggactcaagtcacaagtccggaacccagactgcttctcactagcgatgaaagattctaccatctagcatcagcagctcccatgatgtgacggccagtgcgtacttggcccgggctcgttttcaccgccgaacgcctgaaagggggatacgaacgaagctgggtcaacgctaaccgctggcaacctgcagtgagtagtgctgcgcagactccggagttagcgcaa

SEQ ID NO: 28755 - DNA, 1731 bp, Arabidopsis thaliana landsberg
gtttattttggatttgtaatatgatatttatgagttttttttgcttttttgtatgttgtgatgttcttgtgtctctatttgataattaaacaatagtgttataaacttataaattttttgttggaaaatccactctttgacttggaaaaaagattgaagagttagaaagggctagaatagggctcaaccttgttttttaaaaaattaagtcttaaaaagggttatggctcatttagtgttggactttaaataaacaggaccggactagatgagaaaccgtatttaatatccctactcacactaatactagagtcatcaacattggcaattagcttgcatggtgttagcaaccccatatgaaaaaaaaacaattgtttaggaaaaatgtacacaacatacacatacattagtttagtttgtacttatcaaaatatgaaaaaaatatctacattatctcaggtaataccagttgtataacatatctacatataccttttggtaggatttttggccaaaaatctctcacctgtttactaatttcaatattaatcgttacaaatttaatctcaaacaaataatttataactaaaaacttacaaatcgttattttgcataaaacacttgaatataccatttcctttaattagtttttagtccctacaaatctatctaaagaatatattattctagatttatatccttaattaaatcttatattcattaaactacattcaattaaatgctaatttcctaaaatctctctatctatattaataataaatatatgatttttattacacttttatatgttattatatctaatttatttttattttatatataaaatacatatagttaaaaaaatattagttttttctgcatatgatgtgattcaaaatttaaaaacagacatatattactcaatcgatgaagaaaaaaaaaagtatacaaggtcccacattgcttaaaaaattgggcaatggttcagagtcaaaatataaataagacaaaaatgattttgaataagaatgaataggaaacttgatttatcaggcatccaaaattgaaagtgttatccggtttactccggttctttattttaaagaattgaactttttaaaaattttcaaaattttatacatatttaaattctataaaaaagttaaatattataaattttaaaaattataaaatattaaactttaaaaaactttttaaatatttataatttttaaaattaaataaagttttaaatattataattatttgaactttataagaagtttaaatattataaatatttaaaaatctattaatacaggacgatatattataggtaaaatcctagatgtaataatcaatatacgattatgaaatttgaatcgatattaattcttttttgaagttttcaacattataaagattcgaagtttataaaaaaatgacaaaatgatgtttaatttcacgggacggagttatatggtgggatggatttggatcgatattaaaacgggatgatatactatggatgaaatcctgaaagagttctcagggagagtaggaacagagagatcttgtttaattataagactacggatgaaggcaagaaggtcgagcaagtcaagcagtttcttgcgcaagtggcatcgattgaaaagccccatgataggaacgcgttcacacacgaaatgaatattaggataaaagtgaagattgtggatacgcgcctct

SEQ ID NO: 28756 - DNA, 1446 bp, Arabidopsis thaliana landsberg
catttctatggtgtaaaacaggttggatcatgagtggtcacaaggaaaagcatgtagactgtgcaaaaaagcagtcaaatcacaatgaatcagtggccgtctcgagaagtttgtaaggaactctcattattgtatatagttgatcgaaatttaacatgatgatatcattctagcagattcagatattgtttagccaaaaaggacattcctttacttcaggtttgaaactaaatggatatctttagtttattttgttcttcacaggttggatagtatggattctaggtactcgcagacttctgatactggtctaaacagatgcactctcaatttacaaggagccaacacgtggtggtggtgctcagggaaacaatgtatcttctggttcctttaagaaagggtttagaaaaggttctaaaggtctttggtctataggaagatcaattggtttaggggtttcacgagcagtttttcctgaagatcttaaagtatcagagaagaagatttttgatccacaggacaagtttcttttgctctgtaacaaactgtttgttacttcttgcattctcgctgtgtctgtggatccgctcttcttgtatcttccgtttgttaaggataatgagaaatgtatcggtatagaccggaagttggctattatagcaacaacgctgcggacagtaattgatgcgttttatctttttcacatggctcttcggtttagaacagcttttgtcgccccttcttctcgggtttttggtcgaggcgaacttgtgattgaccctgcacagatagcaaaacgttatttgcagcagtatttcatcattgactttctctctgtgcttccacttccacaggtaataacagaaatgcctctcccagtgttctcttatcttccattgtttctttgttctctaaatttttatgactagtttatgttattctttggatttttcagattgtagtttggagatttctttacatctctaaaggtgcaagtgtgctagcaacaaagcgggcattgcgatctatcattttagttcaatatattccaagattcattcggttgtatcctttgagctcagagttaaagagaacagctggtgtttttgctgaaactgcttgggctggtgcagcttattacttgctactctacatgctcgcaagccatgtcagtacatactatctttggtagctttcctcttatattctcaaaagatccattcatcactctctcttttttcccttatgtttttatcagattgttggggctatatggtacttattggccttggaacgttataatggatgctggaccaaggtttgcagtaatagcagcttggactgtcacagaaacttcctgttttgtggtaatgaaaaaatggatggttatgcagcttggactaccatcaaagaaattctggttctggcaattaaaattgcccccag

SEQ ID NO: 28757 - DNA, 1476 bp, Arabidopsis thaliana landsberg
ttgcctttttgctgcttgccacttttttgctattaaaataacaagaagcattatctcctcaggttgtatctgctactgattgaagattctttggttccgtgcatgccaaattgaccaaatgatccatggtgatattggtcctgcttcgataccagttggagggagacataccagggatttggtagaatcgaatcatgatctaaaggaggatatatgactaaggttcagagatgttttgcaaggggtttgttcccatacctttgctgcctcagagcaagtgaagaagagatgcaccattgtctcatcttcactacaacaatgacattgagtcgtagggttaacgtttctgtgtttcaatttttcacccacaggaaaggcattttggagggttttccacatcaccatttttgtcttagggaagcatttgattgtctatatatcttctttctaattaatccccattggggcttgatcgatctcttgggagttagggtgaagctttaaagcttcaaaataaccttattttggtgtatactatcttgttgctgttggtagccatacccatttatcctaggctccaaacctgctcgactttatcaggacgatctccttctcatattcaggtaccaaagctcttataacgtctatattccaagttgatgtttcttgattgatgagctttgagactgtccattcttttgcatactcaggcgctggccccattggcgacctggggcattcaagggatagccacggttcattccacagctgggtagtcttaccattcccaattacttttcccaattgagcttttaataagtctctgcctattacaatacatctccagccatgagaagcatatttgggcgtcttactgtccaagaattgacatgagtgactatacttcccaagcaatactctggcaaggaggcaatcaggattaaagagtatacgccagcttacctttgcaagtaatgcatcgttacacttttgtatatcacggaaacccaacccgccatcttttaaggatttggtaagcttcttccatgatagccaacacatttttttttctctcagtattgccatcctaccaaaatcgtgtgagtgctaactggatacgtttgtagaggttgtttggcagcttgaaacatgtcatttatatgtaggcatagcagcaagaactgacttgaggaggagacgtttcccagcttgggagaggaagaggaaataccgacttaatgctctttgcttaattctttccacaatcattctaaaaagatctctcttcttacagccaaacaactctggtagacctagatatttcccatgccctccttctttttctatcttaagctcctttttcactttatctcttgtctccatttgagttttggaggagaaagaaatcgctgacttttgattattgattttttgccctgatgcagattcagatggatgtagaataaaaaggagagc

SEQ ID NO: 28758 - DNA, 1236 bp, Arabidopsis thaliana landsberg
atgggtttggctgctctaggaatctcagcctacatgctgacttctacttctggcaaggatatatgataaatttgtgtacaaggcacttgaaaagggtgaagatgacctcaagatactttatgtaacacccgagaaggtatcaaagagcaaaagattcatgtcgaagcttgaaaagtgtcacaatgctggccgcctctctcttatatcaattgatgtaagtctctcctagttttagtttcttactcggaaattgtgctctgccacctatcttctcactctctggctttagtttatttggatatatccgcaccgttaaacagaaaacctactttatgaatgatcaatttcctatgtttggtttctttgcaggaggctcattgttgtagtcagtggggtcatgattttcgccctgattacaagaacttaagcattctgaaaacccagtttcccaaagttcccatggtggctttaactgtatgtttttgttttcatttatgggataccctgtgagcttaaattagacagcactagggagcttgcttcaccttactgtgcttatcataaggaccaattttcttctgatttgagctcgttgatcttacgtactcgctagtattgtttagttattctgcttcagtgggtgcagaatgtcaaattctataacaatcttttaaatattttgtggaaggttgaatatttcattttttcctaattctttatgtctctattgcaggcaactgctacacagaaagttcaaaatgatctgatagagatgctgcatattcctaaatgcgtcaaatttgtgagcagtgttaacaggccaaatctcttttactcggtacgctttagtaatgatttttattagtatacttttctcatgctgtagacagtttgtaggcttgaacatgaaccggtaaattgtcttgcaggtccgagaaaagtcggcagttggtaaattagtggttgatgaaattgcagaattcatacgggaatcatactctaacaatgaatctgggatagtctattgtttctcccggaaggagtgtgaacaggtttgtaactaaactgaccatcatattctcattgtgcacatttcatttctgaccataatattttctattgaaccttggattgggggaaaaaagcttacatattctgccttacatgcaatggtgatagattgcaggtgatttacgagagcgagggatttctgctgattattaccacgcagacatc

SEQ ID NO: 28759 - DNA, 2186 bp, Arabidopsis thaliana landsberg
ctgtgatattatgtacaagagaggagggtttatacttacttgattgtgtggatatgagacatgcaaggaaaaagtttatcagcaaaaacggcagtttcagtggtgctatgactgaattggtgaaacccaggagcccaaacaaaagcagccgaggaatttcggtgtggtatgggaacctaagtgtttcatatgactcctccttgttcttaacaataacttttgctatcaggttccagataagacctataggttgcatgatttcacatgccaaaccggcccaaccagacgtgaaacaataggtcatgaagaagccagcctgcatgtagtcaatgaatattttcataccgttaaccttatagaatataacaaaattgaatatagtcacaagtgtaaaaggaacactgaaaattacctgtgctggaacaagtttcgcaagttgtgcaggtacgtccctcacactattcaagacggtaaactgcctgataacagagcctgacagaatattgacgaagaacacattccagatggtgaagtataaaattttgagacatgcacttttctttcttagactccgagaaacacatccctctaaggttgaaaagtacatcatcaatggtggaacggcataaaagaatagaaccaaaatcacacttggtaagtaccctgtgatgatctgcaccataaacctcctgcaatgtttttcaaagggataattaaattgaaaggaaataaaaataaatcaattacacagattttaattgctctcagtattttactgcgcttttaaatctagcataaatatatcaactgcctagcagctccgactatacgcatcttgaaattctctaaaagcaacgtacctagaagaatacgaacaagaaccttctattactgagtacaacagtaaggaaatgctggatactcacctgttcaagaggtcttttagaaaaggaaaattcctggataacgttggtagttgagtcagcccttgaacaaaggcaacaggaaaaagaaacacaaacatgaaggcaattgcaccaacaagggttgctattcttcgcatccaaagctgccgataaggtattctgagatttctccagtgaacatcatgaggctctggagccaaatctgccacccataacataggatttggtgtttgaagaacttctgaaacaacaagagcatcataacgactcttgaaaaacacaaaagcaacgggacgttcctgcaaatgagcagaaaagtgtaagctgtgcatacatatttcaggcgctgatacttcattaagcaatgtttacaaatgcagtgatgaatggagatatattccttttagatctagcttttaaaggttttaaacaaaaagctctttgtatcacttattcaaggtccataaacgtttcattgtactattttttgggttcccctaagtctcagtgttacctcaaaagctcaatttgtgtctcagtaaagaaaaaaagagtcaattctccaggttcagctgtaaaactgtgaagacatgcaacaggtaaaaccccacactatgcctatatcatgtacagcacaaagttcacctatcaaagtgaaaagaattccttacttcctctgtcgtagtcaaagtcaactcaccaagctccagtcctttgacactgtctgtctcgttcgagaggatttgaaaagaatttgtggctgcaggtccacaaatggcgcatgatttcaaactcggattacaacttaaatcaggagaaatatgttttatagcctgacacatcctctccgtctcattctgaaatagaaaattgacacaattaataatagaatctaattaactcaattgtgctccaaaatagaccactgcacttcaactatatattatcatgagcacacaccatccacatgttgtttaccaaagatattgccattcaaaatgctgatcagataaccaaagcaaaaaactgatgtaatatcaaaagaacctcaatatcagagaaacatgaactacaaataaaagcgttacaaatgagccaaaaacaaaattagtactccaagaatgcggatcaatcatataatcccctagaacttcctatatctttaactgatacaggactatcaaccaaatctttacaagatagttactgttctgttatttcatcaatctttgatgcccttgacaaatgaagaagcattga

SEQ ID NO: 28760 - DNA, 1992 bp, Arabidopsis thaliana landsberg
cagatccaggttcgtgttcacactcaaaatgtgagaaactgagtttcaagtttttttagtaccttgttgaaccaaggatcatggaggatatcgagaccttgtttatgaacgatggtgggacggtgaccttccgatgtggtgaaagatctgaccgcggatgagtaaagtattctccggtggagaattcggctgagagatgatgaacttagccggagcttattggctattcccatcgtttaacggaatctatggagaagattgttccgatctggctggagatgagagaaagcaagcttactgtttttgactctccgtagtctctcttttttttatttgaagattctcatttttttcttcgcctgactttagtcaaaaagattatatcgggacagagtgtcaaatgtcaatgggtaaaggtcgactacgtagaaccggttaagtaaaccgtgttattgaaataaggaatttcgaaacggttattggaaatgttttacatgttttgaaaactgtaccaagctttttgaaattttgatatgtgactcgctttttttttttatcttattagaattgcaacgagaacatacaagtcgaaaatcatacataagccggcggataaacaaaaatccctagagacaaagaccaaaaggaggaaaactaatccctaaaaaccagacttctaaattaccaagaaaagtaaaaacaacaagataaactcgcaaaaggaagagattgagagttgagaccaaagcactaagctcaccaactgctccatagaggttctcactaagctttccaaaagaacacgtgaagcagcaataagactggtaatgccacaaaattaagacatctttctgaagtcaaaccgccaggaacgaaagcaagaaccaaatgatactagagagacaacaatcacaccataccaaggcacacgagaagatgaaaataaactaggaacaagggaagcccttgagaatcgccaaatgacaagccaaataagacaaacacctcttgcacgcgggcattcgccaacccagttttagccaaatacctgcaccggaagacaacctaaaccgcctccaaacagccaccagtaacagaaccaccacccaaaaataaccaccacccagacgagccgtcgcctagtccacaacaagaacgtcacataccagatcaaaacccatcaccagaggcatccaccaactcaaaacgacttcatcttcaacttcaaacacatagaacacgacgggggaagacaaaaggaaacaattccatatcgagacaaacactgacatagcttcaactgacaaaaccagatcaagatctggaaatcaatcaaaaccccagccatatagagccaaaattgaaacagagcctcaaaaccggagctgccaacaacacagagaccaacctccgaaacagatatagaagagaaattggtccccgcactccccaacaccatcaaccctacaaccatatcaccataaaaacgagaaggaagaaatctacagacgaaattaaacaaagacgcacaaggccagaatcagtgctaaggtagccaccgcattctagcctcaaaactgcaaaacctctttagacggcggctggttttgcgagagagaaaactaggtttttttttgtttttttgagttacttactcgcttacatgagtaactttttttttcttcgaaaaaacttatctccgctttacgtcgaacttgaatctttgctaggggcaatggaatgcatgatcagcattggcgatacagatacctttgctaccgattgcgcagatttgatctctctcgttgatcccaagacgattgaccaacttttgcaacggaattggcctctttttggtatttagtttgtttaactcttctttcagcattagctcgtagttttaaactcagattgtttagctaagactctcgaaatcgtattgcgtttctctcatgtaacaaattggtcatgaatgcttttgtagaaagagaa

SEQ ID NO: 28761 - DNA, 2395 bp, Arabidopsis thaliana landsberg
  unsure (1)..(2395): unsure at all n locations
cattccaacattcccaagaaatgtctcatctgatccagctcttgaaaaaaacctccacactcagaaatctcttgcatcttcacttgacaggtccataaacaacataactcctcttcctccttgacaatctccctctgtttcagagggatgcaagcgcatgcatctccacatcgatttgttactctgtgcacaagaccctgaaaccggagacacatgtataatattgggcaacactaacaacaaacaaaaaaaaggtctcggtataaggttgcttagattaattgaatttttattttattaattctaccatctagttaaaaggaaattcaagacataacaaatactagaaaagaaaatgtcgcatgcataaatttactgcttgtcaattctcatgcgataactctcctaaacatagtaatttaacatttcaataaccaactcttttcttccactatatattttatgagatacattgatagatacttggtctaatttaagttttattcaattagagacttatgacaacggaatgcacggtgcaaagaaaacatatcaaacgaaataaatgttattgtgccgcatgtaacataaactgtgaagaacgttcaacatctcttttcaaaaagaatgaaataaaaattacattgctaccaaaataaaaagtttgaaacatccaaattaccccaaccttgtcaattcagatctataagatcataaactcacatctgcgatattcttttcaccctaatttgtatcattatcatgtattgtatcggatctgaaagaagcatcgtcagtctgtcattgaaacaactcataaatataatgtttaagtcaatgtcaagtatagatatgaggtgatttcaacaatatcttagattgtgattgacaaacaaggtaacctattaaacaaacaattttcacagtttttaatactaaattaaattgtatattgtcatttggattttttattttactacatttgttatccaagtgaaaggaaactcaaagacataaatctctttacagatgtggtgaaccataacaaattggatcggtcacttgtatcccatgctttgattatttgtatttgtaccaaatgcccataaatgggctaaagtccacaaatcataaacttgagcatcttcttttttacaacacattcaatttcgttttgtatttaaggatacaagaaggctatttcgatcctcaaaataaacataataacgaggttgaaaattctccgacacataagttgtcattgttattgacttattgccaaaattttcattaaaaaggtcccgcgggaaaaaacctataacagaaataaaccggttgatcccaaaacgacacacacacatgatcatcggagacaaaaacacacccaaaattattttcttgttccgatgatcacgaccgttcaattatttcttacgaccgtaaaaatttaacgtaaacggagcagtgaaaaaaatcggtgatcgtgagattccctcaaaagttaaaacagagaagaaaaaagagatttaacctcacgcgcgagcgtgaaacacaccgcctgtaaaaaggctgtctaaaaagttggcatcaacaccacacgcgctctccctatctctctgacactgatttaacagtacctgtagatttttttatcataaaatctaaaaattattttatttcttaaacaatttacacttttttcctaaaaacaaatatattctccatcattgaaaaaggcaactaaatcttctttctaaattaaatcttttgcaatcttaataaatgttaaattcttttttttcatatagaatataactgataaaatatgtggctttccatataggacaaaatgagaaaagaatattcactgtattgctgaggtgttaaataaaatcgacagcaaatgatttgttaatcacagacactttatatatttgacctcaaaataaaaatccaacctacacaattgaatattgtaatatagatccattattactcgtcaaacctacattgttcgtataagaaaaacaatccagaaattaccaaacagagtctgtataaataaagcaagagcatcaaaaatttccgtaataaataaaattatggggaattacagtttcctagaaagttgaatagaaataaataaaaagaagaacatttccccaagtggtctttaccagtaaggagagagcaccaactggagcgataaagataggagtgagtaaatgagagagtgagtgagattcaaaaccaaaaaaaaaaaaaaaaatcaaaacagaagcgagcgaagaggacggagggagaggatcttcttccctctttctcttatctactttctcttctaaatctctaatcttttgaaaccctaaatcaaagtttntgttttttttatcaa

SEQ ID NO: 28762 - DNA, 6513 bp, Arabidopsis thaliana landsberg
aatttataaatagatataatttgcaaacttttatatatactgattttaaaaaataaattgttttggcggtggttaaaatctagtatctttgtagaactagagttcaatcaatgtgttgctgctacaaaagtaatactagaaaacagaagggacaaattaatgatttgggatccagatttgtcccgatttcagaagcttcgttggtctcctgagctgacgacagcgagcttcgacgattgtgggccaaattactttttcccaaagaaagaacccaaaaatgtccatatcagcaattagctagccacgtcatatatttgacagttggataatattcagttagcttatattacaaaacactgccaaatggccttgcctcattggtcatcgccattacattaatggttttgaaatccgttgacttttgagcaaagactattttggtcaaacattgttttgcatttctttccagttttcacgcatcatccatcttatctcatctttgacattttcgtccaacaaatgcaagtcttgatttttgttttcttccttcattacacaacataaaaagtctcaaataacaagaccgacttgacgagttgagaaacaagtatgaagaaagaaactcaaaacctccaatgtatcccactagtgatctctgtcttatctctgtttggcgtctcatcagcaagaaaacctccatatctgtgtaacagagtctgcggaggaatatcaattcctttccctttcggtatcggtggaaaagaatgctatctaaacccgtggtacgaggttgtatgtaacaccacaacctctgttccgttcctctcgaggatcaacagagaattggtgaacatctatcttccagatcctactgagtactactctaacggagttgttcacatcaaaggtcccgtaacttcctcagggtgttctaccggaacatctcaaccacttacaccgcagcctttaaacgttgcaggccaaggcagtccctatttcctcacggacaagaacctcctcatggccgttggttgcaacgtcaaggccgttatgatggatgtcaaatcgcagatcatcggttgcgagtcaagttgcgacgagagaaacagtagcagccaagttgtaagaaacaaaatctgcagtggtaataaatgttgccagacgaggataccggaagggcagccgcaagtaattggagtcaacatagagatccctgaaaacaaaaacacaacagaaggaggatgcaaagttgcatttttgacgagcaacaaatattcaagtttgaatgttacagagccagaaaagtttcatggtcatggatacgcggtggtcgagcttggatggttctttgatacttccgattctcgtgatacacaacccataagttgtaaaaatgcgtcagatacaacaccgtacacttccgatacgaggtgtagttgctcatacggctacttttctggattcagctatagggactgctactgtaactccccaggttataaagggaatccgttccttccaggtggttgtgtaggtaagatattggtgttcttctgaacgttatcatatcttgtggcctgatataagattgtcgctaattatgaaacaaatttgcagacgtggatgaatgtaaactagatataggacgcaaccagtgtaaagatcaaagctgtgtgaatctgcccggttggtttgactgccagcccaagaaaccagagcagctcaagcgggtgattcaaggtaaaattgaactggattttattactatcttgagcgtcttgcaaaacgttctgttatttactgtttggttttttggtggtgcaggtgttcttataggttcagcactgttgcttttcgccttcggaatcttcgggttgtacaagttcgtacagaagcggaggaaactaatccgaatgaggaagttcttcagacgtaatgaaggtatgttgttaaaacaacagttagctagaaaagaaggcaatgtagagatgtcaaagatatttagctcgaacgagttggagaaagctactgataactttaacacgaatagggttcttgggcaaggaggtcaaggtactgtttacaaaggtatgctcgttgatggtagaatcgtcgcagtgaaaaggtcgaaagccatggatgaagacaaggtagaagagtttatcaatgaagttgttgttctagcgcagatcaaccatagaaacattgttaaactcttgggatgttgccttgagacggaagttccagtcctggtttatgagtttgttccgaacggtgacttatgcaagcgtcttcgagatgaatgtgatgattacatcatgacatgggaagtgcgccttcacattgcaatagagattgcaggagcactttcgtacctacactcggctgcatcttttcctatataccacagagatatcaagactaccaacatactactggatgagaaatatcaggttaaggtgtctgatttcggaacttcaagatcggtgaccatagatcaaactcacttgacaactcaagttgcaggtacttttgggtacgtggatccagagtactttcaatcaagtaagtttacggataaaagtgatgtgtacagttttggagttgtccttgtggagctcttaaccggagaaaaaccttcctcccgtgtccggtctgaagaatacaggggccttgcagctcactttgtcgaagccgtgaaagagaacagagtgcttgacatagttgatgatcggatcaaagatgaatgcaacatggaccaagtaatgtcagtggcaaatctagctagaaggtgtttaaaccgaaaagggaagaagaggccaaacatgagagaggtttcaattgagctggagatgattcgttcatcacattatgattcaggaattcatatagaggacgacgatgaggaagatgatcaagccatggaactcaactttaacgacacttgggaggttggtgtgactgctccagcctccatgtttaacaatgcatcccccacgtctgatgctgagcctctggtgcctttacgaacatggtaatgatcaactcaaaacactgcatatgtatactctcatctgatgtaaactttcgataatgaatatttggttttcaccatgtaatataacacacaaattgcattatattttcaagaagaaaaataatgttttagtacaagaacaataaatggggcttcaaccttcaccaataacactctagagaaattaagtttccctttggagatagctttaacatgttgtaattgacacattgcctttgtctttcccggtcaaaccatagcacaaagagtgcctagcgcctaaagtaaccgcaaacagtacagagtaacgctccaattctgcctcgcttttgctagtcatgccttgtttccaacattagcatctatcagcttgacctgagacgtaacaaagatttacagccgcacaattttagccaaataggtcttgatggtcagtatatttctgctccaacattcagcagttgtgttgtctcttcgactttcaacacacaagcagagtactctgttctcaaaacagagcctttcagtggtgaggttgttcttcctgtttttatcctaactccggattttcacttagctagagtagaagtccagaagttgattctggggactttgcaggtcaactttcatatggtctgcagaaaaaatcgatttttgtaatccactgttcattcattaatttaaaaaagaaaccatcagccgtagagttgattttcaatagtattttattgttttgcaacttgcttcacgcttctttctaaacttctcttgactatttcatcagacgagggcaagtatttaacatttttctttaaaagagcagattgatcagaccaaagaaaaatagaaacagaattatgaagacaaaaacttacaacttccgttatattgtagcgtctgtcctaactctgctcatgaatggctcatgagcagcaacacctccaaatagtaattcttcaagctcttgtaacagaacctttggaggaatctcaatcccgttcccatttggaatcggcgggaaggattgctatctcaatagttggtacgaggttgtctgtaacagcaccacttccgggtcctgcaaaactgttcctttcctcactaggatcaacagggaagtggtgaacatatctcttccaaaatctgacttcttcagcccttacggagtagttcacatcaaaggtcctgtgacttcgttgggttgttctagtaatactagtcaaggacttcaaaaaacactaccagatttgaacatcacaggcaggggtagtccatattttctaacagatgagaaccgccttgtggcggttggttgtggtacgaaggcgttaatgaccgatatagaatcggagatcttaggttgtgaatcaagctgcaaagacacaaagagtaatgaagtaggtaactcgctttgtaacggttacaaatgttgccaagcgaggttacccgtagagcgtccgcaagcagtaggtgtcaacatagagagcaataacgatacaagaggagaagggtgcaaagctgcgttcttgacaagtatgaagtatttcccgtcaaatatcaccaaaccagaatggttccaggccgatggctacgctgtagtagaactaggatggtattttgatacttcagattctcgctttaggaaccctttgggttgcacaaacttgacccgttctagtggctcttacttcttaaccgacatttgcctttgccgttacggttacttttccagaatgagttatagaagctgttattgcggcagtggctacagaggaaacccatacatacgaggtggatgcatcggtaagtgcctgtttttcttctgtagtcttgaccaccaatcagaaactcaataattatgatttatgtatgtagacattgatgaatgcgaagtacccaacaagtgtggagaagacacttgtgtgaacatggctggaaggtacagttgcgtgccaaagataaccaagcctgccaaactcgctcatgtgcttcgaggttagtcaaaattgcaccttgtgtatacaagaaaacaaacaagaacaaagaatttagtgtaccttaacttttcctttgttgttgcaggggttcttataggtttgttgggacttctgttttttgttatagggatttttgggttatacaaatttatcagaaagcgaaggcggatcatccgtagcatgaagttcttcaaacgtaatggaggcctattgttgaaacaacagttaacaacaaaggacggcagtgtcgagatgtcaaaaatattcagctcgagagagttggagaaagccactgataacttcagcatagatagagtgcttgggcaaggcggtcaaggcactgtgtacaaaagaatgcttgtagatgggagtattgttgcggttaaaagatccaaagttgtggatgaagacaaaatggaagagtttatcaatgagattgttcttctgtcacaaatcaatcaccgcaacattgtgaaactcttgggatgttgcttggagacagaagttccaatcttggtgtgcgaatatattcccaatggagatctgttcaagcggcttcatgatgaatatgatgattacatgatgacttgggaagtgcgacttcgcatagccgtagagatcgcaggagctctttcgtacatgcactcagctgcatcttttccaatattccatagagatatcaaaactaccaatatactgttggatgagaaatacagagcaaaaatatctgatttcggaacttcaagatcggtagcgactgatcaaactcacttaacaacattagttgcaggaacttttgggtacatggatccagagtacttcctgtcgagccaatacactcacaaaagcgatgtatatagtttcggtgttgtgttggtggagctcataacgggagaaaaaccaatgtcacgtgtccggtctgaagaaggcataggtttggcaacttatttcctcgaggcaatgaaagagaacagagctgttgacataattgatattaggatcaaagacgaaagcaagcaagtaatggcggtagcaaaactcgccagaagatgtcttaatcgaaaagggaataagcggccaaacatgagagaggtttcaataaagctagagaggatccgttcatcacccaaagatttagatgtccataccgaaaacgaagaagaagaagaagaggatcaacttatggaaatcaatagaatatatgattcttgaaccgtcgtaaatcagactttgctttaataaaacattttgtatctatatatacatttttgcagccattttgtgaaataaatcatggagttggaacttatttaaaatggctgtcactggcttttaattattgattttttttttttgcaataaattaattaataaataaaaaacattccaaatatatttcaatctcatatatcacgcaaatttcttcaaaattagaattagatttcggtagctatttaaaaaaatatatttgacagacca

SEQ ID NO: 28763 - DNA, 2228 bp, Arabidopsis thaliana landsberg
  unsure (1)..(2228): unsure at all n locations
ataacttggtcattactcattattgcttttgtaggtcatgctgcgattgtttagccctcgtaaaacaactcttctttttgtcatacgtgataaaacaaaggtttggtttttgcaattgagtatgattcttgattgtgagttcatatttcttagattttctgcttttgttcttagactccaatagagctgcttgaacgtgctctaagagaagatattcagaaggtagtagcacgcagtctcttttagtttccttttatttttgacggctttttcctctctgaagtttgggtactggttatggtttgttgcagatatgggattcagttcgcaagcctgaagcacacaaaaatacacctctaaatgaattcttcaatgtaaggagatcattttccaacatagatgatacttcttatgataaatttcaactggattagcgctgtattgttactaaattgttcatgaatagtcctgtctatcttttccttagttgataattcgctcgatatatgcttgtaggtaatgattgttgcattatccagctatgaagagaaagaaaaacagtttgagcaagaggtattattctgatatgtaaaacactcgtcttttgaagcatcaaagtaaatctaagaccgattcccttgtttcatgggaacttccaaataggttgctgagttgaggcagaggtttttccattccatttcacctgggggacttgctggtgatagacgtggtgtagttcctgcttcaggattttctttcagctcccagcagatttggaaagttataaaagagaatagagacttggaccttcctgctcacaaggtcttctattcattcaaatttatgtggttaaaccttgtttacctatcttgtgacctaaagttgttttgttttatgcttgcaaggtaatggttgcaactgttcggtgtgaagagatagccaatgagaagctgcgcgacttggcaaccaatgaggtttgcttctgcggcctccttacctcctttaatttttcttgctgatttaaatgttttgtaacataatgggggtataacttatttagagttggttggagttgcatgaagccgctgaaggtggtctagttcctggttttggcaaaaagcttagctctatccttgaaaaatacttctcagagtaagccctcttttttttttcctgaagtatttaattcccaagcaaagtaattttggctaatcttgtttcgtctaccccttcttagatatgacgcagaggcaatatactttgatgaaggagtaagaaaagagaagcgtctacagctgcaacttaatgctttggatgtatgacttctaaagtcttaaggtttgcattaaatagtgttgactctggatctggttacgtatgagttatgaagattgcgtctcttattttcaacttttctctaaattttcagttcgtatacccttcttatgctaccatgttgggacnnnnnnnnnnnnnnnnnnnnnaatcctttaagatccgactggaacagtccctaaatcaaggtgaaggattcgcaaaagctgtgcgagactcccaacagtcttgtctgatggtgtttgacaaaggatgtgaaggtgagagtttctacttcagtttgtgtgcttcaaaagtagagtttcccttatgagaaacaaattgttttggccaaaaactacaaaacatttacataaggatacctccatttataaattgtgttcgtctcttcagatgctgcggttaaacaagcaacttgggatgcatcaaaaatcagggagaaactttgtcgtgacattgatgctcacacattttttgctaggagtgctaaactatctgaattaactgccaactatgaggttctgttttggtttttctattcttttgatatcttagctttttagggctcgtatttaaatgttttgattcatgctggttcacagaaacggctaactcaagcacttagtgaacctgttgagtctttgttcgaagctggtggaaaagagacctggccttccataaggaagcttctcaaacgcgagactgaaacagctgttacagatttttggatgttggtactggttttgagctagatcacgctaaaattgatgctatggttcagaatctaaagaactattctcagagtttagtggagaaaaaagcaagagaagaagctgctaaaattttaatccgaatganagataggtnagaaaaaagaacagagtacactccta

SEQ ID NO: 28764 - DNA, 1651 bp, Arabidopsis thaliana landsberg
  unsure (1)..(1651): unsure at all n locations
ctacctggaagccaagggctttaatggagccgtcttttcactgttatggtcagcaatacgtgtaggcttacttgcaggttctacgcctccaaatgcaacttgaatctatacaagtaacgtccaagtcattaacttttatattctacttgatgttcactaaaacgcttgatgcaaactaaacatcttactataaagatgagggtaatatgctagaaagcaaactcaaacaatagtagctgatgagaagaatctaactccagataaaaggtaaactataaaagtgataagccattgactgttcgatttacaccttataaaattttctcaggttcaacgtctctgaagcttgctataaagctatccattatcaaactcaaaacaaagaagaagcgaacaaaattttcaacacgatcaaagataaaatttaaaaaatattcgaaaacccccttaccttatggcagagccgaattcttttgctgcgagacaagaacaaaaacagacaagaagaagaaatcgtcaatacacataaaaattctgagaaatttcgagaaaaaaaagtggacattgcaagcgaaactgttgattaacctttcaggatcaggctgaggaaattggccatggacgggggagaaaatttcacgagctcgtctaacagattttagactgagttttttcagtgactgagtttcgacctccctgttcaaagctatcatcgtcattctagggttttacacgaacaatcagaaacagaacgagaaagacggaagagaagagagggaaataggattttatccgacccgaacactatttatacgtagcccaacactcgaatccccacccgtttgcccaaaccncgctcattaagcgtcggttcagatttatttcctttatttaaaaaaaaggaaagggtaaaaaatagaaaattggaaacagttaaagcccaaaattgtaatttaccgagaattgtaaatttacctgaaaaccctacgctatagtttcgactataaataccaaacttaggacctcacttcagaatcccctcgtcgctgcgtctctctcccgcaaccttcgattttcgtttattcgcatccatcggagagagaaaacaatcaataagcgaccatgttggtgtaccaagatcttctcaccggtaagctcaataattccttaatctcggtatgaactgtgtagctatcgatctttttcttccgatcggaataaatcatgttatcgaattattagatctgtcatcgcatcataggtttttcgttgatttgcagctctttgcattgataattcaaatcttaggggattagtttatgtgatttggttagatctgtgattcattagtatataaacgtcctttaattgagcttaccgattcgttgtagattggattttagggtttattcgcttgtatcgattaatgtttgggatcttatgagtaatgactaaagagtctgggctattgatttacaggtgatgagcttctgtctgactctttcccttacaaggagattgagaatggaatcctctgggaagtagaaggaaaggtcagtgtcatcgattctacttcaagttttgttttgattttgttaaatttttgttttcctgttctgaattgggttttgattttgttatccagtgggcg

SEQ ID NO: 28765 - DNA, 1774 bp, Arabidopsis thaliana landsberg
  unsure (1)..(1774): unsure at all n locations
tatagtacgcaaaaatctaagcctgaaatagtgttgggtagcaaaaagaaaaattcagagaaggaaaagtaccatgttaatctggaatctgttgattgctccgtggatctgtggtgctagaaagagatcagcctgcaaaacaatgcttcatggctttaacaattgtctacttgctggtttgtataataaaggatactattctaaagttaccaaagaatcactgacttgaatcttaaatgttacgaagatagcaccataaagaaaatccagagaggtttagagtagtaccaggtaaatttcatcaccagtcgcatgtttcccagcgcaattcaccaacagtttctcgagagctgaaagagaaaggagacataattagataggtcactataaaactaaaaacactaacatatgtcttgtttcttgatcacgtctctgtatcttactactcatgccaatgacagagtgttgcagattagggtagattagagatcgcatacctgtaaatccttttgtgatagcattattaacccaggcagtcttctcctccacatttatcttttcctcgatatacctctgtaaaaaaatcgaaaaatgtagctaagtttactctatctagaacagtagaatctaagaaactgacatcaatctcatgtcctcacaataacagccagattttgatgaggctgtatgccagacaagacaatactcattgcctgcaatatacaaaataaaaaatgcatcagagtgggaagcaggacaatctaaggtgatattgttcatggaaacacatgtaacaaagtatgattcaaagaaagaaaccgagaaaccaagagttgacccgaaataccaaaagacagaaagcttgaaatacctggtaattcacagctcgtttatggaggtcacgaggtaacaaaggtggctcagggtacttctcatccagatactgtcaacccaatcaccacaaaaccgaagatcgatgaaatgttctttttaatcaacaataccaaaaaaaacttaaatggatgtgttactactgaccattattatcgcaaaagaatcattaatcacaacatctccatccaccagagctggtacagttcccattggattgatcttcttgaaatcttgaagatcaaaacgataaactttcaacacaagaacccaaaccatcagtaaatgattcataagcacatttcaacattctcatccacatgattacttacttacttactataatagcttctacacttttttcaaatcaaattcaatataagggtgtgaattcgaatcaaaaacaagaaactacgaacctgaatcgaattgatcacccttgagcaaattcactggtatatactcataatcaagccctaaaaaaaagtcaacaagatccagattcagaccaagaacaacactctttgctcacaaaatgactagaaccgaaactaagatcattagctgagacctttcaaagcgagggcgatacggacacgatgagcacacgagcttctccagtaagagtagagcttcaacttctcttcgccggaattcgcctgatcaaatcgaaaaaaaaaaccaaaaattacgaggaaattgagtggagagacgatgatctattatccaccatagaaagagatgttgtaaccaaccatgataaacaaggaatttgttgttcttcgcagtagcagagtccagcgattgttgagtgttttcgcgattactntgtttagatatagaagaagtggcgaattcgaagacgacgacgacgacactaaac

SEQ ID NO: 28766 - DNA, 2122 bp, Arabidopsis thaliana landsberg
cttgctttaccataccgtgtactcctgttttgagaatcggtttgttttctttgatgtcccataacgctataaacccgctactaaataccaatagaatcctaaaatggaggaggaaaagtgtaaatgactcaataggcttttcactagcacaaaagatttgttgatttgttacctcttgctttcagctgttagctgtggtagaatgctcacaactgaagtatcctcagaagcttcaatgggagagcctaggcaacaacaagatgtttcaagataggcgattcgatccatgtaaaaggtaaaccgaagaagctctttttggtatttgattaattaccatttgatgctaggtaaggtatggtgtactccagttgtataacttgattagaatcttgttcgatcttaaacactgatacattaccagaagaatctccaacataactgccaatcaaatatgacccttgttttcattatcagcaaatcaagaaactatgcaaaaatagtaccaaatgaagattgagaagtgaaacatacaagtaaggggtatgttgcataacccggaaagaagtgatctcgccattgaaaacatgaacatgagatagaagcttcttgtctaagtcccaaacctattagaaatttagctttcagaccaaagctcagaggctactactctactacttgagtcgaatcaagaaatctcttacctcaatctggttcttggaattcacattgagaaggattccttggttctgaacaaactggataattcaagacaatagagggagaaattgttgtcacggctatgtgattgtaacacagacacagaaacaagagaaagaaagaagaaagagataatgaagtgacacctcaagaaacctgcttgtggatgtttcttcagagactagcaaagcctgggtctgatctttcccaaacaacttgattctaccatccctgagaaccaagaaccaaaaattggtatgaatacacaagaaacaatttataaaaagcttcttttaaaaataaaataaaaaactcttacttggtggaaacggcgaggatcttctgaaatggatcataagcaaacaagtgagaacctgaagggattccgtaatgcagagcgatacgtggctcaacgtcattagctctcagtccttctgatgaacttcctccaggctacaacattggaggaaatggtaagactttgaagattttgttctggctagaaaattataaatagagtggccggttcggttggactatactaaaccggccggttttggtcttaatgtatatatggacaagtacaaaagtcaaaagataattggtgattagaaatataaatagacagcattatggatgcgaattttaattgaacatttcaaaatttaggacacgaaacatgcgttggcaacaaaattcgtcttacgtcatcattactttttttttctaatcaaactggattaaacatctgggctaaccaggaaccgacacagagtcatcacagtcacattcacaagtaatagatccgtgtaataatccgacaaaaattaatcaatcaaatcatatcctaatgttacattaattctgtgaatctataaaataataagacacaggggagaaaaaaacaaatattattctaagaaatggatctaacatcgatttaggtaaacttaaaggatttcgaatcgaatcacacttttgaaccatcattgttcactgaatctctcataaacccaatagccgaagaagattagaaagaagaaatcatattatcggatcgttgtgtaccttcttggctgctatctcgaccaacttcttcacgaacatcttttatccaacggtgaagttaacttataacccgaagcgaacaaatgaaaatagacaaagatcaaacacgaaatttttgagagtctttgagatcaccaaatcactggttcaattcctcggacattagagagaagatagagagagatagaaagaaaaagaagaagaaaaagaagaagaacaagcagaagaagaagtgagtgttgagaagtaccggttcctttcaaccgacggattattataaccgtcggaactactggagccaattcatcatggcatttatggcaacatatcatggcta

SEQ ID NO: 28767 - DNA, 1643 bp, Arabidopsis thaliana landsberg
  unsure (1)..(1643): unsure at all n locations
agatccaattgaaagaagaggggggactcaagtattccgcttaaacactgtgccttgaataaaactacttgtaaatgacaaattacatcttttggttagacgaaactgaacgttttttataagatggaaattatctttcattggtatagtggttgatgttaatataagagacattgtctctaatttgtctagaaacgtctaaattcaaggagcggacttgtctctcaaacaatttaatgaatcagtggtctacaattctaagagtttttataatttttgaaaacattaatatatttttgtaagagggccatttgggagtgtttggagagaaaggagcagagagggacgggggtaaagtgtttcttacgataaataatttgaaatcggggccaagagtagacagctttggtctaataatattccacttgtttttttcacttatgttttcaaaaaattattgctttctcgaaattaacttacttcattaattacactaaataaacattgtgttgtactttctaccattgttttcaattggtaaactgtcatgttagttcatcctctaaaagtcagtcacaatctaatttctagtgttgacgtcaccatgttaatcacagagatgatcatgttttctagtatgtatatatgagtacacacattgttacttgttaagaggaatgatagattttggtgtcgaaattgcttgatttatgagggtcaaagtgaccgttgttccaagtttggctggtttatgtggtcggattataacgttaaacgcatttgcgtggttggaagcatttatgtgcatggttattaggacaagttgtttgttttgctcttgcgttagttaaacaatcaaacatttgaatttttgtacttaacaaagggacaacaaaagtttcaaatctagactcctttctttaacgatatttgttcatggaaaaacatgtttttcaataatcgtgaaatcttcaattggctctaataccatttcaattttcaataatcgtgaaatcttcattaaagtgaaatgtgatacatgattaagcttaaatacaaagaaaacttaaccaaagatactaaccaaactaaaccataactaaaattatatatatacactctaataatgttaaagattatagcatccacaattcaacaaaaatgttttacccccacccactatatcattgaattatggaccgtcgcactcttctccggtcgtggtgaaccggctttcaacagattaatgtgttttcgactataaggtatgcaaaaatttgctccatatgatcaaagtgaccaagcagattttgaatcagtattggtccttggactagatatgtataccacacaactttaagccaggacttgaagactttctttaagagtttccatccctcgttatgccatattaacccacatagctttcaatttattcttggagagaaaataactagtgtagcggttatgaaaacttaaaacgcgtccatgactacaaataatacaaagaccatttctatattaaatatagaaaaacacttatatttttcccacctgacagaaaacaaacaaaacaaaaaaggaataattaacatcaaaagttcaaaaccanactagttcaacataaagttcatacaacattg

SEQ ID NO: 28768 - DNA, 1944 bp, Arabidopsis thaliana landsberg
attagcattattcactccttcaataactagaaaaagagggaggtatgatatgcaagaaaacatttgaatcgcaactattacttaggaactccatgatcagaaggacgggacaaagattgccaaccggtacaaatttgcatgatttgcttgagagtttctgatggtggctccacagtccatgttgggtagtgttcacttggatggaatacacattcttcactggctcctgtcatcaaggaaggttgagctccattcaagaacaagtcattttcagatcgtactaacccagttctcgcttcttccttgtcagcagcctacaaacaaactcacacaagatgatggtggtggattcaaaataagaacaagattttctctgatgcaaatgaaaagcgagaattaaccttttctgagtagtattcaaaagttttcttcttcactcctgcttcgtatatattgcattgagagaacacctgatttcagaaacataagaatcttcaggtgagacctcaagcaatgatctaagatctgcaaaagagtttacctgcgcttctacactagcacaaacagcatatattccccagtttcttgtgtagttgttgtacaaatgaacttttccaaatctgagacgaggttgtctctgcctagttccatcaaagaaacaatggtgaatggtcactcggatacatctatcctcaacatgagaaggatcagctccaatcagcatcgtcttgtcatgctgtgcaaaataacatctgtagaaaccagaagcaacattaagcaccagtcaagagcatacattaccctaaccataaccatccaaaatcatcaaacctcacctagaaacagtaatatccgtgctttgtctagtaatatcaataagcccatcatcgtaatcgcggagactacaccgatcaatccaaatgtgtctagactttggtttaatctgaataccatcaacatcatgacctctaccaccttcaaactccaaattgcaaatgatgatatgttcacattccttcaatcttattcctttccctgtgagcttaattcgttgtcctcgtccatcaatcgtcttgtaagacgatacactcaagtatgaattgagatttatagttccagaaactgcaaaaacaatccataacggctctttcctcctacctccttcacgaagagtcccaggtccatcatctaaaatccacacataaccaatctcaagatcttcgaacacaatcaacaaatgcatctcataatcaatacgaaggcgaatttatccatacattccagtatgatcatcggtaaagcatcgggcatagaggtacatatatagattcgtagatagattttacgaatacatcacctgcaagagaagtgacgacatagagatcgccgtggagaccaccgacggcggagcgtccgaatccctctgcacggccagctaaagccctgaggctacaatcggcatcggcgtacggtagcgacgtcatcgttcgttgttatgcgacgtcgtatcaagtgtttctgtttaccgtcgagcttctctacttgagcgagaaaggcacaagtaaggttgattctctagatcggtgattcagtttaccaaaccggtttggaccgggtagattatctatatatacattttttacagtcattttagcaaataaatcttagagttggacttatttacaacccaatgtcattagcattaaattttttttccaaaataattaattttactttaaatttttaatttaaattgtcaatcacattatcaatcaaatttaatccaaacaaacttcacatcaatcccttaaaattagcatagacgtattttattaacaaaattttaaaacaaaatcttttgtttaaataaatattgttcttactaaatgttttttgtttaaataaacaaatcatgtatttgaacttatctccaatgtcatgcta

SEQ ID NO: 28769 - DNA, 2075 bp, Arabidopsis thaliana landsberg
  unsure (1)..(2075): unsure at all n locations
ctttttctattatcaacctacttcttgtttaaacaatgcaggttagcattgatggtttgttttgctgtacaatctctaatgatcatgctgttaaaatatatgatgttgtcaactactatatgatggccatgatccgtttgccatatattcctggtgctgttgagtgggttctacatgcaaggggatgtcaaagctaaacttgctgtcagtgaccgagactctttgtttgtgcacatttatgatcctcgttctggttccaacgaacccattgcttcaaaagaggtttgtttcaatctctttttcttttgttgttatttcttgactcatcattttttatcaaagctaacagttttttttaatctttgtatacccagatacatatgaatccaattaaggtcatgaagtacaatcctgtttcggacacaatgatctctggtgacacaaaaggaatcattgagtactggagtgcaactacattacagtttcccgaggatgagtatgtccttgtctcacttcttatcaaaaacgcttttattattccatttcggtattgctgtttgttttctataaattggagcgtgtaggataagagaagcatacctgtttttctgcgtgtggctaatgtagttaaatatcatattactgagaatgatgcaaagaggagcctgtagtagaaatactttagttgccaacttcttagttgaccatctttagaatttcagtatagttgatgggctgctttcattaatggttcacaggttgaccttttacttgttgttgtagggtaaactttaaactgaagagtgatacaaatctctttgagattataaagtgcaaaacaacaatctctgccattgaggtacttatttggcatttagtatccttggtttttcttacatacttagaatgcagctattagcaattgatatgtctggtgaaaatcataatgcaaatttggtctctaagtttagtgaaattcttttcaggtgagtccagatgnnnnnnnnnnnnnnnnnnnnnntcctgatcgtaggattcgtgtgttctggtttagaactggtaaactgaggcgggtatatgatgagtcacttgtggtaaggttacatactctatgcttctttccttacatgttttcacgttaatctgtcatggttaatgatccattccactattaggtggcccaagatctgcagaggagtgatgctcccttatacaggcttgaagctattgactttggtagaagaatggcagttgaaaaggaacttgaaaaaaccgagagtgctccgcagcccaatgctgtgtttgatgaaagctctaatttccttatatacgccactcttcttggaataaaagtaaggaatccacttattgttttcgttttaaattaccatagactagcataacagtctagacatgataagtatcctgtctcacatgcacatgatacaattaacgagcttaaagacctgggattttcacctttacttaggtgatgaccaagatataatgtggttacttctttgtaccatatatgaaagtggttatactttctgccaatatagtgaatttagaataaaagaagcttgagattttttttgtaaatttgggtgtctaaggggtagtgggaggagctccattatcactaaccctcaatatctatgtattttcagcagatcattatgtaaaagcggaccagtttttatgatttgattgtatcagaactcttccatgcgtagtaaatggaatcatgacaagcaactgctaatttctctgtctacctttttgttctctaggtaataaatttacacaccaacacagttgcaaggatccttggaaaggtggagagtaatgaaaggtatctgagagttgcattatatcaaggtgatcaaggaggcaagaaagttagaaagattcctgcagctgcagcaaatgtaaatgaaagcaaggagcctttgactgatccgactatcctatgctgtgcctttaagaaacacaggatctatatgttcaggtacgtgactcatattgtgctagaatgactcatctttatgttggggagaaagaatgaatttttc

SEQ ID NO: 28770 - DNA, 1750 bp, Arabidopsis thaliana landsberg
  unsure (1)..(1750): unsure at all n locations
agttaataccaaatcatcatcaatctcgatcttaatatcttcgagagaatcaccagtcgccatctttctctctaccttggtcaaaccaaaataaaatttttatgtaacgatgataatgatacgaaccagaagttttcggggaaaaataaatgtgaactacgttggctattgtatctatttataccagaaaatagagagttttttttttttttttttaactcggatatatttttgcttcacaatccagttgggattcggtttaatacacatatatacaaatctgacattatcacttttaactctttaactctcacgtagtctttgtttcctccgtctttccacgtgcacatcacgtggcaggacgatcccgtgcttggctcgcctacgctgcttctgcttgctatcnnnnnnnnnnnnnnnnnnnnnntggtagtagtgagagtcgctgtggtcacgttcaagcatcatcttctgcaatacgtcgtcgtcttgaccatgatgatgtttgtgtctctggtgtgtcctacgatggtgattatggtgatgacgatgcttgtgatggtgatgatggcggttaacaacgtctgctctggagggtaatnnnnnnnnnnnnnnnnnnnnnnnnnnnnnnnnnnnncaccagtcgtagcatggatcaaagagtcccttttggtgcaagagccaaagaagcaaacaagctgaaaacaaaaccgttagttcgagtcttcgatattatgttagcgatttgcggttgcggttgcggttgaaacacttactaattgggaagagagcgaggagaagaccaaacataaccatccagcttaagcaaacgtattgaatgtggcaactgaagtcgaagaaactcgagcatttgtttctgcataatattattgatattagttcacttttcaagttattattatgacaagttaggttaggaaaagtgttgtaacctgcaagtatctccggtgatgaaatcgactaaaccattaatgattttcgtccatagtatcctaatcgaatcaaagaaacctttaggttgagtctctggaatttgaaatggattagtaacctgcatgttgataaaaatggtcacttaattatcaacatcaacattaatcaaaaccgtttgaattccattgtaattaatgaaacctgagttccattgtcaagtacggtagccgttgtactaaattgacactcggctcggtctacttcgctgaactgagagtccttgagtatagctacacacaaaaaaaacagaggattgttatgcaaggaaacaggcaaggtaaagggaggaggtgagtctttttttataaggaatcacctgtgcatatatactttgcagcctgatctttcgtcgggtacagcttaaaagaccgagtagtaaccgctttcggttttataatgaaaaattgttcctgaaaacattatcagtttgtaatattcctctaaacaacgcttcttcttagaagttttaaaaagagttagttacctcaacaaaagccacgcctttggagcaatcaaactgcgcagaaggaagcgaaatgcgattactatatcgaaccaaactatcagataagattcagttttggatattaccgttaagctataagacgcttctacttcaccagtattcttgattatgactgcagcaactccgaattgtgtaagtacttcgaatgtcggtatcgcgatgtttatgatcttaccgggactcctgcaaccatagaaaagttactaggct

SEQ ID NO: 28771 - DNA, 893 bp, Arabidopsis thaliana landsberg
tcccttcctttctaattatttttgttttatttattgaaatagcctcttataagggactagcgttgcttatgctctaatctatcaaaaatagtcagatgaagatgataaatattttcgataaataaaacagcgtaaatcactgataagataaattgataagtatgaaccataaaccaaagtgatatatatatatatatatatatcaaaattatttaaaatttataaacaatttatagacacatatacaaacatgtgttcttacaatattgttatctacatcttatataatgtatccaaaccattattatgtcaaatgccaaaattattttaaaacttttgtcacttatttattaatgaattcaaacagtttagtatttataaacacacctacctattatcagtcttaaatttttcactgttttcaccgcttttttttaacatttgactttattaatatggtgtcgttagtttaaatagtcacaatgtaaggcattcgtgatgatagaaggaacacaaaagtgagactgattgacttagtctatcttgatctttcaatatcttgcatcttccaataacttggctccaaagttcatcgttttgtgattgagtatatccaccaatgctccccaacagtcatcttcaaaattaaagcaaccttcttgtatcctctactccaacaatgtttcattcccatgaccaaaactcttacgtgaaaaaatacgggtggaaattaatatagtaattaacattaatgttagatgtgcttgattcgtgaaggataataaattaaaattttatctaaaacttttaaccatagtgggacgttggatcatataatttttaaaagatagattttatgttgacattaaaattaacacacctacctagtatat

SEQ ID NO: 28772 - DNA, 1444 bp, Arabidopsis thaliana landsberg
atgttgagactggagtagctagaccattgtttaactcgcaagatatttttctgaatgcgatttttgagttttttgtttggattgataattccactttgttggtgagcacaatcccttcatctcgtggagaaccaccaaagaaacctttggtgccatctggtcccaaaactctgtcaaacgagacgaagactgttgtccaagttagaacattccaagatttgcttaaggatgagtatgatgctgatttatttgactactacgcttcatcacaactagtattggcttctttggatggtactgtgaaggaagtaggggttcctgcagtgtatacatcgttagacccttcgacagaccataagtacttgttggtgtcatcacttcacaggccatattccttcattgtaccttgtggtagatttccaaagaaggtggaagtctggacaactgatggtagatttgtaagacagctatgtgacttgcccttggctgaagatatccccattgcctccaatagtgtgcggaaaggaatgcgttcaataaactggcgagcagacaagccttcaaccctctactggtatatatttgagattcaaagtgaatcacatgtagtacacgtgccaaaatgggatttggaagtaattaatttacaactcttctgagatatgtagggcagaaacacaagatggaggtgatgccaaaatggaagtttcaccgcgtgatatagtttatatgcagtctgctgaaccattggcaggagaagaaccagaagtgttacacaagctcgatcttcgttatgggtaacaactaaaaacacagcagatattgtagattacttatgccatcttatcaacaaactgactaacttcatcaaagccttctatgtcctaacattgatccgatttcaattctgcagagggatttcttggtgtgatgatacattagctctggtttatgaatcatggtataaaacacgacgaacaaggacgtgggttatctctcctggatctaacgatgtcagtccacgcatcttgtttgatagatcatcggaagatgtgtactcagaccctggctcaaccatgctgagaaggaccgatgctggaacgtatgtaatagcaaagataaagaaggaaaatgatgaaggcacttatgtattactgaacggaagtggggctacaccacaagggaatgtgcccttccttgacttgtttgacatgtaagcccaacctgacaatgatttctctttcttttgcttctctttttgtttttattgccattaagcgataacaaactgaatgttctgtacaaaatttatctagaaatacaggcaacaaagaacgaatctgggagagcgacaaggaaacgtatttcgagacagttgttgccttttagtctgaccaaaaagaaagggaattaaaaatggaggagctgaaaggtcgtgacatca

SEQ ID NO: 28773 - DNA, 1587 bp, Arabidopsis thaliana landsberg
  unsure (1)..(1587): unsure at all n locations
gggagtaaaaagtaacattaacaaacactttccacttgtttacttagatagatcatacaaacacagccattgcaaatgaaacaacaggatactactagctaggtgatgttctgagacatcattggtattcgaggatctgcattcacgagaacaacgaccgtgtcttattgcgttccagtcgagcttccctctgagaaacaaaataacacataggtaaagcagcaaagaagttggaaacgccaaaagcctaaatattcattcacaacaacaacctctttcttcttgcattccttgtacacatcaaaatgatcctggcatttactcttgtctgatccaaattcttcaagacctgataagaaatcaaggggtcaagctaagaggcataactaatgaaaacggaaacacataaacaatcaggaatcaaacccgacgttatcaattgatgggacctaaatcgaatcactgacatgggattcaacccactaatctaatcaccttgaggaagcataatgaaatagatgagatctaatcaatgctaattcgttatggaacttgacagtactgaagataacatgtcaaatcctatcctcgaagaaacaatcacaaagggtgagatcaggagcatgactcacatttgagagaagcagagtactgaagataacatggagaatcagatatccgagccgcgctagggtacgccgccgccgcgcctttcgtcgacatttcccgatcaccgtctctctctctcacaaccgattccgcgaagatatcttaatggagatgggcctttgagactctcagacttatatattcaatatcgggccttttatccgtccggcccaaaataaaagagcacaacctaacctctccaatattagtcttaacaagtaacaacaatcaaacaagagaacaaaggctaatccagttccctaagcaacactaattccaaatagctgtcacaaaaagggacacagctcttacattcatgtttcactaggcagtctcttgtgtacattatacatatttcgcatttcctcagttgactccggttacaagattcgttttttaaagcaaagatctaggactatcagattacaaatcatcttgtagctgtgttagaagcgcatcggtctcatgggcatcgatttcactgttgtttactgttctgttttcgtccacatcaataagagctaggtaagatttgtcttcaagatcccccgactgccttaacaattccaaaacggcctctttactggtaacatccgattcctcttcacagagcttgaagaaaccagacagcatcaacaccttgggcctccaattgctggaccnnnnnnnnnnnnnnnnnnnnnnnagacaagtcaaagcctctgaaatacacctctttctggtatgaccaacagctagaatctcccacgtacttgaacttggttttcctcccatttcaaccatgtggtcgaacaacccctcagctgtctctagttggtcgtttttgacatacgcattcatcagaagatttggcatcccggggtcataagaagacttgactggaagccattcctcatatacctttttgggcccttcaat

SEQ ID NO: 28774 - DNA, 2211 bp, Arabidopsis thaliana landsberg
aaactgattctttaacataaattatattgattgattgtttcttttttttcttttttcttttgaatatcaaaaggttttgggcatataatattagttttatcccaatcgtcattcaaaccggcgatctctaagctttgcttagggtttttaccaattgaactaacgacacttggtggattttgattgattgattgtttatgttctgctctagaacgagtttatacaattacacttcttctttattcgtaagataatggaacgtgttagtttatacatttaagtattttgcttacatacatgaaagttatggaagaaagaatatttttcgataggacatggaaaacatcaagccgtttacttagatttattttcattttcgactataacaaaagtacccgcagttacaatatctcccaaataatcgtgtagccctcggttttcacaaattggtagtgaaacaacaaatattgtcttatatattccatcatcttccacttctccgtacttgagcacacgctctttgatgtccgtcatgattagaatttcgaacccctaaacattaagagaagagaaagaaaatgcacttgaacctaaatattgcctgaagtttctaatatgtaaagaaaaacctaaataaatcagaatgggcctttttgttatggattagaacctcaaaagcccatgaacctaataatttacagtatttacgtacaagggtataatagacaatttgcatatgaagccctaatttcatcgtctttatctaaccttgaaacttcaatcccagatttgtttcctggcttccttctcgccgattagctatttttgtttctagtttattgaaattttgcttggtaattgtttttttgtttgtttctagtttatcaaatctttgttaggtaatggttttttttctaaaaaacttgaatccgatcttcttttatcgtttctgcaattttggtttgttgttgtttgatttgcccaatgatgcataaaattatgttatagagcggttgtatttgggtaatctccggcgtgttgttttaacctaatagccttgaacgccgtcgtttcgtctccgacgacattcacacgcgcacacttccacccttaccatctatccgtctcacacgtgcgtcggatgcgaaacggtggtgttcagggattttttaggttgccggattttacccatttactctaagccgtgaatgatcaaatttatagctatgagatctgagggctttgttttttaattaaagtttcggtttttatgttttggtttgtctttgcccattgatgtaagaaatcatttctgagtggtgccctggtttttgaatgttcttctcgtagttaccattgttgctcctcatcatcattatcatcatcatcatctcaacagtcttcttcttcttcttcttcctctgcttcttgtgttctctgctgctgctgctactactggtttcttgcaatggtaactttgagtatatttgaaaacctgattttgatgcgccgtatatgacagatttttgtgaatactgagggctatttttcttttatcactaatctttgttgtttggcatggatgtagttaatcatgtgtagttgtatgctgttattttcggtgagatttaagccctgtgatgatgactctaatgagtttgagtggtgccacttgggtttttcttgctgagactcattatcttggtcgctgctcctgcttctctctctctctctctctctctctctctctctctctctctctctctctctctctctatatatatatatatatatatatatattcacaaatccatgtatgtattttaaattttgtttgtttttttttcccttcaaaatgagtaacttatatagaagtcattaagattagctttgctcaactctttctgaaccaaatagatctctaagaggaagcattattcaatgtgcatataattattatgtatattatttttccttattgattatcaattttatatacacaaaaagatatcagtgaagaacttatgattgtgcatattttctgtccatacataaccacaatattaatcaaaaagttaaatttatcttagatatttgtttcatgataattcaatactgtataatcttttaaaatctatacataaccgctttggcctataaatcctattcttacatgcttatatattttgtaaaatactaactccctttaat

SEQ ID NO: 28775 - DNA, 1242 bp, Arabidopsis thaliana landsberg
tagttctattcctgatactgaatctgtgtgcacagtcctggaggatgacgaaaagaaggtggatgaaatttatgctgaccgagaaaccaaaattgctaaagttgatatggtttctgacaatgatgaagaaaataaccattcggcttctgaccacgatgaagaaaatagtcattcagcttctgaccatgatgaagaaaaaagccattcgtccgaggattccgatttcgatgaacaagctgatagcaaaaagcttcaccatgatgtggctgagatagtactaggaagtggagaaacacaccatgagcaatcggacatgatggaaggagaaacttctgataagggaaaacttgatgaagtcagtgatagtgattcatctttatcagagaaagaagaaaagatacgtgatatcagtgaagatgaagcaattttgatttcagaacaagtagttgatcttcatgaagaattaggtgcgtcttcactgccttcttttggagaattagaaatcaatatggctagaggggtggaggatgattatcaccatgatgaagctcgtgctgaagaatctttcattactgcgcatccgtcacttgacgagtcagccatacatgttctttgtggtttgggggacggtgatcacgaggaacctgtttacgattcgagtcctccctcaggcagtagattcccatcattttcttccgtatcgtctgattacaaaccagatctacctgaaaagaatggggaagaaatagaagaaaatgaagagaaagaacgtgaagtttattctgaaagcataggtcctgaggaaattcattctacttctaatgagactgaaacaaggacaagcgaagtaggagagaatagcatgcatgttacaggagaggcaagccttgtcatgagagagcatttgacaccactggaagaatcacctgatgtggtgcatgacatagctgaaacttcagtaaacaagtcagtagttgaagagataatgtacgaggaagaggaagctcaaaaacaaaaagatgaagtcagtcctcaaacattcaatgctgacatcccaatagatagttatgccagtttatcttctggagcagttgagtatgttgagacgcattcatttaatgacgaagatgttgcacagttggaacaagaaccagttcactcattagttcatgatgctgaggaagaaactcacaacgaccaaacaatggatattgaagtagactctgtaaatgctagtgccca

SEQ ID NO: 28776 - DNA, 931 bp, Arabidopsis thaliana landsberg
aagggtattcaaacaactcttgtatttaaacttgtgaatgtcccatactcttggacttctaatctttgaaacttcgatcatcaacgtaatacatagtccatcgtattctcacatctctcctgcaaagataacccatttgatagacttgcttatgtaaattgcatgaagtgagagatctcgaattcagacaccaaaccaaacattaagaagataagaaaaaaaggaaagagagaccttgtaattgtacttgctcttgtacttgattcgctcatgaagaagagtttcaacatcttctctggtaaactcaacagggccaccatattcagatccttcattactggtcagatctttcaccggaaaagatggccggattcttccattgttcgtcatttccccaaccatctattacttttttctcctctctcaaaagagttagctgaaattcttctcgtacctaatttacacacactctggatttgtctctttcaccccaattataagcataaaaacctgcaaaaaaaatgatttttattttcttcttctcatcaaagatctttattttattaatgattcaatggtggcttatataaagattaaatcgaaaaggattgaaacccgtgaatcattgggtttttttttctttcaattttcaaagacagtaaagttgttacaaagagaaaaaaaattaagcaatgatttgagctaaacaacaaaaacactatcagtgaggaaacaaaacataaaagactcaaactttgggtgtggcaatttcatagagaaatcagtgagaaaagaagaaaacacctcagtattattatctggttgtttagctttgaaatggcgatatgtctcttcgttgggctctcccgtcgctcgctacttttatttctgttgttttggttttgttcaagagagtgagagagatgagtgt

SEQ ID NO: 28777 - DNA, 1627 bp, Arabidopsis thaliana landsberg
catctacaggctctggaggagatagtccatcagatggttctcgtctcgattttgggaataccaaaacaggaattccattacttcttgcatactcagcacctccacaatctaaattgaagaacttaagcaagtaagctattcgaattccactaactaatgaatcatctattagcagttcttttctgattcattaactctaagaaccaacacaaagagaaactagaattgcaacatagaagaccaaaatcaataacttgaagaagaagaagaaaggtgataccttttttgttagtgaccaacaaaacaacatccccattaacagaaccatcactgcatccctcatgaatcttcctgaaattcgaaccacctcccgacacaaacacagcaagcttcttccttcttggttcgtctctcgaaccatcgacctccgctactatctgtggagcagacgaagcagcttttacaagcggtacaatcctcatcgcacatctctctgcgggactacggaaagagaaggagagaacattccgggaaggtgtgagcggagcaatcgaggtttcacgggtcttaaacggtgaattcaccgggaagttgaattgactagagaacaaaacccgtgattccattccgacggtctaatcggagggttttgtcggaataagtgtcagtttggtcgaagagggagacaataatgaagtctcagatgattaccggcggaaagagagatgctcgccggagaaggagaaagaggtggcggtggctgctggtttcaccggagcaattttcggaatgaagataactcaaaagaaacaatgggaatcaaaaccctaaaattgaaattggggatttaatcaaagaactcaggagggaggtgttgggatttgagtccttgcttaaatcctgcaacaaagaaaaaggaatcagggagaagaagatgaagaaaagagaagaagaagtcgcaaagagagtcaacgacagagtaagaaggaaagtcaacaagaaggaaagaagttgggtttgaagggttttggtactaagaggattaatgggctgatggtttaattagggccaagtgaataattgttgtgcagattaagaatgttattatatataggtgtgtgttaaaaaaagacccctcaaactctcctattttttaactttaccttctacgtctaaaaaatataaaataatacgcaataatatataacctattttcttaactttacataaattataaatgttttcataatcacataatgtacatttgttttgaaaattctaaacttcccataacgagggtttcgatttgatatattatttatcaaaattttaaaatttaacaattagaaaaaggttatattgtattttattttaaatttcatatggtaattttacatttttttgacgtgaagggtaaagttacaaaaatgaacaacttttagttttttttttcttcacaaaacccttaattttacaagcaattatataattagaatttcacttttaaatagggctaacttaatacctaaatcatgttaaacatattaattttttgtagtggtccctctttttgaaccactggtggaagttcgataccattttttgttatctaataaatatgtaattc

SEQ ID NO: 28778 - DNA, 1173 bp, Arabidopsis thaliana landsberg
accgaccaacctctaaatggatagttcgtgtaatgaacgatatgaagacggatttttctttcttccggtttggtcgtgtccacgtcattgggatagcgtccgatgtgattgcccgagaagtcgttcgagagaaagacgcagtttttgcggacaggccagattcttactctgccgagtacattagtggcgggtaatgttgattttttttttttttttttttggtaattgggtaattttgaatttgataacaaagctgaaatgttcacttgaaaattagttcaaattataaagcaattcctagaaaagcttatagttctcttagctcgactaaacaaaaatactgttatttgttaacatatatgtttcgtatatgttgcaaactgtgtataagagtttgtgtattaccatgtgtaaaaacgttacaaaactggtaggtacaatggggtagtgttcgacgagtacggagagagacaaatgaagatgaagaaagtgatgtcgtcggagttaatgtctacaaaggctttaaacttgttactcaaagttagaaacttagaatccgacaacctcctcgcgtatgttcataacctatacaacaaagatgagtccaagacaaaacacggcgccgtagtgaacgtgagagatattgtgtgcactcacacacacaatgtgaagatgagactcttgtttggtcggagacatttcaaggagacgacgatggacgggagtctcggacttatggagaaagaacattttgacgcaattttcgcggctcttgattgtttctttagcttttacgtagccgattactaccctttcttaagaggatggaacctccagggagaggaggctgagttaagagaagccgttgatgtgattgctaggtacaataagatgattatcgatgagaagatagagttgtggagggggcagaataaagactacaatcgtgcggagacgaagaatgatgttcctatgatcaaggattggctcgacattctcttcactcttaaagatgagaatgggaagccgttgcttaccccgcaagaaatcacacatttctttgtggtttcgtgatagaaaatatactcatataattactaaccaatttagtttgtatattaatattattctgaaaaaagttattgggtttcctttttttgggttttttgggca

SEQ ID NO: 28779 - DNA, 2417 bp, Arabidopsis thaliana landsberg
  unsure (1)..(2417): unsure at all n locations
ctgccggtgttttggttggttgggtttggaggcccaagtggcgttatctcgattcaaaactcttgtccgattcacctaaattcctcaatcttcagcttcccacttccatcctcaaaacttcttctcaccacgttaaccccaggtaaggttgagatgatttcattgatgtaacccgtttccccacttgtctctctttctttcttactcttctgctaaataaataactctgcttttctttgggtcgcagcctttcttccaaagagaaaactgggtttgtaacggacgatgattttaggcatctatggaagttggttgaggtcaaagatggcggtccttgttggattcaaatgatggaccgatcaaccccatcattctcatatcaagcttggaggcgagatcctgaggtacccccctccctccttcttttaagtttagtttaacatgttcctccaagttgaatcatatcaatttttgtatgatgccagaatgggcctccccagtaccgtagcagaactgtgtttgaggatgccactcccgagatggtcagggacttcttttgggatgatgagttccgttccaagtgggatgatatgcttttgtattcttctactctcgagcgttgcaaggacacgggcactatggttgtgcaatgggtgcgaaaggtcgctacttgtttctttttttcttcgttctgtttgcttcttctcccatctctttactcatatcttccgctactgttgcagttccccttcttttgtagcgacagggagtatattataggccgtcgtatatgggatgctggccgagtcttttactgcattactaaggtattccattctttcgctgctagtaaccaagcaaatatccaacttattagtgcgagctattaaacatgagttcttcttgtgaatattgtcttttgaattcactctttttattcatagtaagtatgctcctttgtatttgcatcagggagtccaatacccatctgtaccaagacaaaacaagccaaggcgagtcgacttgtactattcaagctggtgcatccgtgcaggtactagcattgtgatgcacttaagcaagttgtctctgtttttaagtgttgtgagtttctaaggtagatatattcccatggtgtagttgaatcgaaaagaggcgatggtgagatgacatcatgtgaggtactactatttcaccatgaagatatgggaataccgtgggagattgcaaagcttggggtgagacagggtatgtggggtgcagtcaagaaaattgagccaggccttcgtgcatatcagagggccaaagcagcgggagcaggtttatccccaagtgccataatggctcacatcaacactaaagtgagtgcagaggagttcatgaatgagaggggttcgatagcagaggttacaggagacaagccgacggggaaaaacataccaaaaatactagtggtaggaggggcgattgcacttgcatgtacattggacaaagggctgttgacaaaggcggtgatattcggagtagccagaagatttgcaagaatgggaaaaaggatgtagaagagagtgtttatgtaagtagacagagaacgaatgagggaatgagagaggtgaaaaggctatctctttagtcattgtcttggtggatgtatcaatcatgtaatagcaaagagaaaaagaagcgagagttattctttcagtgttgaatttctgagagcgcgggaagatagttccaccgctctgcgctaataaacttctccgtcttttcttgtctaagtttctgatggagtgaaggtaatggaaattataaaaaaaaacacgagaggaagatattaaactgattttgcttcttctcaagtctcaaccgttctaacctccttagagttctcacaattttcagtgaaggaaaagagtatgtcgactgaactatataacttgtgtgttttgtagctgtaagtagcaagttggagaaaacatttccaacttttattttagtatgtgggtgtggaccagacccaataaggaaactctgaaagcagtagaataatcaatcaaacagatttggaaaatgtaaaagatgtttgttcaatttagaggtggagaaggcannnnnnnnnnnnnnnnnnnnnnnnnnnnnnnnnnnctttgttgatatcgtggaagggaagctggtgagagatgaagagatcgagattgagaagaccttggaggcattgggtgatgaaaaagggcaattgggttttgggtttgaagcctccgaaaacagaggcggtgatggatctgccttggaagagctccatgggatggatagggagaagctgtgggcttgcgtgaacacccagcatgacagtcactcccactcccgagtttgtagacagaaaggcttctttaagtgcttctatgcttcctgcacac

SEQ ID NO: 28780 - DNA, 3643 bp, Arabidopsis thaliana landsberg
  unsure (1)..(3643): unsure at all n locations
tgcaattataggatccatcttgaaaacaaatcctattctagcattgaagcacagaggaggttaaatcctaacttgaaaaaagtagtgaaaaaataaattttgaaactgcttgatgctggtgtcatataccctatttctgatggtacttgggtttctctagtgcatgcgtccctaaaaaaggtggaatgactgttgttaaaaatgaaaaggatgaattgatcccgactataactctttccagggaagcttaagtctagatggctggtcccttctatatcactgaagtccgcccttattgagcagtcactctagctggtaagagtggggatttcacattgaatggtcaaaggctcaagaaatacttagcagatcaaatccttcctgaggtgactttggctcatctccaggaacctcttgatgattaaaggagtaaggaagtcaagctaatgacttaaaacaagctcacttgggggggggggggtttaagtctcatgcctttctatgtacatatttttgttttccttgttatttttgatgcgtttttctagtgttttcaggaaataactgccaatgtttaagtgcaaaggattcaaccttagagagtcactcgaccacatgctgtagagatcgagtgtctctatgcaatcgagtataaccaaggtttcagctagagtttcaacatgttactcgatcacactaacgacatgctcatgaggaaatgtggtcgagtaaatatgatgattctgagccatcatactcgaccatgtactcgaccaacataagaaatgcggagaccagaggtagaaatcgagtataatgttgttttgatctaacggctaaacattatactcgaccaacagagatttatagaggatttcaggatttcctgaggttttcccagtcaacaaggaactaagcttaaagacaaaacaacagagcgtggaccacacgcgttttctccctgaagataaaatggagagagaataacaaattcaatctccaccacaccttttgaaatcgccctaatcataacaaagtttactagacccatctctcttcatctctctccttcgccacaaatcggcctctttctctttctctcgtccaacgaattactctaccacgaagagcaaagacacccgatcaccactcgtcatactcgactgccgtgaaaagaatcatctactcgaccacctctacgctgctgcagtcaagttccctgtcttattcaccgtcgaaacctcaagaactactcgattttagccgagaactactcgattccgaccactagactttaacgcctcactaccattaccaagttcaccatctctgctactcgaccgtcgatccatgattctgtcctcgccaattccggctcaccatcgaagtactcgaccgcctaatttcaccggttgtacacgacttccttaactttactcgacctcatgttctactcggttcaaactgtgaaagaagaactcgggaatgcatcgatttactcgagtactagattatactcgacgaacttggtccatttcattctctgttgataacgattctggtttcattgttttctttaagactaacatattgacatttgagttttgagttctcaatctttttcaggattatcatgagtaattatagtgacggttcgtcaatggatcctgactatcacatggatgaggctgagtcttcatcttcaaggccagaaagagaacagagagaatatgataacttcaggagaaaagctgaggtagctcgagggaagagagcaatgacaaagaggtatgtgctgatagatgaggatctggaggacgagtatatgcctacgcatactcgcagagccacacaacttctgcacaaacctgatgtattgccagttgaggagtatatcaggctcttcaagctgaatgagttctactgcacaagatatccttgctcgactacgctggcacagcttggattactggaggatgttcagcacatgtaccagagttgtcacctggacactttgatggcttactcatatgtagcctatgaataataaacgattcagtttctttccacactacaagtggagctttaccaaggtatgacctctgatgatttggaaagtgaaggagtgagattcttgcaattctatgtgtatggtcagggttatatgctatcaatcaagcgtttggaaggattgtttggtttccctaatggaatgggaactaagcccaagtttgacagagaaaagttaaaggaattatggatcaccattggcagctctgtaccgctgaattcttctagatccaaaagcaaccagatacacagtcctgtcatcaggtacttccagtgttctgtggccaatgtcctttactcccgagagataacagggactgtcaccaattccgatatggagatgatcgctatggctctcaatggcactctccgccaaaccaagaacggtatgtctctccaaggtgaaaccaatgacacacctctctatatacctcttctgattcacttgtgtggatataagagctgggctgtcagcaataaccacaagagagcacgaggcgctctttgcataggaggtgttgtgacaccgattgtgatcgcttgtggaatcccaatcacatctgatggactcgagccgcaagcaatggatatcaagcacntacgtcactgcgaattctggagtttgcaatggttgacgaattgcacaggttcaagtttgagcactctaaagacaagagagctagcatccttctccctagccctgaggttacacggataatagagagagataacattgattttcggcctgaggttggacgcctctactatgagaacgctccgccattggatgaggatgatcctctagaagaagctgcttcggatgggatggatgaagacagagcagtggagttcgacactagcatgtatcactttggtgaacatgtacctccagcgagggagagcaagagcttgactgaagctcataagaacaacagtaaattgcagaagtggtgcaagaagcaggacaagctgctcgccaagtgtttcaagactatcaagcttctgacagataagctgagttgttcctcctccaccactgctattccacagggacagcctcctctggagatgccatcgaggagatttgatgagcctgagcacaggcctgagcttagcgagcagagagtctcacatgtcccggctaggcattcgtcattcgaatcccgggagcacaagagaagaaggaaggctaaactcacacgatctagcagcagatcacgcctcattcactcgagaaggtcacttgaccgcggtgctggccgcaatagaaggagagaggtcgagtatcctcagagaggtgctggccgccatagagctgatgaggtcgagtacccacctgctggagctgatacggaacatggcggttcttctatggcctgggagcatcacaggcagccatcgacgaccaactccattcattctgcgactgaggtaagcgcctcacttcaccattgtattatatcatctgttgttatttgttctctattttgtttttgtgattggatttgtcctgagtactctcttcaaagtctattcacccagtggactgtgtgatttaagttttggggaggcc

SEQ ID NO: 28781 - DNA, 1622 bp, Arabidopsis thaliana landsberg
atggatctctgtttctttcttttttgggatagcttatacgcttctttctaatggtggatcataatctctgtcttgtgttcttatgattcccttttgaccatcactttggtaatgttgcttaagagtgggtggtgtttggcttacaacgattagccttttgaaaacgaatagctctatgttaattgataatttaatctttttcaagtcttggaaggtacacacacctttctccttttgttatgaaagaaaatggtttcttctagtaaccaaaattttgaactttattcacatgtaaaacaacacaatcttgtagcaaatttacacgttaaatttaaaacggtgttgcgtatttgaagagacaatatcctaaacgttatcatattaatattatttttgttatttttccgtcaaacaccatttttattaagttatcgaaaagatattatccgttagagaaaactattaaggaaccgacgtgcttacatgagagaaaataacatttccagttctaacttttatggctaaaaggtctgctcgagtgttaaattttcgagaaaaaaatctaatacgaaaaataggaaaatacaataagagaccgaaaaagaggcgaattccgctgcaaaagttggccaatctttttggttatccagaagagatatcaaatcggagcatagtaatattattaactttgttttaacctaagcgatgtgggataaaaatcctcttaacaaagacaaacaatcaatgacgtcatcaatccaaaaattggcatgtcctcaagattaaaaagacagtcttagctgacgtggcctgttctcaagttttaattggctggagaattcaagaggatgaaacatagaaatcctctttgactaaaatattttaaaccacacaagagaaggaggaggcaatggcggtgttatccaccatctactccatcaccagagcttcaacgcctactatggcgtctctaactaatgactcaccgtctccacttccttcttcttcaccgtcgaagcttccctctcctacttctccgtcaaagaaaccgttaaaactaagacaagtgagcaaacaaatgggaagtcaaaaccagcaacgacgaggcaacaagccttcgatagcacagattgagagagcttttggctctggatcatatcgtgattccgaagggtaattaaagacactaattacattttcaaaatgtgtacttatatacagtatcgtatatgcgcggttttgatatttgttttttttgtctcgtgaaagggaaatggatatgaatacggtattcgatgagcttctattaggccatgctaataaattcgaaagtaagatcgagaagaagctacgggagattggcgaaatctttgtagctcgaacagagcctaagcttcgttcctcgggttagtttagtgattataatctcatactaatcatattccatagttgcgttggcttagacacatctacttcattgatattgcagggaaaccagttttgatgtttacaattcaatggattcttccaatatggattatgtcactgctcgtagcttgtggaagtatcaaactcccctttagcatcccttttcctgatgacttgatcatgtgattcttcta

SEQ ID NO: 28782 - DNA, 1730 bp, Arabidopsis thaliana landsberg
  unsure (1)..(1730): unsure at all n locations
accggaaaaattgaaagagccatgctcaagtttcttaggcaaccgtgcaaatacattatagtctaaagaatgatcccattcaggtacaagatctcggattgagttctgtaaacgagtcgtccaagcacgattatccatcattctacatattgtatcctctagcttttcatggttttgacgcttacctcgttggaacctctctctgagtggtctcgtctctgtagaagtcagattcttcttcgtctcggattttgcatctggagattgggtttctgggtttgcgtttgctggagtttgggtttcttcgatggtgctgaatagacgagggagtgagaagagagatgagtttgatgatctgggaagcgagagataaaccctagcttttgattggtagcgtttagatctggaaatgaaagccattacaggaaatggaacctttgtctctgagtttttctgaaaattttcaattcgacatggaaggacaaaggaagcaagagtttttagtgatgagtagggttttagtttagggaagaaatggagtcctggatccaaatcttgttccgggtcgggtattttctgaacttgaacccggcctgttaagtgttactatccagcccggtttcgtgcataacagatgggcctagaatcgtatctagtgttgaccaacatgtaatttccacactgttatctataatttatttgtttttattaatgtttaaagttcttatgaggaataacaaacatgtataaagtaatttgaaatgtaaccttaaacaaatgttggatggtgataggagatgcctaagctgacatattttgtgggacttcaagatagtaatctatagtcttacctttgatcaactatgttatcatatcaatagagacaaaattgtttcgataactggattatgtgaatttgatgtacatctttatttggaaataaaaatatatatcttctagcaagggccacacttatccttcgctgatctcgactcataagtcataatgatcatcaaaaatcaagaaacaatgatcattactttcggtctacgacttttctttttttctttccctacctatatatcaaagggggtcggtgtgattgtggtaatggtgcctcatggatttagttgagtatccgggcatagcagtgtcgttactgttttttaaatatctatttttcgattgcgattctttcaactcttcaagcacaacacgctttaannnnnnnnnnnnnnnnnnnnnnnnnnnnnnnnnnnttgtcctgaaatccgcaaacaaattgttgaaaacaacaatgtgtttgaaaagatatatcggtatactaggttcccaaatatgaggctagtttcacaatcaagattagacgaaagagattaccttgcgtatataagagatgttatctttcccagggccagcaactaagattccgccttgttgcctgcacaaggtccgtgacaatagttgttaagaaaaacggaaagtaatctcatcgatctctaaccagaaggaatgaatgattcatatactctttaacttaccaaccgcctctttctactgtatctttcataaacgagagtttccagtcttggcggtatccttccatgtaagactctagtatcttcatagcagcctataataatgccacagaagctactgagagtctgagaccacaaaagcagaacattttggttacctaattataatatgctaagtagaagtcactctac

SEQ ID NO: 28783 - DNA, 1422 bp, Arabidopsis thaliana landsberg
cccggagcaggatccagaggtcgatcatccttactcgtgtcaacctctcctagtcttaaaagattgtagattgaatcgcccgttacctaaaagaattaaaaacaagttgcagctaaatatgatcaagaactagaaaagaataattgcacgaagcagaaaaacaaaacaaaagaagtaattttgctttaccttgccaaagatagtgtgcttcttatcaagccaatcacacttatccaaagtgaaaaagaactgacttccattagaattaggtgagctcgcattagccatggcaacaatcccacggtggctaaatctcagccttgaatggaactcatcggcaaagacacctccatatatactatctccacctgttacatatatcacacataaaactcaattgacctaatccagcgagcaatcagaagaaaatttgatacaaatgagaggtcttaaaccctaagaataatcagagagcgtagaagttaccggttccggagccggtgggatcgccgccttgaacgagaaaaccgggaatgacacgatggaagatggtgttgtcaaagtaaccctcgaggcatagttgaacgaagttccgtacggatttgggcgcttccttaggccaaagctcgacgtcgattggaccatgagtagtatttacaatgacctttccctttgtcggcggctctagcacgtacaccgtcgacatctctgctacttcttcaccgagatgtctctcagtctcagctcaggttcattggctgggtttcgtaaatagcctaattatagacaaagcacgaggcccaattcaacaatctaaacccagcccattaacttaaaatctgtaagtatttccgatgatttgtttttcattttattttttccagatttggtagaatagaaccgtagaagtatttcctggaaacatcccatgcatctctatcactacgtggaagatcagaaattaaagaaagtcttcgagctagagttgagtggtactccaatctttgtacttttatctttcaaagtctccaatttcagaactactatagcttcgaggaaagtcaatggtaaaattttggaagtttattttctacaattctataaattttggacgtacgtacgacatattccatgtaaataaaacgagttgaacatgttcatatcgatgaagacatataaaacccaaaagtaacccttatcactccttaacaaaataaaattttgtctattcgtgtgaacttgtatgacttgaattatcaattgaaactttaaagatataaaatttcagtagaaatagaaattcttttacaattttaaatgtatatgttatgtttgaccatttgtaggataatgtattcaatagtctcataaactataccttggaacaaataaaactgcgtctgaacgttaatgatagacagg

SEQ ID NO: 28784 - DNA, 2394 bp, Arabidopsis thaliana landsberg
ccagccataattgaaaacatttgtttttcctaatcgatgatttccacgttttacattaagattgtctatttctaacactgtagagtgattagtagtataaagatagtttgaacgtcaaatattatactatatactgtttagtgctgactcttgtccaccttataaacatctgaagtcaaaaggatgctgaagtcattagagtaaatattgagaggaagaagtcttatcgtcgccccatttcacttatcattgggtgagatcggtcttgaagaaagagagttagagaggaaaaagaagaatcttattagctctataatatctgatattgtttctcatttagtttttcactttttacattaagattggttgtttgtagcattatggagtggtactttttacattaagattggttgtttgtagcattatggagtggttaatagtataaagataatctgaatattataatatataatgtagagtcttgtccacctaataaccatctcttcaaaagcattgttctatgatctgatttttcggaaagactctgcacttctgttgttggacattttctctttgctaataaaccactaacacaagtccaagcgaccagagaatccatttcttcttgttttattagagcattcataataaggccaagattataaatctgtcatcggaaaagcccaagtgtcctatgtaatttattttccaaagctcatttaattagatctaagcaactaggttcatatatatatagtctcttgtaatgaacatcaaatagttaactttgaaagcaatctcaaaacattgagatttatgttgttaaagagcttattaagatagcaacacgagattgaaattagatagcttattaaagctttaattagctcacacgaaccaatgtgaaatggggtttgttgttgggtccaagtccaacgaaacgattatatttcttggatggtagttttaataatgggcctgaatcatatgggctttttgatgagactgtgacggtaaaaaaataaaaaagggcaaaaccgagaaaacagatctctctgtctcaactcaaacaatcaaaagccctagtaaaaccctagcccccaaagcccttgtgccattgagccgttatataaatccttcactcgctccttgagaagacgaatttgagattgcctctgcaaaggtacttcatttcggtgaacccaattcatgttttcgatgatttttgcttctctatttcttcgattttgcgttttatcgcgttaaaagcacatatcgaaggcttgcagataacgtataataaaaaacgcctgcgagctcaatatttgtgcaatatcctaaaaccatccatttgaggtttcgataaatctctgtgttataagaatttatcttttcttatcgacaatttcgatggatgggacatttattaatcggttttatgatttttaacattgtatgagaaaatctgagtcagatctgaataattgaatccttattcgtctgcattgatcggaaaatagtaccacttgggttttatctagtttactttaaggtgctcatagagtggtaatctcacaattgttgttgtttgaacaatttgggacctttgtttgcatgatttagtctcttatataccaattagaatttgggaccatctgctgattcatatctttgtaattgacagagtaaaatggcgaatcctaaagtcttcttcgacatcttgattggtaagatgaaggcagggcgtgttgtaatggagttatttgcagatgtgactccgagaacagctaataatttccgtgctttgtgcactggggagaatggtattgggaaagcagggaaggctttacactacaaaggctcagcctttcaccgtataatcccagggttcatgtgtcaaggtggagatttcactcgtgggaatggaactggaggagaatctatttacgggtctaaatttgaagatgagaacttcaagttgaagcacactggtccagggattttgtctatggctaactctggtcccaacactaatggttctcagttcttcatctgcacagagaagacttcgtggcttgatgggaaacatgttgttttcgggaaagttgttgatggatacaatgtggtcaaggcaatggaagatgttggctctgacatgggaaatccttctgaacgagttgtgattgaagattgtggtgagctcaagaacccaagttcataagttcttaaaacattgggtgggttgatcttgacaggttattctatcatatgctgtgaagcaaagacagcatcttaacgttaaggtcaatctagtctgggatgcactactttggttttgactatatcatatgaaccttaggaagtgggccatccttgaaggtgttttcttaaaac

SEQ ID NO: 28785 - DNA, 1859 bp, Arabidopsis thaliana landsberg
ttttgctccaactccaacgccaatagacgatcgaacctgccataaaaaccaaaaaaaaagagagcgactcttaataatgttatagatttagaaacaaagggggggggaaaatagcctaaacagatggaatattaagttctcatagatccagatatttactcagtagtatccatgttttcactcttgattctggagatagaattctgagaaagacaaaaagagattttagtttagtaacagccaggtaagtttctacatgaataataaaagcagcaggacgttcttacctcagttttactaattgtgtgctgttgatccttgaagatgaatttcgtgaagtaaccagtaaagaaggcagaatcgccatcaatctgaaagtattaaaaccaaaccatagcaatcaaagagactttgaaatatagcaaaattcatcttctctttacaaggacaactaatacataattcgtaaataccttgttgaatctttcccaaaccaagtcttgctgcatctgatagccttcataggtaaccaaagtatagagtctttcttcatgctgcaaaagaaaacagaattaaccttctagaatgttatgtataaactgttgaaatcgcttcaaaaacacttcctgattatcgatttaagtgactgggaaccaaaaaaagaaacactacagctttacataatataagtaaataacctgcagcatggtagcgaagtgattgttgcggaacaggacacaaagttcccattctttaaggtcattttccaaggtaaagagcctggaggaaatgataattattaacttgaaaagataaaaccaatgtagccagtcacagaaatcttccttagcaaacaataagatcacgcacccatgccaagttagttgagtgacactttcttcaaagaatcctttgatcaattcacctgaaactcagaagaaaaaaaagaatggagttatctttatccacaacagatataatgcgtagatatgtaagaatggatgtgtaagaatttaccctcttcttgcgtgagcccttttgtacccttcccttccggagagctttgtccaagaagagactggacttcataaactgactgggagacatcatcatcctgggatttttcactaagatctggagatgcaatgaggtgattttagtaagaaaatttaacatatctccagatgcaagttcatgcagagatacccatgagtctacctgcattaaccaaagttatagcttcagaaatgatatcatttttggtcgactccagattagtcttctccacagagatcagcacatcagtcattttgctgctattctcagtctcaacattaccaaaagtctcatctcccaattccgttgaagatacctctttacctacattggtcttattcccaacatcacaatcttctgattccgtagaagaaaactgatcatcaaatttggacagctgacagatattactgccaagggtggtagcacaaccagcttcaatgtccacagaagttaccaatgtgtcatcctcagagatctgatttacatctaacgacccagacacaactctctgagtatcaaaacttccctttaacgatgcttccatttcagataatgccaaggcctttgacaccatttcatcttcttcaatatctccctttcccaatccaagatgctctgcagacgcagcacaatcaacagaactaacagtctgtgtgtctaaagtagtaagcgcaatctctaactcatcacgagatctgcctccgattgcagcaacaatttccacatcctggaggaaaaacaataaatattgaaacttttctattactacaaattgaagcaagaaagaaacacaatcaaaa

SEQ ID NO: 28786 - DNA, 1367 bp, Arabidopsis thaliana landsberg
gggagaaagaaacattgctattgaatcaaacgctttgattcatgataaacacgaagctttgcctagattttatgagctctcttggtcttcctctaccggaagacgttcactttcctcggacgctggagctaaaactaccggagatgacgatgacctcgaagacaagaatgtaaaccttgcaactccaaacgagactagtagtgatagtgaagatggtgaggagttttccggtgatgaaggggatattgaaggagcagagctggaactacatgtcccggaaagcaagagaccatcggagatgtttaaggccattgtttctgtctcaggtctgtctgtagggagtgctcttgataagtgggttgaacaaggaaaggataccaaccgtaaagagtttgaaagtgcgatgctacaacttcgtaaacgtcggatgtttgggagagcatcgcaggtactgagtactctttgtttcaacttgagctgaatattaatgtccatcaattagttcagtatcaaagaatgttgtttggttctcagtaatgctttctgttttgtctccagactttctgttctctaagtgttttctctcgtttctgcgatgtcttgttgttggtatagatgacagaatggttagacgaaaataagcagtttgaaatggaggagagagattatgcttgtcggcttgatctgatttccaaggtacgtggctggtacaagggagaagcttatatcaaaacaatcccggaatctttcagaggggaattggtctaccgaaccctcctggcgaatcatgtggcaactagcaatgtgagaacagctgaagcagttttcaacaaaatgaaggacttgggattccctctgtcaacattcacctgtaatcagatgcttattctttacaaaagggtcgacaagaagaaaatagccgatgtgttattgctgttggagaaggaaaatctgaagccgaatcttaacacatacaaaatcctgattgataccaaaggatcatcaaatgacataactgggatggaacaaattgtggagacaatgaaaagtgaaggtgttgagcttgaccttcgtgcacgagctctcattgcaagacactatgcatcagctgggcttaaagagaaggctgagaaagtgctgaaagagatggaaggtgaaagcttggaggaaaatcggcatatgtgcaaggatttgctttccgtctatggctatctccagagggaggatgaagtgcgcagagtttggaagatctgtgaagaaaacccccgttataacgaggtccttgctgcaatcttggcatttggaaagatcgataaagtcaaagatgcagaggcggcttttagaaggtgttaagatgtccatgagtt

SEQ ID NO: 28787 - DNA, 818 bp, Arabidopsis thaliana landsberg
aatcccatagccataatcacgaggagtgcaacctcaaccatttccatcattctgatcaccaacctggaaaaagggaaaagaaggagcatcgccacattgatcacaatatggaaggaatctttcttcatgttttagcagacacaatggggagtgttggagttgtgatatcgacactcttgattaaatacaagggctggttagttgcagatccagccagctcaatctttatctccatcctcatcatcgcttcagtcattccgttgctacgaaactctgcggagattctactgcaaagagtccctagggctcacaggcaagacctgaaagaagctatgaggaacatacttaagactaaaggtgtttgcagtatccaaaggctgcatgtatggagtttcaccaacttagacgtcttggctaatctccatctccttgtatcagctgattcagacaagacggatactaagttgcaagtttcttagatgcaagagttatataatttgactttgcagcttgtatcaacttatagcaattgaaacagtcttgtcaccatcaatggttttagattattattcgtttcatgcaagtttttgtgaaagatttttatggaagttcatatatatatgaatactactgaaaaaaaaaatcaacttaaaattcaaagcaaaatctccacaaatagatctgcttcattatagaaatacttaaaaaaacaagaaaaaaaacgtggcagaaggaatttagaagcacaaacagtttcaatctctctcttgatccgttgctactttacaattgactgactcttaaggaagctcaatgtt

SEQ ID NO: 28788 - DNA, 1514 bp, Arabidopsis thaliana landsberg
ggcgtacagccgtcgtttgttcagcagttgaatgcacagacaagggtcctgatttagtaaggagcatgttgacctcgttcaaccgggccacattcatgtcatcctcgagtgaagggcaaggatctgaagttggaacttgagaaataatagaacctgacgcatcatggacaaaccaaccatacctgcaaatacatataagtaaattaattttggtttatcttgtatgacaatttgacgagaagaaacctgcaagagactaggaaaatatgagagcaaaccttaagcggaaaaccgaaggacttccgaccattgaatgcacttctgctgcgcttagaaaagagtcatgggtccacctctgatggcacgttacagtttcttttcgtgcgttgtaaggaaatagcaatagctctccagtcgcacaacttgagcttccccatttgcgattgagatgttcaagtacagatgatatcttcttgcgattactaagagtaagttcaagatgcggattgtgcttatcctgttaaagtgttaagtgttaacagatcaagctccatttcatgtctcagaaaattattgctccaatcagtataattcctatttgaagcttaccatttccaaggatcttcgagtacattcatcaatcgggaacagctgaagtttaagcttggcagaaaactgcatattggcatcactgagaggaacatcaccagctgagcatagagaaagtggagactttccggttaaatatcttgtgggacctaaatctaagataaaaagagaatctgatttagaatttgcacatgttagtcctcaaaaaacatatatctaagaaaaggaactatcatccaatactagtaagtaaacctgtttgatcatccatatctttgtcaattgatgttcgttccaaatgctctgcagcatcagcaaccagagagaccccatctattgcagctttttcccattttctataacctgctgaaaaaggaagagctgcttagagtcacgtaagaacctggaactacatcaagcttttaaatagcaacataaaatctaatatcaacatggaagattaaaagtagataatgtccaaatttgtgtgaacactgaaaacacacacaatatggggctgaagaaaactgcctatctaacaaacatgcataaaaactagtaaagaaagaaccttgtttccgccgttgccttccacctctcccaaaggctgtgtcttctttttcgtcaccaaggttgacacttaagctttcaccatgtttggtagatgctcttccaggccctagctttttaacattttggccgtcggagagaataagtttaaatggacggttatccaatcctctttctctactatgacttgagatgtttccgagggaagcagaagagagattttctccctggcaagtccgttttcttatgctctttctgcggtctttcagcaattggtgttccttcatgcaaaaggttttgttagacaatagtttgtaaacgattccttgtcaaat

SEQ ID NO: 28789 - DNA, 1576 bp, Arabidopsis thaliana landsberg
  unsure (1)..(1576): unsure at all n locations
aatcaccaagagtagagttgatatcatcaatcacagctctgaaattttaatagcagctcgatcataagctctacaaaaacacaaacactaatgtaaatgcaaaccttaacaattccgaaaacaaaacttttatctataataatccaaaaattacctagctgcagcatgagcagtgtcgaaaccacctatataaatcaacaaccatgaatcaataatcttaatcatcaaaattttaacaaaaattgtaatttacctaaataaacttgtttcccacaatccctacaaaacaaaaaaaaattgaatcaatctcactgataaaaattactaaatcgagaaacttgtattatcatcaacaacaaaaaaaaaaaacttaccaaatatgtgactcccatcgaccagttcttctataaaaagtaactcctctatactgtgaacttctagaccttggtcctctccgactctttttaacctgagccggaaccggagccggagtcggaaccggagttaccaatttcgtttctccgtcaccaatacggtcaaaagaaagatctatccagtttctagagcttgatgatccttcaacatctcgtagatgtccacagtctccactcaccggaaaaaactctttagtaacggaagctgaagcgacggggctttcgtctccgccgctactacttccgacttttaaannnnnnnnnnnnnnnnnnnnnnnnnnnnnagagcaagagtcttcgtctccatcggcattgataactgacgacgtcgatgtaccggactcttccactcgattcccggcggagttgtctgatgtctgccgatctaagtatgagtcaccaccgtactgagtcgactcgggagaatcagcgtcgaggttaagatccaacatctcaagctctgaaaattacaaatctagcgaaggtgatgatgaaggaatcagttgttagagatcgtcttctacagcaacaacgattacataatcacataatctctcacgaagagctcgagatgatcgggaggaagaagagaatggagaagaatttagagattacgatggaggaatggtgagagtagagaagttttgtcgccgggaaatgttaccggcggcgagagagtgagacggatatttttttttttaaaagtggagaagaagatagaaggagacgtgtgagggaacatttcagacccaattttagaggatgatcattatttataataaagttgtttttctctctctgtaactataaatgtgtataataactttataataaaattttaacatattgttgttggtccttttttggcagtggtataccggctaagtaagtttccggttttttttttttttttttttgccggtacgtactgcttttggtcaatgctttggttttcaaaggagacaatacaatacatgaaatgaaacatcaacttttagttccgaccaaaacaagagtaatgatcgctgcagtattgttttttttaacccatgcctgttacattagatttttgtaggtgtagttgaaacgtaaatgttaacaagagtaaaatgtgatttggttcgtgtgttacatggtttttg

SEQ ID NO: 28790 - DNA, 1733 bp, Arabidopsis thaliana landsberg
tcgaagtctaaattgcgaaatcttagacagttgcttcgtcgtctgcgtttataatctgtgttttgagatttttgatctttaaagaggtaagcttattattgactcagatttatacttttaaacaatttttatatgtggattgaaatcccagatcataaaaactggaattgtgttcttgaccaagaagcatctggtgttgtcaatttcatattcatcgtttgattttcactaatttatcaacgaatacaaaattgattgggtgtaatcttaacttgttagatcaagtacattgttccaaattttatttaccagttttaacaaagctaatttatattccattcacttctatttacaattttttgttcatattttcaaatatgtggaggataaacaaaggatagaaactgatatgattattagaaaacaatagctattacgaaatctttcgaagaatgagtattaacaaaattaattgtttttaggcgaatcttcaattggaagagacaacctcctccagattcttatgttgttccaataaatgagataatgttttctattgaagcagacacgatgtagaaggaccaaactatattaaaggttagtgttaaaatctttttgaaaacattattgtcagttagaatagttgatgatataaactatgatacgtttttgcaattgtctgtttatataacttactatgatacgtttttgcaattgtcatttcacttctgttgttgtttgattatacttgaacttggttactattaggagaatcgtacatattacgaggtcgtgaactctctctggcatgataatcgaaaagcctcttccaaacaaactgtccgacgtcggcaatgcaaatgctcgccggcgtcgggatctaaacgtctcaaaatctttccgcttctgctctcgtctctttttttatctctcgttgaaagttttccctaattttttcttaacttttcaaaattctcgaaccttctcgaacacacctaccctcacaggcttctcaaattttcataacaaaggacagatgtggtgctcggttttctccctcgccgctcttttggtcgcagatccatttacaggtctgattttccagaaaccttcaaaatttagaacagatctaaaagcatcattcaactttgttctcgacctaaattccatctgcacgctaaagagttctctctctggttttcgttgatggcaagaggtctccctcttggtccgtcagttgcgtcatggccgatggagacgtcgacggcgcacgacatttttcttctttgggcaatggtttttctctcggaaactcttaagagcttcttctggcctcccttctccactttggacaatgttctcttcaggcttcgccgcttttgctgccatcggagacacgatcttcacaacaaccatctcagtcttctctggtgagccgccgcatgacctacacgcttagaccaacgaaaacaaaattaggttttctgtgggcaggcctgaattttttagtcggcccattaacgttgttgtggcccaagcccatttcttcaaagaattaacttcagttctgtttcgacactgcctttgtctccctgtggtcaatgcttagatcaagtatatgttctcaatggcaatggacaccatttgaaacgtagatcactttcattgctacgggtttactcccatcttctgagaaccctgattttagttgcacctgtcgtttatgcaaaaaa

SEQ ID NO: 28791 - DNA, 1985 bp, Arabidopsis thaliana landsberg
  unsure (1)..(1985): unsure at all n locations
gttcagttttttggattgggggatgtttcgcaggcataggctcaacaaatagtaggattcaactttgaattgaaacaatgggccatgtatattagtagtcataatttataaactcatacatgctacaatgatttcaaattctttcgtaagttgaagagagaaatatcaatcatcactgaagaaaatgctttatgcagtagcttctcctgatagcagtgagtatgatgggttgttcgatgaatgagtgtgcctaatgacttaatccaataacttcaagagctcttctcgacggagattagtcaccgtatactcgagtgtaacctgtcagattaaagaaactcaatctagtatatgccaaaagtaacatcctttgttggagtgtatgaagtagtaaactactttttacctctttgaagataccgctgtaagaagactcctcgaaacccttttaacaaacaacaaagtgtgtttagccattttcctttgtaaacacaggcaatggagcacatacatttgagacaagagattgagttgttgtaccagtttgcggaataagctgagggaagctgtgtttgattccccaattttggctgtaaacttgtgaatctccaagttcttgacaccataagccatcattatcaacacagattcctttcctagtcctttaccacggctactctaccaaatggttgtaacaaaaaaataagaatcatgtgcacagaagtaacatcagctaaagtgtattcgcgttgtataggactcgaattgggaagactaaagttaccttctgggctcagctatcattatttcaacttctgcaacctttggatcatccacatcattcatgtaaatgttcacatcacctgtcattgctgcacaaaagcttcagttacatattgacaatgactaaatgtgaaaataacatacaccggaagaaacactacagagcattcaagctaaactaaatggacttctttntattttaagatgataaggaagaactcttaaagccaacctagtcaccaatgatctaaaccactaacaaagaagcagtcttgtagatatgttctcattttccggccactatacacactttgttctaataacaattccactacattattaactaaaggcagagagtactgcattgtcacagcagctagatagaagattccatactgatgcatgctaaagtaatctcctttatactcaggaaacaaaccttctacatgaggttggccatgagccaggtctcccttaacgaaatccttgtccaagacaatgaaagtccgctctgaaaccaaaaacatgggcattagaaaatactacatttgaaaaagaagatagacctaatcaaatataaaaggtcatgaatctactctaatcattgtttattggttaagagacgaactcaatgaacctcataagacactatatagctaaatatccaagaacttggagcttaggtgatatcaaattcacagaaaaagactaaaatatcaaacaaaaacaatcaacattgagattctagggtagtttaaaagaaaaccctaaaccctaattgagtaaaactgaaactgatcaaatctaagataaagaagatggaagatttaagatatatatctaaatagggtttagagttttttcatactattgggatcttgagtccaagaaagctgcatctcatactcttgctcaagactcaacggctcagatcccgtagcttcaagaagagccgaatcttgcatccattgatggtactttggtacatgttccgccatgtacggtaccaaaaccactctcttcccttccaaactcaccttcgtcgccattcttgtcaccattcttcttctcttcctcttctctacagagaatcaatcagaaataagaaacgacgtcgtttactgttatccgagctggcatattttatccacgtcatattttatcataataaaaagagtccaaatatacacaaccaaccaatg

SEQ ID NO: 28792 - DNA, 1166 bp, Arabidopsis thaliana landsberg
cgatacctctacaacccgttacttcatcacaatctagttttatcgcaatatcatttgcacatgttcctgtaaagtatctaaatgtcacattgctcactttcacagcagtagcctgaaagaacaccacatatgtttgttatacttaaatctaaaaaaatacgtgaaatttagccatctctctctctgagccttaatttttcaaaatatcaaggttgaagcatatttcagttttagttacattcacttatcacttatgtatcgtcttttattagagatttcaaattaaaataatatcacttcatatgtatattgtggtcacatgcacctattcatttattaaaatatgactgtagatttaaaaatattacccctgctgattgtttatattgaccagcattatcacgatattgttgatcgatgatgatggggaagttggcatttattagagtaatatcttcgtacaaaatatttttgacaaacccttgtcctccctgcaaaattagggtatgtaacgtccaagtacatgatatatgttttttatattatgtatattattttattctataacaaacagtaaaaaaaaacttacaggccaagtcttgattcttgcaccattttgtgttccagtgaaggtgcaatgtctgacattcacattttgtactacctcagatgcccctccttcccccaaacttccgatactgtactttcgtcacacattgatcaagaattgatagtaaaagtatatatttgaaaattaattttatatgtgcgaaccttatgccatgacccggaccacatgtcacgtaagttacgttaatattgtatgaattacgtttaattgcaacacagtcatcacctaataggtagaaaaccataaatatcataaaataaaatattgtaatctttctcctgatcaatctgtatatggcgtagtctaattttcgtttaactaaggaaaatggtagtaccggttttgattgtggagctcataatattgatattttgtgaatgagagatatcaatgccatcagtatttggactacttgcaggggcaattagatgaagatttgataaagttgcgttgttgctatccaaaatcgttatgtgattccttggactattgatctgagttaatccattatataaaatgttttggcatccaaaaa

SEQ ID NO: 28793 - DNA, 2846 bp, Arabidopsis thaliana landsberg
  unsure (1)..(2846): unsure at all n locations
ctttctcgtgcatattcaataaggaatagggtttacagacaaacagcacatcctgtcaccgaaaatgctctttgtctcgggagtgatattttgggagggtcgatgtagtttcgggcgcttgattgagcgttgcagatcagcatcaacagatggagcttcagcacctccttttttatatgcttgcctggattttgaggatttcttgggttgacattttgaactagctgagctacacttagctctacggagaggtacaattgtgtatttattcttttccatgtattctctgacagctacacaggtacggcacgatatgcttttgcattgcttgaaatgatctaaccacatccgagtaccaagacaatatctatatttgcagttagggaccttgcagcagtctatatgtttcactatctttctggcttgaaagcaaaacttgctcgcacacttatctttcttagccttgcaatgacgtgcatggaacataaacggaatccaccgcagaacggtgttcgaagacgtttgaccacaatcttcattaacctgtttacttggtacatgcatgacaggagcagctaaagccatagctcgctgagtcagattgggaagtaaacgatcttggttctggagttggccaggataaagattttgggagtgttgtcctcggtgctggcgagacccatgatttgagagttgttgactgacctgaggcaaattgtctctgttattgggagcagattggaaattggtattccacaggggatgatgtagttgacgtttaggttatggggtttgttgcattggttgcaggtttgagtgataacttgtgacggtagggtcaagtccctgcataggattggggttgttccatggaattgaattctgagcaactgccattgagccagatgacataacaactccacagggatatggattactttgaccaaaagaagcaacgttgctcattgagtatccttctcatgggagaaagcaacttgtcagaaacgtaccattacatgaattgcataaaagaaaagtgaaagcgaaaagaaatagatagtaagagatagggagagagattactatgcatgtgtgactgatcaggtggtggttgcagaaaaggttgaggtaaagttgaaaaatgtgtagcattgaagaggtcttgagaagtcatgggtatattagcagaaactggtacacagttgccgttaaatccagtaatcagaggactagagatcccacaagtaatttggttcatattcggcctattaacttcaaccatctggtgattagcaccagtagaatggtgtgtctgcatgtcaggcccaatagaaaatgctgcagatgataaggtatagagtcaaaataaagaacagcatgtcagtataatttgaaaaagaatcaggagagatcaaagatgtgtacctccagctgttgcagtggtgcaattaattggcacaaggcttcttccgcattggaaagagttactaacgcttatggaagtatggaccgctcgggtagatgtaatacattgagcctctccattattcatggcagcagcagcagcacgccgctgagaaagcattgttccaagctgttgcaatatagttcgtacacgggcgtcaaaagttcttaaatcgaagtactcctcaaatgatcgagaagacttgaggagttcttcctcaatcattcttgttgccgcaatacactgttgatcctgcttctctaagagagcacgttgcgtggcatcatcaacacgctgctgttgctgctgattcttcttgtctagaaagatttgatgctgcttctgcttgtgtcttacgatagcataactggagaaagaatatatgatggttaatatagcaaattaaagataagatcatgagacaacatatgtataataagggcaataaagagagagcgaagatgattatgttacattctatttcttaaagcagtgcgtctcttctttatgaaattattagcatcctgctgaggagaaataacagttattggtgccgacgatgacgaagaaacagcaacagagttctgaggaactttattattattattcatatttttctttcaacagagcatgtgaccaaagcctcctagctcctcctatttttgacctgaagaaaaagtaattgattttagggctccgcctaagtcaaaaaacaaaggtcaattatataaggttcgcaatttgattaattagcgttgagaagccaaatacagtcaacgagaacgaagacgaccaaagaaacaaaggatggtcttggtcgatgagttaagatactacactacgtgcgattgtgacggggaactatgggacgcatgaagaggaggaatagggatttgtcttttatatccaaaaaatcaatcaagccctttattttatttatttatttatttagttgacaaaagttatataaatcaactagtttgacttttgtttttgacggaatcaactaggaaagttaagatgttatgttttgttatatttttaaaaaaacttcaggcccaactacaaaaaaatattggaaaataaaaacaattgtggaaattattaaggttagtctctcttcttctttttttttttttattgtgtgtttagtatctcatgaaaatcagattcctaaagctaacacaagattcacaaatggcttaagagtcaggacgcttacnnnnnnnnnnnnnnnnnnaaaaaggggagagaactaacaaggcctgagcactgaaactctttgaacatctcttcagatattttgtttagtgtttcactcgatagcttttggaggcccggtcttagcaataacactgttggcatagtctggagtagaatg

SEQ ID NO: 28794 - DNA, 639 bp, Arabidopsis thaliana landsberg
ttagtgaaaacacatacttgtgaagagaaaaagaattaacaacactcactttttaagctctttttgctaggtttgaagtttacaaccatatgacaatattctagagtacttaggcggctctagccaacttctagaatacttatactaatctcctaaaccctaatctctaggatcttcaagaatcaacttcgggatcttccttaatctacaagcttatcccttttccatatttgacgagaaggaaattcaccatatcttctcgaccgacattcgtctttgatcaccatgccaagtcagcaactttccttggcttctcacatcaaccgctacatccctgccacgttagctcacacgtccatatcagtagtctctgccgtttagtgtgatctgatgcaacttcttgatttccgacaactcgttgatatccatcagctcactattgtcagaatctacattttcagaaatatgtttagatttttaattaacttaatcagcactaatacaaaaagctattctcgagaaaaaaagaagagttgattaatcttttaaaaactaaaaagagggaataaattataaagcagtttcccgtgttgtgtgcttgtaaaaattttttttttcataaaaaggtattagtgtggc

SEQ ID NO: 28795 - DNA, 1534 bp, Arabidopsis thaliana landsberg
catatatccctgcactccagattatttattctatagaattctgatacacgatcatagactctcaaatagcatagcagaggagcatcaatcacaactcccagaacaaaactacccaccataggaggatttcatactaaatagagcttcgtcagtgagcgagattgcacccgatttactatcttttcatcttacatggatctctaagtcttctaagacagggcaagagacaaatctctcaaaagtggactcaaccctaattcataaaatatatgatggaaatgaagatgcagagtccatcaaccagctgatggcgatcaagatgctgctgggtatcaagaagttgcatcatatcacatcagacgtttgagttgctaacattgatgcaggagccgacatggacaagctaaggcgattgatgtgacgagccgaggaagttagctgacttggagtggtatcaaagacaagattggtcgagaagatatggaagatattcttttcgaagaattaggaaggaataggcttggggaacaagaaagattccttttagtgattctctgagattctagggttaggattatcgagaatagggtataagtattctataagtattctaaagtaagcgtggagccgctttgagcactctagaatattgtcatacgattgtaaacttccaaacctagcaaagagattagaaggcttccggaagctgattgacttttctatcaacaaaaatcgagtcttcctctagcaaattcagatccagcctaactttgttttcactagagatatctgaaaaccttccttcttgtactgcataggagggattatacatgaagccttgggtgaaaactcaatttttttgcccaacgtgtagtttatcagaaagtcgatgattcctaaaacaagcactttgtgttcctcgtccactccgactaaaagcgaataatccataacatcaacagtactgtataaagagatagtagatgctaaagataacttgggaatagataagagaaaatggatagaaagtatatcaataagactattcatgaaaaccacaaccatgctcccaagcatgcaaaacattcactacaaaaagtgtgcattaatagcacattatgatagtatagattttgcaaatgctattaaagatgatattgagagatttataactatatcataaccatttttaaatgctaaccatataatagcaaagtggaaatgtagaatcacttataccacaaaaacttcacaaatatttcacaaaaactgctcaaatacttgagcaaaatttcttttaaaaagaagcatttattaacatataatcctaatttctatcttcctctccttcatggttcctatacctctctattcctcctcttcactcgaactctcttcctatgatgatctcaatatttaagatataaaatttatgctgtcacatatacacacaaaaaaaataatagaaaaaaagtgcaaaaccatttgttgtggataaatatgcttggctagattcttacagccaagtttagga

SEQ ID NO: 28796 - DNA, 3722 bp, Arabidopsis thaliana landsberg
accagtatcacgcatgcgcttgaggacatcaaatgcaaaatttgtctgccctagatccccataccctttaatcagagaagaataagtgaacaaatctggggaaacaccattttccctcatctttgccatcatatcctcagcgtcttgtagtctcccttccctacaataggtttgaataaatgttgtgtaagtatgtgcatcgggctttgttccagaggacaacatttgctgaaaacgactataagcatgatcaaaatccccgtcttttagcaatctatgaatcaatattgtatccgtactaactgtaggctgtagaccaatcttaaccattttttcctccaacaacgtcgcttctttcaattttccatcggcacataacccgtgaatcagggcattaaaagtcaacgaatttggcaagcaattcttactcaacattttctcaagcataagatgagcttcgtctactttacccgccttgcagtatccatcaatcaatgcagtgtacatcaccacatttggatttacacctttttgctcgagagaatcaaacaggtcgcaggcttcttccactcttttgcttttacacaaagaatctatcatactagtatatgtccactggtctggaactaatcctctatcattcatcaaactaagtaatctatatgcactatcaaaattaccagatctacactgcccatcgattaatgaattgtaagtgaccacatctggaagcactttacgctccagcattttattaagcactcccattgctttgtgaacattacttttacaatacccctttatcaattcattgtacgtgcgtgtattcgggctgagtttacgtgattccatcaactccacaacgtctacagcatcttcaatcatcccccgcttacaatacccattaatcaatgcattgtaagtgattacatttggcatcaaccctttctctagcatctgacctagcaactctctagctttctcgaacttacattggctgcataaactatcaattagcaccgtataagtgtgaatattcggcttaatgcctgtctcttccatctccttaaccaagttaagagcttcagacttccgttctgatccacacaaagactttatgagcactgtataagtacgaactgttggaaaacattcgtcatccttcatttttacaaacaagtccatcgcttcatcaatccttctcgctacacaaagaccgtgtataaggtgagtgtacgcaccctcatgtagtcggcaccccttcaagggcatctcattgaagaccttaaaagccgaatctaaatctttcctttgacaataacccataatcaaagacgtatatgtgaaaaaatcaggatccaacccagcctcaactatcttactcacatactgattcgcctcttccacattacccagcttgcaatacccattaaccattttattatatgtgtaaatgttgggacaaaccttatcctccaacatttccatataaacctgcttcatttcatcgaccaatccaaatctagccaacgaattcaacaatgtgttgtaacacccaataataagcttatacttaagctcaaatctttcgtctttattcatcttcctacacaaatctaaaacatacaaagcgtctcccactgaatcacagctcttaatcatcaataacctgatcttaaacacaacacccacatatccattgttgatgagaagagtaagaagggatgcataggaatatacactgtgcttgtatctcggattctgtgagatccagtgagaaaaattaagagctgttttcggatctagatcgagtgagaatagtgaagagacgtgagaagggcttatcgcagaaaccatagatttcaaggacggagatttatgcaattaggtttagaaagaattgatagcagacggtgtggaacactcattaatcatgttctccctccggaagattgcgaagtagcggagacacgagagcaaaactgccggcgagtgaccggagaaggaaccgtaacatccgtcgagaatttcttcttcaggacttcgaaggcggatactgaaccagtcaaacccgaattgcaccgtggttgtattcgacggatcatcgatgatccgtggcgttttggatctctccgatgatgaacacagaagagaaaaaggaggaaactttgcagaacgaatcttcagaatcgggggtttatctaatgggcctaaatgatccttaatgggctattattatatgtacaagttcgtcaccttaataagctgttatatgttcaagttcaacaatttaatgggccttgatgagctttaatgggccgatatgagctacactatggaggtgatcggcggaataatgcgccggcaatgagaagagattataacggcggattgatcgccttttcgagatatttcagcttcttttctagcagaacatgttcaccggaatcatctatcaataaccagtttaggcttctctgcatcacttgtgataccctgacaacgacgcacaatttctctcagcttctcagacaatgcatcgacgaaagatcgatatcaggaatcaagactatccaagcccatatgctgaaatctggttttccggccgaaatttccggcagcaaactcgtcgacgcgagtttaaagtgtggcgatatcgattacgcacgacaggtgttcgatggaatgtctgagagacatattgtaacatggaactctttaattgcttatttaattaagcacagaagaagcaaggaagctgttgagatgtatagattgatgattacgaataatgttttgccagatgagtacacgttgtctagtgttttcaaggcgttttcagatttgagtcttgagaaggaagcacagagaagccacggacttgctgtgattttgggtttggaagtctcaaacgtgttcgttggaagtgctcttgtggatatgtatgtaaagtttggtaaaacgagggaggcgaagttagtattggaccgcgtggaggagaaagatgtagttttgatcacagctttgatcgttggttactcgcagaagggtgaagatactgaagctgtgaaggcatttcaaagtatgttggtggagaaagttcagcctaatgagtatacttacgctagtgtattgatttcttgtggaaacttaaaggatataggtaatggcaagttgattcatggacttatggtcaagtccggttttgagtctgcgcttgcttcacaaacttctcttcttaccatgtatttgaggtgcagtttggtcgatgattccttgcgggttttcaagtgtattgagtacccaaatcaggtgagttggacgtctcttatatcagggcttgtccaaaatggtagagaagagatggctctaatcgaatttagaaaaatgatgcgtgattcaatcaagcctaactcttttacattgtcaagtgctctcagggggtgctcgaatctcgcaatgtttgaagaaggtagacagattcatggtatagtgactaaatatggttttgatagagataagtatgccggatcagggctcattgatttatatgggaaatgtggatgctcagacatggcaagattggtttttgataccttgagtgaagttgatgttatatctttgaacacaatgatatacagttatgcacagaacggtttctgacgcgaagcacttgacttgtttgagagaatgataaatctgggactgcagccgaacgatgt

SEQ ID NO: 28797 - DNA, 1723 bp, Arabidopsis thaliana landsberg
atactttattaaaagatttataattcaaatcaattaaaaagttttctttcaaatgtttatttaattttatagattttccatattataaatattctaaacgttttttccgtgaaaatatttaataaactttaaatacctaaaatatttacctttaataaagtatatatatttttttggtaaggtttaatacagtataatattaataatgtcctaaaatttctctttttttaaataattagaattgatggagatatattagataaggaaatcctaataattaggaatattaattaattgataataataaaatgtcaatagcattgagttgtaaataagtctaactctaggatttatttgctaaaaatattgcaaaaatgtatatatagactagtgtgtcacactatgttacgtatgttcctttgctagaatcgagtgaatctttgaaagccagagaaaacgacatctgaattatgtaaggttgaaattactttttggatgcatgaagtaagatgccattgaagaatacttcaattatgtatataaacttactgtattgatgtatttctgtgatttaccattaaagaacaaaactaatgcaaccattacatgatgtatgtgtgttagcatcggttcctgtatattttatttgttgagaaatgtccagttcatatacatttagaggttcctcatgagaaagccttcgaaagtgattcccggtccgaaagctaagcccagaccccactcttctccctctgtgcctttcttctcaagctcatctctgactttgtccattatgtagaagatggtgttgctgcttacgttcccataatccatcaacgcccttctgctgcattccagcttttccggcttcagcttcagctttgtctccagcccgctcaggatggctggtccaccaggatgaactgcccagaaaaggtcattcaactccaacgcaccagagccagcctttgccactagcttcttgcagaactcctccacgttgtcttcgatcttctgagggaggtctcttcctagcttgaaggttatgccctcttctgacagccgcccgtcgatcaccccctgtgtttggggcaggaactgctgcatagcacagtgaagctccatgaaaggagattccgactctgtagggtctgctccgatgatcagggcagctgctccatctccaaagagtgcagccccgactaagtcgtaaggacgagctttgttgggtgggcggaaccccagaacggtagtctcagaggtggtgagcaacacacggctccctgggttgttctcagcaatgtctttggccacgcgcagcccactcaaacctccatagcatccaagaaaatacagcatcactctctgaacctcgttgctaaggcccagctgtgccgagaggtaaagatcacctccgggcaaacggaactcactggaggaaacgtagacaagatgagtgatatcttccactgcccttccccattccttgatgcaaaccaagctcgcttcatatgccatctgcacaaccgcatcgtttgcaatctcaagcctctgtttgatggttggggaaccctcggttgctagttcagggtatttgtgcagcgtctcccgtgacatgactgtgtagcgtgtcttgacagttgtgctcttgcctaacatcaccaagacacacaaacacgcttattcttgcacaagtgctcaaagaaaaaaagtgtcaaagaaa

SEQ ID NO: 28798 - DNA, 2589 bp, Arabidopsis thaliana landsberg
ttcaatgccagttattaatagttggtccaaacaacaaaatacgtgaaaactacctaacatataaaatttcaccaactaaagcgcaatcttaacgtccgttacaaaagtgggcttctacactttttgaagaaacaaattaacttgttattcaagaaattggtaaacaataaacaaacaaaaatgtaggagagaggacatcgcttaagatataatatcagaaatttttttgaaggagttcattacaagttcattggtgcttctgatgtgcaactttcccatgaaaaagaaggcagagaataaagtggagatacaaaagcaacttaaaggatgacttaaaggagagactagtcattaacaaaggaatggataaattaataagtagttggaaaaaagctcacaccaagttggtccacaaagacgatccaccgttatcagatttcccacatagatttaacatcaaattagatttgcatttatgttccccaatatttcaatcaattgttactttgtctgctttccatagcccttcttcatacatataccacctgatgattccttcatctttctccgtcgtctggcacatcacgcacgtcttgtactccatacaagtcacaaatgaaagttaacaagagttcacttttcattcaatgtgcacgcccggaaatatatgttttaatttttaagtttattatatcgaaaaggaaagggaacttttgtttgattacgcaatcaattttttagttttatgacatttttgggccaaatcttactttcttaacacaaagcacaagggaaaaagagttacaaatgttacattagcttattatgacgtttcccagtgacttctattcagcttttcggctttttatttacttgcgtatacaagtacaaagatcgttacagtaaaaaacaaaacaaaacagatcaatgtttttgttcagagatgtacgattagagagactttaaccgggacaaaccatagataaaaccaaaccggactctctaaccaggatgagattggaaagaattggaactagcacttgagccacggccagtgctgagtttaagagcctccaaagccttttgaatctccatgttcattgcactgtcaacacttcccgaagacagtttcctgtgagatttctggagatgaagcttcaaagaactgctgcttagacctgcgttctttccacaaaccggacacactttcattgtcggtttcctctgtctccactccattgacactttcccgtgacatttcttgtcgaggtttattaagatccgcgcaaatccatcattcggttgagctcgtctatgaactttcctcagtttgctccatgcttctaaaagtgtgagcttcctatttattgttcccaccagtaaacaaatgagaacaagtattgaaaatttccaacaaattttatttgtccccaacaacttacttttggagcattaggtaagcaagcactactgttgcgcttctactccgaccttcgaagcaatgaactaaaatcttgccaccagtttcttcgccatgcttgatgaaatcgagagcttcttgaaagatgctctcgatatttgagtcttcatcatcggttatctggtcaaagggaagacacaagaagaaaacgatcatctttatagatgcattttttttaaccaattctttttaagagacatataagacaggttcacttactgagaagttttggtactcgaagagatccgggtattgagtatccgattgcccaatttcattagcgcacaaacatagaacatgagttatacctaaatgctgaagagtgtaaatcgaccttgcagccaatcctcccccaataaaaagattttcttgtatcattgacggtttctctgtattagcagctttgcaaatcaatgatatcctctcaagaatatgctcaagtctaacctgttatcaaggagaatgcaaacaagagagagacaatgtttgagttcagttgccaaaaactatattatataatgaagatcacattcaggataaaaggaaataataaaacttcatgatacctttagctcgtaagcatctgtgcaactgttattatcactgccctcaaaaaaaccagtgttgaaaccgttctcttggcagagtttcatcacttcattccgcagtgtttcattccactggtctagttctttattagactcagcatcaacctggacgaaccatgaaaatattgagagtgaagaaagagaaaatggctgagaactacttccatccaagaagacaaccttttttttaataaaaaatctgaacctactttacaaattagaacatagtgatccaagctcgaagcgacaaacctttgcaaacttatggaagtcacggagctttgctgccaaacgctgactgctaagagattctccacttttaccagattttccgtgccaactttcacgtgacttaggcgaagacccgtcttctttgttttctgaatttggtgtcctaggaactgatttttgcatatctgactcactgtgatcagagctgttatcactaggcaaaagaacttttgagggagatggataatgattcacctcatgcccatgagt

SEQ ID NO: 28799 - DNA, 2610 bp, Arabidopsis thaliana landsberg
ataaccttcctcaccgaaccccatcttcctcttcctctcgaaccatctccttcttcctcttcctcttcttcttcaccatctccattcacaagaactataaacagaacacaaaccaaagccaaaaccaaaccatcaagccctaaccatggcctatcaccaacactctttgacttcgaaaaattctgctctttccttatatacttaaccgcagacatggcaaaagctaagccttgtgacaactgaatccctctaacaaccgataaagggattatattgaacacaagctgcatcaaaccagagatccccaacacgaacaagatccctccggtacatattccggcagccataatctccggtataccgaaatcttccgcggtagacgaaatcgccacggctgctatcgatttcatcggttgaaccggcatggggacaccgtaaactgctccggttatcgcgttgtatatgccggtgaatgtcagtgttgtgcctaaatccaaatccttggctagagttaaagcgaggacgattggtatgtaagtaccaagatcacccattgcaccgtttatttcggctagcttcgaccggaaaagaagattcgttttcagtttatggaacattccggtgaacctagaacgtttcggggtttcgtgttgacctctctgagactgagactccattgtttctgttttgtggtttgtatcgaaataaagcaaaaccttgatggcgacagtatctgattctttattgtgtgttagaaaaaatttgccttaaacttatcaaaattatcctttatcgtcaactaatttatttatcgtcaactaattttttgtacttagttgtacgaattaggatttatttatcgtcaactaatttttgtacgaatttaatactggcacatatttttattatatcttcagttaaacagctaacacctgaatttgtagatgatttatataaatctaagcaacttaaattattcatttatggaaagatatttatataaatcaaaagtcaacacttatatacaaataagagctgtctatttattatttgagttttgaatcggcaatagaaaagtcgccatcaaataaataaataaattcattttgatatttattctgttttacggagttgttttcaagttttttttttgttttaaaataataaggtttgtactttgcacaattagttaaatttgtaatattaagtatcatttcctatgtctattgtttcattttattagttagaaaataattattattttatacaaaacccattaagcatatgatagaaatttagttttattaatttttgtgatactttggtgaaacagaggaagtaatattaacaaacaaagctttatatttcacagatgtttccggtagtcttgaacattcgggtttcacgaattattttatattgagtaattcaaattttgagattttgggttgagagtttaagattcgtttttactttataggaaccgaatgaatttcggatagaatcagttaggcatccaataagccttttataaatgtgaaaatcctctaaaaaagatgagatgaatcagcatcaaagttgaaatatttttaaaattctcaagtatagatgttgagatcgattgatcctagagatgatggtcgatctcttttctagtttgctcgatagatctatctatctttagtggaagtatccatatcttttgacccactaaaggaatgactttaaaccacttggaaatcaaagctaactaatgtggctttcttgtgtccaaaattcaactaatttggtgtttgaatatttcctgcatttgttatgaaactgatgacgcttcaaaaatgtccaattgctatggaagctcaatttgcactattttcgtttttttttacactaataacctgaaacaaactttagaaactttagaaactatgaatagtttacctattaattatgatgttatgcaaaaacaaaagcctttatcactattttcccaattttatcttctatctccaaaatatgcaaatcaatatatatactttgaagtaaaaaagtaacatagaatatagccgcatacgtatcttgtaaactttttatgctcacatacattagaattttaaaattctaaaagtagagtacaactcttgttgcaaggaattcgattttctatagtatttatcaaacatttacatgcatcaaatttttatatagtagtattgacatgcatcatatataaacgcataaatagtctttaacaaagtttcagcaattacggaaaatgtttccacgcataaaacggaaaagcatttagttttactttaaagattaaaagattagtgtaccaattgtttttgatataactggattgaaatagctaaaagaatgcatcaaattagtataaggaagagaattggtaagctcgactgcattatcttgtgacttgtggttttggacgttgagtctggactcaacactttggaggcatttacttgtcagttctcactaatattctcctcgtacaaatctgttattcttttttttttcttttcttttttttttcccgttttgtgcttgtagtaaatacacacgatattttttgtttgaaatttattt

SEQ ID NO: 28800 - DNA, 2118 bp, Arabidopsis thaliana landsberg
  unsure (1)..(2118): unsure at all n locations
aaaatcgagtttattcataccggttgcgatgatgcaatcctggatgacaacgttggatgaagcccctacgtcgattccatcggtgttaggacttgattcaggtgcatttattcgtaggcttgagatggtcacatagttgcactcgcttatgtgaatgtgagccattggactatctaaatgcgttaacccactcaatctaaggttgttgcagctcctgaacttcaatgcctaatctcataaatcataattatcttgtttttaatttagctaaaactgcatacaaaacgaatcaatgttttgggaaaacaaacagctaacgtgatactcacggtaggtctagagcctttgtgttcccacagctcgaaccctggccgttaatttcacgtcaccttcaatcacaagtccttcaatgtctgtaaaaagaatccattgatctttgtcccctttccaatttcctttactcggtgcaaccaggcttgcctaacatcttcaattaaattacaaactagtaattacttactttaaaatattcgtcattaatatccaaggaaaaaaaaaacaggggaaaaacagagtacctgaacaaaaacaggggtggatttgcaagacccttgaaacttcaggggctgtannnnnnnnnnnnnnnnnnnnnnnnngacaaactgcccatctcctgttccgctacacacagcttcccaagctttcaagaacgccttttgtttttttaattccaggaaaaaactttgatattttaggaactttttcggattataatggacaaatgacaactacagaacttagtttttacctgtgaatcgtctgtaactccatctccaaccgctccgaattgagtaacatccaatgcattcgaagatgtgaagatttgaagaaagaacagtgagaaattcaagaaccaagtcttcttcttcatatattttgaagaaaaagcgttaaaatcatgaatgaatatgtttacgactaaagaaaaaatgttgttgaagcgaaggctttactacactagctactatattatactacttacataagatacatatgtacatagaaaagaagatgctaaaggactttaccatgttcagcggatatttgtgggacaggggaagacaatgtgaagaaaatggatatacgaatatacaatttcttaacaaaataatgatgtagtaactatcaaatctcatatttattaccagtgcccatgaggcgtcagagtgggcactgtattaattaaaaataaaaaaaggttctcctaaaagtacgtagcattgtattatctgttacaatattaaataaatgtgtcttcatgttttttggttccattttttaaagatgttttttggttccattttttaaagatgttttttggttccatttcccttaacttcgtttgattttcaaggaaatgtcaaatatctgcaattatataacataggtaaaaaaagagaggttataatcagctgtacattaaacacatagtgtatatgccgcgatttatatgatagtctccgtccactcaacaaaaacttaaatctacaaaataatctgaattgatattttgaatgcatattaaaaaggtgttatttgagatatcatttttgaatcctacttgagagaagtggtccacggatttgattacatgatactcgagtgtgacatgttcaatcctagcaaaaagatatcatgctaaatttgtcttcttttgacaaaagtttactggttttcagtcctagaaacttgtaaattatgtaagcgagtgacaaagtttattggttttcagacctagagagcagtgaatgacaaagtttattggtttgcagacctagaacttgtgaacgggcagcgaataaagtagctcatatcattacgctttcccgattctagttccttggttttatatgacgacggttatctgttgtgattgataaaccggatcgtataactaattagtaattcctttagtttgaagaagatgttgagccaaaaaacatttatataatctatccgaagaaacttgtgtttgcttcttaggccatcttcaacgaataaaattaggtggattatctcaaaatattgttttttaattagtatcatataatataatta

SEQ ID NO: 28801 - DNA, 660 bp, Arabidopsis thaliana landsberg
  unsure (1)..(660): unsure at all n locations
tgacctcgaagccttacgtgacttcatagcacatctcgaaccaaaaccagattgttggttcaattcttcttcttctacagattgctgcgactggaccggaatcacctgcaattcaaacaacaccggaagagttattagattggagcttgggaacaaaaagctgtcggggaagttgtctgaatctcttgggaagctagatgagattagggttcttaatctctctcggaacttcatcaaagattctatccctctttcgattttcaacttgaagaatctacaaactcttgatttgagctctaatgatctctccggcggaatcccaacaagcataaatcttccaccgttgcaaattcttgatctttcttccaatggattcaatgggtcgcttccgtctcatatctgccataactctactcaaattagggttgtgaaacttgcggtgaactacttcgccggaaatttcacttctgggtttgggaaatgtgttttgctcgagcatcttgatctaggtatgaacaatcttactggtaatatccctgaggatttgtttcatctcaaaagtttgagtcttttagtgattcaagagaatcgtctctctggatcngtgagtcgngngattaggaacctctcgagtcttgttcgtcttgattttcttggaat

SEQ ID NO: 28802 - DNA, 1479 bp, Arabidopsis thaliana landsberg
ctctgttgctttagttcctcttaccgtatgtttccttaagaaacctttctatgtcttccattgcctttatatgctatggaatattcactgttcaaatgtcacacaggttggcgcttcagcggcctatttagagacgggtttgttcttagctagacgttatgttactctattgctctcatcaattcttatcattacttggctcaacctaaggtgattaattgattgattccttttaacattttcgttgaatgtatgtactctttcatgtatttactctttccaaacatggttttatggcagcaatgatgtttatgattttgataccggagctgataagaacaaaatggaatcagtagtaaatctggttggaaggtaaagtattatcaaaggatagagtttgcaactttgaagtttatgtttttgagttccatcctaataaactgtgttttacttggaaaagccggacaggaaccttagccgctgcaatcacatcgctagcgcttggtgtttctggtctagtttggacatcgttaaatgcaagtaatatccgtgcaatactattgctagcctcagcaatactctgtggctacgtataccaggtgaacgttacttcctagatgacaatttgatactaatctaggagattctaacttagagtaatactttgtgactagtgtccgccatttcggttaagttaccaaggattaggagagcctctatgctttgcagcatttggtccatttgctactactgctttttatctacttcttggtagctcaaggtaatatcaaaattttgttttaagcctaatccattcgtgtttccatgaggtgttaataatggaagcttgttaatcggttttggcagcgagatgaggcatcttccgctaagcggtagggtcctttcatcatctgtccttgttggttttactacatctcttatccttttctgcagccactttcatcaggttggttaatgaaaaagtggtctaatgagtcctgaaatgacaaacacagtactgactacatttacattctataggtggatggagatttagctgtgggaaaatattcacctctggtacaaatgtgaaaaactcaacaaggtttaatatgaatatggtgattgtgtttatgattagagccgttttttttttgttcacacaggttcggttagggactgaaaaaggagcttttgttgtgagatggactattcgtttactatattcaatgcttcttgttcttggtttaaccaggattttgccactaccttgcacagtaagttaacagatttgagaacatgactgaaatataagaacatataattcaaacctcctttttgttgttggtgtttcagttgatgtgcttcctgacattaccagttgggaatttggtttcaagctacgttgaaaagcaccataaggtaagaaatttagaattgaaatttgtaatactcaaagttttgctaatctagtctttt

SEQ ID NO: 28803 - DNA, 775 bp, Arabidopsis thaliana landsberg
caaaacacatgtatagtactgtagtctcagtgtctacactaaactttgcttctactgtttctattgataaggctggcgggtaaatctccacagagacaaatgatacgtaggttcagctaagaaaaaccaaattcgaggagacgaagaaaataaataagatacacaaatgaatctatactgcactggcatgactgagaatcatgctaccaagatatatgcgtccttcagattatatgcttaccagctcaatgtcgttgttgagggcttcttttctcagcatctcagtttcctcaagaggaacatcgggaaccacaagtccctgtacaccaacagctctgatgctggacatgaacttccccaacccacgtttaagaatcgggttgtaatacgtgaacaacgaaatcggacaagatatttgtggaacaacctgcaccaagtccaacaataagaacacacatataggaacgatatctgacaggggacacaaacacacatctttccttcagaaactaaactcaccttatccaacatctcaaggatgctatcgaggtttgttcccctctccaacgaccttgttgccgcagcctagttgaatagatatcaaagagcaagatgatctagcaaaaaaaaaggcaagggaagcatatataaaggttgcattttgatagttggtttaaacatgaataacaggtccatcagctaaagggtcagagtaaggaacacccaattctattatgtcagagccacaagcatcaagaactttcaatgcttcagc

SEQ ID NO: 28804 - DNA, 349 bp, Arabidopsis thaliana landsberg
agctgtgatatatggtatgaatgctaccttcacacataaaagttaaacaaattgcaaatgaactgtaaattacaaaatccaatcgtatcagtaagaccaagattgcaaacctaatcaaactcaatgctaactcaatctgataagaagaattcataagcaataacaacacatggttttgtgattctttcaaatccaaatttcccaccagaactaacgataagttttaaaagtccaattcttgaggaacggattggaatatgaaagacggagaattaacgtactttgccttgttttttgagctgtgtgaaagtatcagcgagaccttgagtatgagaagaggtggagagag

SEQ ID NO: 28805 - DNA, 1849 bp, Arabidopsis thaliana landsberg
acttcaatatgtattacgctaattatttgtattttaatttgaacaaataaaatatctagcatccacaccatcacaaccttgttctaataattaccagtatagtctatgcaaatttcattatgatttgtttacaacttttgttttcaattctatcactttattgcggtttcgttaacaattttaataaataatcaagctaaactagctaagaaacttctataccactccacttgctctgtctagttataattgtgtccgacccatttccaatgtttatctatttatatacttctcaagtctcaaccgttggtggtgtcataccattcacatacatgatccaaccatgcatatactaacaatttccctaaagcattgttaatattatgctattaatctactactgaatcgacccctttttcctatttatttatttaatggaatccttcaacgtacagtagtttttaggaatatggatttaaaccttagatctcgtaatcgtttaaaaaaatggagcagaaaagaagctggatcagatctgtaggtactcattatatttattaaaattgaccaaattttcgtcgatacatgaactatatactacatacgatgtgaaaggttggacttaggtatgggtaagagttaatgaaatgttcacataaggtgaagagtatttgttgtctgggtgtgaagctttaggaacatttacaagttagatgtttaattgttagctgagttttgtgacatttgtagggtccattttgtcccaaccacatatgatttttgtaagagatatatggaaggtgccattttttgcaagtagttcattaaatatttaggaatttgtatgttgtgtgatcgattgattgacatactgtgcagattctccgtttcatccaaaattttgttgcctatgcagattaatatgtagtttactgtttgatactatgatgtttgatcggtccgatttggtctacaatttcttactccaccatatataacatttctatttagaaggcttatattttagtattttacattaatcaacttctatatctataattgctttggactatgaaccatgttaaatagtctcttcttcatcgccagtattcgaacatgaaaacttcccaaccctcacattttgagtggtcgagtgatatactatatgaagaaagtttgtaaatgttaaattgttaacttcaaagctaagatcatttacatccatttcgaaaatcatattttagatttactttttacttttgtactttataggcatcttacaatttacaaatatatactcatttacttataagacattgaaataagacgtgatatatttatttaaatcccttgtagactatcccaaaccaagtttaaaagatttatcaaacgtattatttgcacgacaaatgataaggtcaaacaccttggactacacgtgatgttccttatatatttgacatatatgtcgacaaaatttatggcaatagccttgaatttgaagtgtcgttacaaaaagtcattatcgtagacaatttttggtccgtttgtgtggcttttagactctatcgaccgttggtatgtccccactcaatcacaacaatcgatcggtccatttggtccaacagctttggtttggttcaatgtcttcgtaacaaaaatgtcaaaatctcttgttgtcatgggttggttttcgtaattggtcggtttacttgttgggtgatgatgttaagaaaaattaggacgcttacgcttgttttataatccttgtacgctcaataattgaaaagaaaccataaaataataaatataatattcttatttcaataataccactaacgaaatcaag

SEQ ID NO: 28806 - DNA, 1929 bp, Arabidopsis thaliana landsberg
  unsure (1)..(1929): unsure at all n locations
ccccaagcatagaatctctccctctctatctatctctctttcaccttttcttgattcttactcagagaaaagttctgcagggtatatcgccatgatccacaccgacatcgcagagatcttatgcgtcaaacccaagacaacgaagaagacaaaaagaatggaggaagatgtcaagaagacgacgacgatgaagatagaaggaaaagttgttgtgatgaagaagaatctccttgatttcaaagacgttatggcttctcttcttgatcgtgtcaatgagcttcttggtcgtcgtgtctctctccacctcatcagctctcaccaacccgacccgggtaacccattctttctttaacccgacccgttatcaaatccatcttaaagttcttgattactctgtttttcttaaatcattctttggttaatagtcactatactaagattcattgttgttataaaccatgatgttgtgacaaacacattttatactttatccaaatcaaaatctgagtgttttaaactaaaataatatttttgtgtacatatgtatcagccaatgagaagagaggaagacttggaaaagcagcacatctggaaaaatgggtaacaaaaataaaaacgtcagtaaccgctgaggaaactgcgtttggagtaacgtttgattgggacgagtcaatgggaccaccggctgcatttgtgatcaagaaccaccaccatagtcaattctaccttaagtccctcaccctgcgcggcttccctgatggcgaaggtggtgccactgcgatacatttcatctgcaattcttggatttacccgaatcatcgataccgctccgaccgcgttttcttctctaacaaggtaacgatttgagacaaagtgggtaatagtaatataataatactactaattttatggtttttatattggacttggaatttcatatattattttctaactaatcnnnnnnnnnnnnnnnnnnnnnnnnnnnnaacgttatcataaatattcttaaaccataggtctttcttaatctttgtgtatccatgtatttatttattatctagataggtagagccgtagagggaatgaactaatacatttaagaggatactgattagtttgttacataggaattatctcctaatccgtatgacctaaatctttagaattatttatttgatttaatagatagttttggaatattcgtgtacgtgtgtaaaacatataattgtaccaaagaatgaaaccggagtctatctttacaagtcaccctcttcctttattccaataattttctaatctaatagaatctttttataacttgataacgacaaccattttaagttattgatattatattgttctgtttcatctttctttctctctttttttttttttagttattgttgatacaaccttgatttcctaacacaataaagtagatggggctggctctggctctactattgagtcaaaagttaaaaaagcatatattggttggacatttaattttatatttctttagtagttaacctaaatttaacccatggattaatgtatacacacggtgaagttatagttttactgattttattatttttccttaaggcatatcttccaagtgaaacaccggagctaatcaaagagctaagagaagaagagctaaagaatctaagaggcaatgagaaaggaggagaattcaaagaatgggacagagtttacgactacgcttattacaacgacttgggtgctcctgacaagggtcctgactcagttcgtccggttcttggcggttcacctgagctgccttatcctcgccgtggcaaaaccggccgtaaatccaccaaatcaggtagtcaactcaacatttcaaaattacataccacatagcaaatcttgatagttacttgttctaaacggcaccgtttttta

SEQ ID NO: 28807 - DNA, 2608 bp, Arabidopsis thaliana landsberg
gcttaggcgctcccgatgagaaatttgaacaagaaagggaagggaaggctttgaaattcacatataaagtttcaaggagaaaaagtaaaaaaagtctttttactgcaggtgtgttctagtctctcacttctctgtctaaataaacctatttgcaatgcatatccaagtaggagaaaacggaattactaaaaacttcaattcctttattcaaagcacacctagaaatgcagatgaagacatgcctaaacttaggaaaacatcagttatagtccagttatccagttaaagaaataagacttcatctcaactagctgatacacttattatataaagtatattgaaaaatcataatttgacttactagtgtatttggtggtcactctgtcttgtgtttgtcaactttaaatttctgttccatgacagttttttggtcttgataaactttgggagtaactactgcctgtttctgttaatctaagacgagctcgctactgagctttgaaataaaccaaatccttaatggattatgatttcattcttcctgaagaatcttcttagcgatggcaaactatagaagctcctttgtgattgtttggaattcaactcatgacattcatttgaactaataattgtagccattctttgcgtgtattcatggtagtgttgccatgtttcattttttactatttatatcgtcccttcaacttctttttctttttaaatgctttctgcagatgaagacacagcatgtgatgctctccatacgctggcagatctatcgctgatgatgcctgaaactgccactgatactggtgggatcatatgtttgacctataatcaatacacatttataattttgaacgagtgtcttaagcttgttaatgttattggccatagcatataattacactgatatggaattaagttcagagtctgatttactttcatgaaaattcatattggttatctactttctcaatctaatcttgatttaatttcagagtcatcagttcaagctgaggaaaagaaagctggagaagcttatgtttcagattttaaagggactgatccggcatccatgtctaaaagtagttctcttagaaactccaaacagagaagatacggcagcaatgacctttgtaaccctgaactcgagagaaaaagtccaagtagttctttaatccaaaagagacggcagaaagcattaccagctaaagtaagagaaaatgtatatatttagcaaagacagacttgccattactgttctgttgtcagaattcatgatcatgttgaagctgttctcttcctgcaggttcttaaagatgagcttgctgcaagctcacaagtcatagagccttgtaatagcaaggtatgtgtcttcttgtacaatacaactcgtgtgatttatacagtattccacacagtacccatcggcgttctctttggaatgtattatatcattggcaaccaaattatttgattatttccctttttttcatcgaagatttccttttgtagcttttatcttaggactgattatgatgttgtagggaataggtgaggaatataagcctgttgggagaggtaaacggtccgcaagtattcgaaactcacatgaaaagaaatctgccaaatctcatgatcatacttcgtcaagtaacaacatagtagaagaagatgagtcagctccatcaaatgcagtcattaaaaaacaagttaacttgccaactaaagttaggagcagaagaaagatagtaactgagaaacctctaactattgatgacgggaaaatttctgagactatagtgagtgaactttctgatactcagactttattcccaaatgataaagaaaccgcagtgatacatctttcaatcttaagatctttaatttctatggaatttagtctgtgagttccctgattatatttataccatatcctattattctgcaggagaagttttcgcattgcatttctagtttccgagcacggagatggtgtatttttgagtggttctacagtgcaattgactatccatggtttgccagacaagagtttgttgagtatttggatcatgtagggttgggtcatgttcctagattaactcgcgttgaatggggtgtcataaggaggttatcactaactaaaatgctgttaattttctacttttcttcgtgtgtatatggatgttcccttaatcatactttgttggtgcagttctcttgggaaaccaaggcgattttctgaacagtttctgaaggaggaaaaagaaaagctatacctatacagggactctgtaagaaaacattatgatgaactaaacacgggcatgagggaaggacttccaatggatttggcccggcctctaaatgtttcacagagagtcatttgcctgcatccaaagtcaagagagattcatgacggcaatgtcctaactgttgatcactgtaggtaccggattcagtttgacaaccctgaattaggggtagaatttgttaaggtactcttccttacactcaaacgttttctgaccaattcctgtgactattgaaaacgaaagtaaaaaaaagaaaaactaatcgtagcagttcactgcacatttgtgaa

SEQ ID NO: 28808 - DNA, 1686 bp, Arabidopsis thaliana landsberg
gcttaataaataagtttccccattgtaataacaatgtagggttttttttttaataatattgttgccaataaattttagactgaaatttgaaatatatagcccaaatcaaaattcacattgaagtttatttttggattttttgttttgattatttcttgatagttacataaaccggttttcaaacccgaacatgttcaattaaaattgagagaagtttccgacatttttagtcttatcctcaaggagtgacacggtgaagctagatgtcccaacaaggagtcaacaaaaacacttaccttaaacacggcaaatcagattttttatatccttacaaatgcattatgttaaatttatacttaaattcgaataatgagaaatctgaatttcatacttacacttcatgttttgtgcataatcatgcatatgctctaactctgttattgtaccgtaatatcttgactatgtgaaattcatgtgtgcacctacgtgaatttgttttatgcaagtttgtggagaaatcggccttttcgtagctaaagactataatattgtgctaaaacataccttatgtagtcaaaaactataatttaacatgaaatacatgtatgaaattcaaaattctcattacagagctatgttgtaacataatgcaatgcgatatgatatgaaaaacatttgggatttgttcttcttatttttctaattattattttggtttgctttctatagttgttgtagtatagtagttttctcattttcatccaaaaggataatcatgtcatatgcattgtacagaaaagcaaaaataccttgctaaatatatacatatgcaaccataccttaacacaaaatatattttcaaccaaacctttgattattaattacttttataaattacaaaaaaccttggattattagaaatactttaccaaatccatggtgaactttaacattcttaagaaacaaacgacccacgtatatttatgtattatacatgcctaatcaaggcaatcctcccatgagagtagtggatgacaatttcgtatattcaacatccctcagcgagtcttgtccttgcaggctcttacattggaaataagcaacggtgtaagtcacaagctgaaacatcctcaccacaaagaccgaactcataaggaccaaaccggtggttaaggtaaccgagaatgaactactccaatcgaccagccgcaagatttgaactaatccaaatgacaataacccaaagaaaagattcaagaggaatagttttggcttcatccctttaacaatctttgcagctttccccaaagcttggatcccataagtatcctcgagtatcgatatgaccatagataagttccaaacgatagctaagtaagactcaaagactgcaaatacaatgaataaagcgcgagatttggctgccaaggaatcgagttttgtagagaagaaaacgatagaaaataggactataaagaataggaaccaatagccaagactgaagagaacaatatagaaattggtcacaagaggtcccttccaatatttaagcgtcagaatcggaaaatctttgatctcgaagctatcatctttatgagtaagagccgatgcatgaaccatgacaagagtggataaaaggttgatgatggaggagacggcgatgaagatgtataaagaattgacaaa

SEQ ID NO: 28809 - DNA, 1985 bp, Arabidopsis thaliana landsberg
caaaattttcaccatattctacagttcggcggataacatgagcagcagtgtccacttcctctttatctctgacagagtcactgttcttcagtatatccgcagggttcatatatttttcttcaagctcataatcttttgccttcccatgaataagattctgaacttcttgagccatgaagtcttcttcttcttcttcttctccatcttcagctatgtaaccatcaccgtcactatcacttccatattcattgagttcgagctgatcaaatagctcatcaatttgacgaggaactctcgggttttcagccacaggttcatcactttctctttctctaacctcacgtcttacagaaaactcgagctctccattgctcacaccagaagattcacccttttgagtaagattagcttgaacaacaaaatcttcttccaaatcctcaacatcagaaccaaactcagacccatcactgttttcaagcaacgcagcaacttcaggatcaatagctttctgcaccttgacgttaacagtcttggacgcaacactatacatcaacttattatcattaccttcttcattcaccataccagagatcttaacacgagacgcatcataagccttaacatcacgaggtaactgagcaacctcatacttaggattcacatagaaattagaaccaccaccagtattcttaatctctctcaaatgctccaagtaattataaccatcatcaggataccctaactctaaaatctccttcctcacatgagcaggtaaagaactactcgaatccccaaaactagagtaaccataatccatctcttcaggagcatcatcaaaccgtgagctgtctccttcttcttcttcatcttcttcaatgaaaccattgatgttaacagggttttgatcaactcgtaagaagatcttatcaccacctggtgcatcactgtatcttgggtctgacgtatcacgaggacacaactcgaaagtcgccgcctttttcttatcaataaacttcttcttccccattacttactaattcacaccttcttaagggttttgcaaactgtaaaacaattacgaagatataagatgtctaacttctaagtcacagcaatcaactagactatgtttcaatcctgactaataaaatgtaaatttttatcatcaatcaacacgaaaacatcgaaaagggagaaactttaagtctagaaacgattcaaaaacactaatttaatgaaattgaagaagcttacctgaagagtttgagagagagaggcggagaacaatgcagatgaagaacaaaaacgctgttgaagatttttagttttagggtagagccacccaaaacgcatcattttagggtttaaccaaaacgctgcgtttttgtgttaagcaagccaaaacgcgtcgtttttggcaacaagtcaaattaaatatttgttttatttccataactcagtgtatgccactaaaagaaataatccaccgcgggagagtgcaccgaatggttacatgcacctaatcttcttcttctcctactttcttcgacggtacctgttgttattgtgcgccatcttgatcttacgtgcgccgttggcgcattctcttataccaccattaacgtgcgtcaacaccggaaccgttgaatcagacgttactggtatcaggttcgatcgttgcctcgataccgattctctcgccgagatctctctttccaccgtcatgtcgaaagctcgtgtttataccgatgttaacgtgatccgacctaaggattattgggattacgaatctctcaatgttcagtgggggtaagatcgtatttttcgaaaattatgaaaaccctaggaagctaatcagttaaaaaaattggatcttgtaatgtagaaattgagctttttgtctagctggcgatgttcttggtttttaatctggctttgaggagagtttgttggttattatgattatgaccatgatgggtgatgat

SEQ ID NO: 28810 - DNA, 1630 bp, Arabidopsis thaliana landsberg
  unsure (1)..(1630): unsure at all n locations
gtcccacgttactctcatctatcggggtgtcttctgggaacacataaaagctgctgtcttcggtgcttgctgtaatcccacgtacagccacaccaggaggaaatggtgttggatccgatgaacctttcctgaaccccattaaatcctcaccttcatttaaacgaaccattttcccaattataacaacaataaaaacctcatttcaggattctatttttagaaaagtctagagtcaagggctcttacttgaatcaataacatcatttccacttgatgttgatgagccatacaagtttcttctttctgcagcacggtcccggtatgatgtctgaggctgttctctatgagtaggccctgcagtcggtgtttcagagaaccttcttctcccactcccagaaactgaaaccgaagctggagaagcagaaggtaatattggcggcatttgtacactagctgaagaagaagctccacccaaagttcctccaaaagaacctctcatcacccccatcaaagttcctcctgttgtactgctgctcgagctttctgcagttgtcagggcagaaactccatgattggaggtacttctctccttcgcaataattacatcagatttcagtttgcccatggattgtccagtggagaaagacgaccttgcttcagccgaaactgtaggtggattgtcaccaagtgagggtgagggacgttgtatttgggtttcatggctccgctgcttccacattgttagaacgttactcatttttttcttgctggcgagtaggctagtctttgatgcaagttttatctctttcactctctctttctctctcttctannnnnnnnnnnnnnnnnnnnnnnnngcctgaaccgcatctggtaaggacagaactttttctacattaggggtagtagccgccgagataataaccttttgttgactggatttctccttcttggcagagtctggttggttttctgttactttactctcattgttctgatcaggacaaggaacatattgttgtgtttgctggtcatacgagtaccaaagcccactattgctgtcataatagagacctgtatatttagaaacatacgattaatagagaatattacccacttcttataccagtgaaaccaagtttcccatcaccacacaccaagaagaggtgcctagtgataaccaagatcattaaaacagtctatcattgtgccatatcagatgcgaaattttaaggcacatacacatatataagaaggcataactcagcaataactaaaagaaaaaacttccattggaagtccaacagcagccataatagtatcatataacacttgctgaatccctacagccattatttaaaagtctaattaagacatacacttgtatgattgattgattgtatctcgatgtttgctagtttggtgcatacatagtataagaattccacaatcataaaaaagaacaggatagtttgaacaaaccagagctgacgacttatttttgccaagaagttatcctataatagaatacatctatagcaggactatacaaccagccaacaggatcaatcttacttttgcccattacatgttttgcaatgccagatatggaaattagagctgcagctac

SEQ ID NO: 28811 - DNA, 1691 bp, Arabidopsis thaliana landsberg
ttgtcctttgttttctcgacggtgagaaaatattaagacaaagagatttatattcatttttaataaccaatgatgtccacgtgagagtgtatctgaaccaatcatatgacgacaccttaatgttattttattttgtcttatttcttcatgaggtaaactaaaaaatattggagatatcgaaagaaaaaacacactctgatctcactgaattgatctatttattacacgatttgagacattgtgatacgattaactcttgtcacatcagaacgctaagaaatggatttaaacagtatttagtttcatagcttatagttttgtgtttgcggagaaaaaaaacaaagctaagaatgcagagaaagagactacaaaacagtaattagtttctctttgaggaagagggaagataagagattgatatttattcatcatccttgtaaggatattcctcagcgacttgtttcagtagctttactttgcactcataagcatcatctcctcgaagacatcacgcgttcatgtcacttctgtcttcattgagacctgatcattgtgcagacaaaaaataagaacataaaacactgagcacaaacaagttctgcacttgataatggagaaggagactgaccatttccaaagctcctctaatgactccacttaagacattgcagtagtaaagaccttggcaagtatcgggaagctcgacgaaatcaactaggggattgtcctctaagattatactgcagcaagtcccgtccgagtcccagcttgtcactgatgcagtgactcctaagaacatcttgaaacccacctgtgcaataaggcaaagccctgttactgctttctcaataccatgaaaccaaaggagtgatatctactagacattaagaagcttatgctctagtttgatatataaggttttatctatagtgtcaagtggaataaacattcatatatcttgcagtttaattcctcgttgtttttactcccggagacacttcaaactgtaacgtcgtgatactaaacaagtcactggaaattacaaaccttggcaatcatttcagcagtttccttaaagtcaacgcatctggaaacaccagatttggctagaaactcatcgataagtcggattccaatgttgtatcccctgcaaaataaacagaaaattagtgataaaggtctaaacaatcgaacactcatcagtatgaacctgagagtacaatgctttattcatcccatccatgacatattattagaaagatatatgaacaaaagaaccagaaacataatgcaaccaaaattcaaacacaagaatgaaatatacaaatgcaagatgacaaaaatacaaaactaaaaccatggaagagagtctacataaatcgtagaagaagaatacatttgatcaagctgtttgttaacttcctctacttcttccaggtcagtaagcaattgacgcacaatagcaccatacgtcaaagtgaacaactccgcattctacaaatcatcaatttccacaagatcaaacagtatctccataacaaaattctatcaaagattcggaactggcttcaagtttgacttctcaaatcctttacaaattacaaaaacacatccaaccgcaataaagcatacatagaaaaaggcatatcctaagaaatagataagcaaatcggtaatgtagcatatcaaaa

SEQ ID NO: 28812 - DNA, 1807 bp, Arabidopsis thaliana landsberg
tgatgataggtctcttttgaaccatattttaatcgcatcagtaacttaacaatatgtgaaacagtgtagatatgtcatgaagcatcttagttaaaaatcaaaaagaaaaaacattgaggcaaacttaacacatgaaatgaaatggatatgaaatgctacagaatagtcaaagagggaagtaacaaccagcaacattggataagataatcttatttggtatgagaaagtcaatatcttgaaggagagggaaccatttttaggacagaagatgattaataaggaatagaaggtaagagcaaaaatatgaatcttttatgcttgagcttcagacctccatttaatttacatagattttccatcatgctcttactaaggcgtacacacagtatacgtttggaagccaaggaaaagcacaaaagtacactggcaaactgaactactaaattaattaatcgaactactcaagaagaatgtgtatcgtaccagattcaatgagttcgacacgactctttcttgcagcatcactattgatatccatatgattccctatgcagatctcttctagttcacactgactcttaaacaccaattccttcattatgctggacttcagggaagtcagtcttctcacttcatcttcggcctacggccaaaagattagacttaagaacacaacagatgatgactgagacatattatggtaggtgataatgctaggtatccaaaataaaaacatgatgaaatacctctcggataatgtctaggctgaggcatccttttttcaaggcatcatcaggtagactagaaagtaagctgctgcaatggtcaaatcttctcctctcatccataggtgtttccattaggttccacagctcttgcatgcttcttcccaaaccttgtagctgaaataaaagaatcaagggatcaatccgtcaagctaaggtttgctttcttggagttgatgaattcatttccgtgagaaatagtgccaggttaaatagtaggctaccaataaaaactgcattttctaattgaatgctactgtgctcattgctcaagtgcagtggtaactggtaagacatgagaaaccacataatatatgtatatatacacttcagaagtgttatttttttatcaccttaagcagcctctcatgtttctccgccttcagagactttacaagttctgtgaacctagcaagagtatcattactaatgcttttcgaatgagtctttgaaaactcagtcaagctgctatggacactattcagggccttggagaaatcaaaagacagaatctctgacagctcatggacagcactgatataagagtttactttctgcagtcgaacagcctgaaattgaaataaagatgataagcaaataactacaaacattttaaaacaatcacttcgacgtgtgtgtgtgtgtaagaacaccttttcatttcgaagatcctgcagatctgctctaagttcatccaactttctttgtgtcaagtcactttcatcaacttctgaaccagaactaacagtataatcattccctgctatgttagacgtgatctctgctatttgattcagtgtctcagagagctctttccttcttcgatcctttttcatcagtagatcttccagtacaggctttacactggaaatctgctccttcaaagagccttctttcttctcaaacaaaaacaataacatatatcagacattatataatactctctatgagacaaacatgtagtattgctaagagtatcttaccttgggaaacgaaactttttcaccaagcgcagacatgag

SEQ ID NO: 28813 - DNA, 1647 bp, Arabidopsis thaliana landsberg
tgtgaatttttagattactctctctatattacggaattatgagggcatattactctctagtctgaactcactgattaaatgtgctagctgttacgtgtcaatggagttctcacccattgtgactttgttgggaatcctgatgatcagtgtgtacttaacttgtttcattttatgcagaatgattgacttctctactttatctcctgcggagatcacggtgatgggatccgtgttctgtgttttgctctcgatgcacttcactatgcagtttgtatccaagcatctgttttactggaagaaccctaatgaacagagagccattcttattattgtgcttatggctcctgtttacgctatcaactcttttgtgggcttgttagatgctaaaggaagcaaacctttcttcatgtttttagacgccgttaaggaatgctatgaggcacttgtaggttccttcgagattctctcatgtctcattttccctacattaactctctctgtgtgtggataattcctgatttgttgtgtttgcctctgtttgtttcaggtcattgctaaattcttggcgttgatgtatagttatgtaaacatatcgatgagtgcacggattatcccagatgaattcaaagggcgagaaatccaccattcgtttccaatgactcttttcgtgcctcgtaccacacatctggattacctcacactgaaacagctcaagcaatggacatggcagttttgtattatccgcccagtgtgttccatcttgatgataacattacagatccttgggatttatccagtttggttgagctggatcttcactgctattctcaatgtttcggtttccctggcgttgtattctttggtgaaattctaccatgttttcgccaaagagttggagcctcataagcctcttacaaagttcatgtgcgtcaaagggatagtcttcttctgcttttggcaggtaaataacttaatttccaactttttctttgcctgccaaatgccaaaatcacaagttctctacctactagtttcttcaatcaacaaactgagtttgttgaaaaagcattcaaatttttcttcagtctgctgtttagacaatggaaagatacatatagtctctagaatgtcataagatgttttagggttcccgccttataatatttcaccgccacgaattagaccattaaggtttgcaggactactttaacaaggaattgtagctttgccagctcaacaacagaccttaggctgtttagttgagagctgaaggtttaaagggaactcttttgtctaggatttttgtaatgtgcatatggtctgagcgttgagatttttctccttaatctaagtctttcgattgtgtagcgaacgaaaaccatttagagcttgttggttggtacttgagacacaaaaaagtctcatctcaatagattttaggatcactgctacattgggtcaagtttaaagcattcatgtctaatttttcgccttgttccattcttaaaccttgggaattatgtgttgcacagggaatagtcctgaagatattggtgggattgggattaattaagtcgcatcatttctggttgggaggtggatcagcttgaggaactctgcaaaatgtgcttgtaatgcttgagatga

SEQ ID NO: 28814 - DNA, 1768 bp, Arabidopsis thaliana landsberg
cgtctttgatgaacagactagctcttcataggccggccctcaaaaatgatgagcaaaaacaactttccattcaataaaaccaaaaaccacaactctacacccgaaaaatctctaaagcttctttccattagctataagacgttgcgttcacttcactatgtgcttgtagaaccaaccaatccaagaaaaaccatgaagtctaatctaagctcttttacatagctataagatgattcttcaactttttgtattcgcaatgtgcttgtcaatatatacaattaccgcatcactaatcaagaagcaatgaatgcataactgaaagaagattcatgttccgaagaaaagtaaagtgagaaaaacgaacaggcaaagtgtcccagacgattctgttgtcatcaggtttgagatgataaaaagcagaccaaaagccaagcttgcaatgcctgcgtagaacagtgtccatccccagatctcaccatttaaactgcattacaacaactcaaattgttaaactaactcaaaataaaactcaaaaaagggaaagagaatgataccttatgttgaagaagcttcctccaatgcaaagaacaaaaccaagaactccaacgataagaaagggaaagttggtcatcacattcaatgtattaggcactcctgttcatcatcaaacccacacaaaacacctgtctctcgttattacacatgcacagagacagagagagataaaaaaaagaagagagagtgtgatatgatgatgatacccatgaaattgcgtttatcggcgaagatatgatggcgaaatgaatcgagaggaactttgggagtgatgaacatgatgattgaccaacagaggaacgatcccacaaccaaaattcgtttccttttccatctccctatctgttgattcgtcaaccacaccattaaaagttctctctataaaggtgaagactttaaaggtttgtattgtttgaagtggataaatcagttatctctgttgtgtctgattgattaatcttcttccagtttaagaaagaaaagggaagacagatttattgagagtcgcttttttcgattagaacaacgtgcggcggaatctctttttttctttttccttgagtctgacgggtacgacgacgacgatcgatctctaatgttgtcgtagttgacgaggaccgctctaaacgtctacgttttgtttctattctattctatttgtaaagtaaccccttacatttttatatcttatatatatcccaccccatgtttctgaaagtaatatcttcactcctatatatatgtacaacgtttcaaaacttggcgggagtggttttagttaactgtttcctggttagtgtttctaggagaaggaaaagttaactaagaaaattgctaaattatatatccttgatgtgttgttgtagttcttagaagtaacccacatagatagccatgtatgaaacaaaaacaaaaatgggattaacatgagacaaagttcaaaagagaatgaactaagagtctaaatgctctttatgctacaaagtattcaagaaaacgaaagagtataagagaaagatggggaagaagatgaaacaatcatatgtattctcaaattacaaacatatattctaaagctcaaattgggaacgtaaatatatcaatgttgttttaagccatcatgtcctctctgaatcatccattgtgccatgcttgaatacaaatttgaaattgttcatttctttgaataatattggcaggttgagtattgttc

SEQ ID NO: 28815 - DNA, 1842 bp, Arabidopsis thaliana landsberg
  unsure (1)..(1842): unsure at all n locations
cattctattgatttcctcttgcttaacagcaaaacgcacagagtcagaagcagaacgaagagtatcgaccagttcaagacaattcagcttttgtatcgcgcgaaaacgcgattgcagatatggaggttgaagatttcggtaaatccggtgaagatgttgattacattatgctgattcgatccaacgaacgtccattgaagagccgtgacgcgattcttcagtgtaagaatcgagatttctatagtgtgctggtgaattctaccaagagagaagaagagagacagaggattgagtctcatcagaggaaagatggattagttgctaagagtaggttaatgggagctgaagaaagaggtattgtagggtttagtagggtggtgtntgatgataatggtttaatgatgctaatcctaaatctaagcttcattttaaagctgggaagattggtgaaggtgtgccgattatttttgttccgagtgcgtttcagactttgattgctatatataacgttaaagagtttcttgaagatggtgtttatatacctaatgatgttaaggctaaggagatgaaggggttgaagcctgattgtattacggttcagaagaagtttagtagagatagggagagagttgtgactgcttatgaagttagggatnnnnnnnnnnnnnnnnnnnnnnatgattgggatcgtgttgttgcggtttttgtattggggaaggattggcagtttaaagattggccttttaaggatcatgttgagatattcaataagagtaaggaaatatgattgttggagtattagatgctgaaatgttcaaatcttttggtttttgttttgagtggttttagctgacagtttgtctattgtttgcagttattggattcttcttgcggtttgaagatgatagtatcgaatcagccaagacggtgaagcagtggaatgtaaagatcatctcggtgagagatttgacaccttttttgtttgctgttatgttagagttatcattgagatatgatttaactgaaacaaggaacttcttttgtgttttttgaactaatcagattagcaagaataagcggcatcaagaccgagctgctgcattagaagtctgggaaaaactcgaggagtttgtgcgatctcggtcgcattcttagtacctaaattgttgtatcatctttcatcattttttcttctgtaacattatatatataacatagtgacaacaaagttgttgtgcaatgtggtggttttcaattaatgataaatcgaaactgttcattagctttgcttcacgtctcttggtcttttggaaggtgaattaagatcaatatattatatcttattgctaagatttgcatcatctccattcgattacaaacaatcaatgcctattcaacgcttagagaagggcagagagcctgcattgcattcacaggatttagagacttgatactttctggttcttaaatgtggcaaacgtttgcaaaaactgtgaatgggggtagtatgcgaagaacacaagccctcatggtcatcttcttctcgttttcttgttgttgttacaggttgaagttctttagatgatgtttcagggagactagcggttcttaattcaattatcttcagctctaactatggtgaggaagtttcttactttcatttagcttgtgctgtaaagactccgatgatcaaaccatggctcttgtcaactaaagtttgaggtatggaaacaaacgtaatgcatcatttcacatgtttcggctcttgttcataacgagagaggaagtattgatctcaaattctctcttgtaccttttattaaatgcagtatttgattttaa

SEQ ID NO: 28816 - DNA, 1932 bp, Arabidopsis thaliana landsberg
  unsure (1)..(1932): unsure at all n locations
gcccatataaaggtcatcggagcgtgagagccactctcgtacagagcgcgttagagaagatataaagcgacggagcagattctttttcttccctctctcctgagaagaagaagtaaagaagtaagatcaattctcggccgtagttagttatcctccgattagatttccgattctctgtttcttctagattgaatttaaaaaccctacttttgaattttcacatgggagaacaatcaccttctcaaccatcgactcaatgccaaagtcatccacaatcacccaaacccgatactcataacctaattccaccggaatccaccgatgaatgtctcgattcagctggagtttcaggctcaatcgtctcatctaccacaatcgacgctcgacggatcactgaactaggcaatgtatcgtctccgccgtccaaaatccctctccgccctcggaaaatcaggaaactcacactcgacggagacgtatccggtgaagattataaggcggaggatatctcctcatctcaagtaaactctccgctctcgacggatggaaaatctcccggctaaggtaaattgtcgcacttacgagctataactgtgccgaggatccaagctcgtcctctgacatgtgaaggtgagctcgaaacagcgattcactatctccgtaacgcggatcctttgctcccggcgttaatcgacgttcatccaccgccgacgtttgagtcgtttaagactccgttcttagctctgatacgaaacatcctctaccaacagcttgcaatgaaagctgggaattcaatctacacacgatttgtttctctctgcggcggcgaaaatttggttgtacctgagacggtcttatcattaaatcctcagcagcttcgtcaaattggtgtctcgggacgtaaagcgagttatcttcatgatttagctagaaagtatcaaaacggaatcttgtcggattcggcgattttgaacatggatgagaagtctttgttcacgatgctaacaatggttaatggaattgggtcatggtctgttcatatgttcatgataaattctcttcatcgaccagatgttttgccggttaatgatctcggtgttaggaaaggagtgcagttgctgtatggcttagatgacctgcctcggccatcgcagatggagcagcattgtgctaagtggagaccgtacagatcagtgggttcgtggtacatgtggcggctcattgaagctaagagtacatcaacgagtgctgctgttgcagccggagtgtcattgcctccattggaagatatccaacaagaacatcagcagcaacagcttatggaccctcttaatggtgtgttcagtatcgggtaagtaaagtttgtttcttttggaaacttttaaaagtttttctctgtacttggagtgtgcttagcttaagtagatagattattgaaaactgttacttgctgcaaatacaaactaatatgtttggtttggatcactaagatcaaatatctgagctttggccaactatttgtggaatgcgctatggttgatatattattttagccgccaagattaggtgtaatgtttagttgtttacatttatgtatataggagactaataatgagcttacatttcatgtttgacaaaaagtagttgcttgaaaccatctagtgagttagtgagtgaagctatatttttcatcacctcgattgaaannnnnnnnnnnnnnnnnnnnnnnnnnnnagcgtttttccagctatggtcttgatttctctccatgattgtttctacgacaattcttctgattatcgatctatgactctttaacagggcttggggacaatcgtagctgttcttccacgttggtcctgaatcgtctgatgacttacgtgagttatttagttctggacttacgtgggttttgtgcctagtaaaagaaaa

SEQ ID NO: 28817 - DNA, 753 bp, Arabidopsis thaliana landsberg
ttgtatagatgcaagagtatttgtgtgtttgttagataaataattatttatctaaaaagcatttgtaaacgtttgaaaatattagcttcactttaaaaacttaaagaggtcttgaataacattttggtttattgttttttgtcaatttaacaacgataagagttatttttgttaaacgaagatgaaaatgaggaagaaaaaaaagaaatgaaaaaacaaaaaacagaggaaagagatggaaatagtctctgattcgtaagtaccgatcgaaaacaagtttcagaagtcaagcaccaattagaaatcagcttctcttttcttttttactagaatttatgggttaaactgcaaaaatcataaagctttgagatagtacagtactctgttttgtacaagaacgcagcagaggtcttctttgactcatttctctctctctttctcctttaaactctgaaccttcaacgttatcttcctctcactagctaagaaacccatttcgattctctctctctctctcgtttccaacatcattccatggctgacgatagcgaattgtatcctcgtttcttcaaagtgttcctcgttgaatcggcttctgaatcgttggtaagaacctctctctctctttctttcttcttccttggttctggagtaggaaaagtttcagactttgaatctcaagtattagtatgaaagttatggctttatgagaaagatataatctttagctagtttagcagttggggttgggtc

SEQ ID NO: 28818 - DNA, 3768 bp, Arabidopsis thaliana landsberg
gggttaaaatattggcagtccccgccggcgtaaaagaaactcattccggcagatcggagagcgtactcttgcaccagcgccgcaaacagagacggcctctccagcaagcgagccgggctatcgaactctttcgctttccctgttcaaaattccataattcatcaactctgtatttctgtaaaactgaaaacatgacaagtttgtttcttttttaagtcttaccagcatcaatgacaaggactcgatcgccgtccatcactgtaggaatccggtgggcgatgctgatgatggtgcacgacgcaaagtcttctctgatgatcttctgaatcacggcgtcggtttgggaatcaacggatgcagttgcttcgtctaggaagagaagtctgctgcgtttcaacataaccctgcctaagcatagaagctgcctctgccctacgctccagttctccccattatcaaccactgttccaatcaagtattaatacttcatatatatagatacagagatttctacgatatatatatagatcaaactccattgttacagatcaatactcacccaaagaatcgagcttctcaggcttggtagctacaacatccttgagttgacaccgttccaggctctgataaacagaaaaaacgaaaaacagatgttgttatatgtaacaaatggtttttagctttagaagatcaagaggcaaaacatgttttatcatcaccttccagatttcttcgtcagagtattgctctgtcgggtcgatgttgcttctcacggttccttcaaagaggacaggttcttgcggaatgattccgaatcttgacctgagatcatgtagccctagagtgcttatatcaatcccgtctatgattatcttccctcctgatggttctacaagcctgaacaagacttggatcaatgtcgatttcccgcttcccgtccgtccaaccacaccaaccttctctcctcctttgatgtcaagagtgatccccttgagcacaagtggagtgttcggtctgtagcgcacctgttgtttacaacacacatcatccttcacaagtttgaacagtaaaggtgagttttaacacaaggctgttttggtttctttgactcaccttgaggtcttcgagatgtacattgccatggaagggccaattcgaaggtggaagggtttcttttctctcccactcggattctgagggaatatcagtgaactgtttgatcctttcaactgaaaccatcttgttctcgacaaagcagctcatgtatatggcaaagaacagaaccgagttcagggacagtccgtacgacagggacaaccctacattctctgcatcagacccaaagaaaatgcatgatttattgtcccaagggaacgaacattagtattaactactgaaagggggtttagtgatccttacctggtctgataacgttgctgggtaacaataccataaacaaagccgagatgcagagcacccagctcccaaccagctccagccgaaacccgagccattcgttggagccattgttgtggaagtccatcctgagattatcatttacacgttttacattctcttgtctaaacaactcctgcttcctgaatgatcggattgtcatcactccagctatacttttagagaaatggtggatgatgggagccttaatgattgagtccatgcgtgttaattcaccggaagaagcgaggtaatagttctgaagatcataagcaaagtcacgttaggaacatcatacatatcatacatttaaaataattaaaattcagagcatgagatcaaagagatgcctacccggtaccatatgttaagccagccaaggggaatcacaaagaatgcagttggccaagcgtactggcaggtaactatgaaaatgctcagcagagtggtgtacattgagaccacaagtccgagcataaacggaataaggatatcgacattggtctgatcagtcgatgcctgcaaagttcgaaagagaaaattccttttaacatctctgctaaaatttgtatgtaaacgaactgataaggagaaaagttgtctcacccgactgagaattcttcccgatggcgtggtgtcaaagaatgacatgggagcgtgtaagatactattaagaatctgtcggaaaaagatctgagccgtcttgagtcccaagtgggtgacgtaatatgaccggatgctcaccaaaacgatggaaacaagtgcaataattacatatccgagaatgaaaacggaagcatcaaatgatattgcatttttggctgatgtttcgtatgcaagccagtaatcgctggccattagagatccctgccacgtcagagagaagaacagaacaagcacaattccccaccagccataagcctcagtgcagtactgtttgtaaactcctaagctaacctgtccggtttccctttcttcttctttgatgagcttcgagccatcttctacgatgtgagaaccgagaaatgatttgatatgctcatcgtttagatcacttaagtgaggagactccattgacgttctcggagagcttgcatggggagacgttggtgttcttggggatgtggcgactgctgcagagtctgcaccggcttcaaccagctccattgacgtctcatgtgcagccacaagttccccaaaatccaatccggagctgactaattcgtcatattttcctgattcaacaatctttccatcccgcatcacctgaatattctatctcgtaagaacaagttctagtttttttattttactaacataaatctattaatgatttgtataccaagatgcaatccacgttgtgcaagaaatccacttgatgggtaacgagtaatacggtcttgcctttcagagctcctcttacacatttctgtaaaaacatcacaataacaagaatcaacttctgttgcattttaaaggggggaatactaacatcaagagtttttttctgtcccttgctaccttgaatatatctgaaccggtatgagcatccactgcgctaaaaacatcgtcgagcaagtatacatcgcattcctgatagacagcacgtgcgagctgtatacgttgcttctgccctccgctgaggttgattccgcgttctccaatctcagtcttatctccaaactccatcatttgtaggtctttttcaaaagaacagacattgagaactttgttgtacttctctctaaccattggaagaccaaacaagatgttgtcttgaaccgtcccgttttcaatccacgacgtctgagctacataacctgtgctcccacaaactctcacctacaaataaacttgttttgaatcaacaaatgttccaaatgttagttctctgaatctttagactacattaaaaaaaattcgcacctggcctgagattctgtgcatttcaccaagaaccgaagctaacagagaagatttccctgaaccaacggttccaactatcgcagtgagctcacctttcttaaccttgaagttgatatcactgagagcaggttcgttgtcctcatcatcccaactaaagcttccatctctgacctccacggcagtattaccatcacaacccagggctctctccacagcatcttccgacagctctttgctcatcatgtatgagtccagtctcccaagagagatcattgcctgcgagagagaaatcatagactgaggaaacgtcctgatgggttccccaggatcttgaaaatggtataaggtggtgaacacagtcccagcgtcaagcttgactcccaaggc

SEQ ID NO: 28819 - DNA, 3756 bp, Arabidopsis thaliana landsberg
  unsure (1)..(3756): unsure at all n locations
tgaactagtagtagtcccttaattgcaagggtagatgtaagctccttataaaatcttcataagaggttcctccaagtcctaccttcagttccagctgccatgtaaaatcatcaatttatcattcaaggattagaaaaaacaagaatagctattgttcttctggtaaagttacagtaactcaataaaaaaccaaaaaactgtatacatcacaaagaaggaaaaatagtaatctccacaatctgttgctatcaacaaaaagcaagtatatttannnnnnnnnnnnnnnnnnnnnnnnnnnnnnnnnnnnnnnnnnnnnnnnnnnnnnnnnnnnnnnaaagtaaatgcatatattttaaagagctctcgtgcattgttgtaagattagtagggttctaagagctgcagtaaactgagatgactgtgtgaaaagcatattaactcaaacaaaatctagagctttgatattgctataggcgaacataaagaaagaaacgtggagtctactactcttgtacttacattaggtgcaatgagaccaccaaagaagataattcccgatatcaatgcaacgctggtcgaatagagttgtttcaaagtctttggtgtctatatcaaaagataagaagcagagacaaagaagagttaaaacagaagggaatatcaaaaactgaacaagagaccgtttcataatttgtaactgaccacattagggaggaaaggaatagaagatgtgatctcaggcatctcggtagcctcgagctcactgtcctcattgatggctttaacactcttgatacgttgctgcacacgtaacctcctcacttcctccatgaggagaaatatcttattgcgtctactccttatgttatcttggatttcctgaagctgcatctgcacaaagtcttgaactgtctctgatccctcaatgatacagaagttactgaaacaatatccaccaaacaaataatctattaccagttagaatcaaaatgataatcgttatacacgctatagatcatatacatagctacaaggctcccacttaatcactaatcgagctctcaaacaatagatatcgatttggccaaacccaggtgaaatttgaagatgaaacctagaattcatcaataaaggaagaaatcagaggaacttgctttgggacggtgtcaccggagggaggaggacggttgttgctgccgtctgaacaggagaggagagagcgagatgagccatggaagagaagactggggctaggtttcagataagatgagggaaatcgaagcagggatttggaagtagatggagaagaaagtagaagatgatggcgatgaggagtagcagaagagaagcacgtcatcttcttctcgcccaacgctttttgctgtctatcgtcttcttcggataatttttttaagttattgcaactttttggaaccctccgatcactacgaaggttaccattttgggctaaaagttaggcctaaacaaactctaaccgaaccagcaacatatcttaaaatgacacagttgtgatctgcagcatccaacataagaagattcaatatactagcagtatcatgttagtgaattgggaaagttgtaatctaaaataaaattgttatatgaacgtttaggagagtaataatgacgcatatgtatcttctttacaagtggaaacaagccaagttaactaaacttgaagttgacaaaaaaacaccagaatttctcacaaaaacaaactgcctctagacacaaaccctctcatgaaggaacacacacagacacaggtaagtttagttttggatttagacagaataagaagcttcaagtttgggaagaagggatctccaagcatccgcgacactgtttgctaagcgagcttgtcctttcgcaaactgatggaatgccactcccatctcttccgtcttctgctcttgaaaccttactatctcatcttccattctctttactatcctctcaaatcttctcgtggcttcctcactttctgcttttatctgcattgttgcggtatacaccacaagttcaagcacccaaaagcattactacaaaattttcaaggattgttttgagttcttcttacctctctgtattcgatctcagcttctcctactttgtctgaacgtgtgagcatgagtttgtccctacaataacagacgagaatttctataatgttctacgccgattgttgacagagaagacaaatagggagagaagccatcatacagatttatttcttttaactttgttgtttctgacaattcacaatgttgtttgaaagcagtgcctcgttctgctattgttgcctggaaaagcaaaatatggaaacaaaaaggtaagagtttagtaccagcaaaacgaaaccatgaaagagaaatcaatcccacaggcaaaggctagagaactcaccttaatcgattgtacataacgaacatagtccttcaagggttcctcgaagttcatcaggacttgttgagcctacaaatagtgcaagataggtcaataaaagcatctaggaatatagaatagatgaatttcgccaagatatatacatttcttactataatgatttagaaaaaaagaagaagatgatctagtcttacaaacttaatacctctttctggagcttaatcgataacagttcagatttagttccaagatcggaaaatgcttttcctgtaggttcaccctcacaagccccaagaagttttacagccttgccaaaatccaacagtgattgacccaactctgccaataggttgatacagcattaaaactgaagatccattcatgcggttgggaaagagaaaacagaaaacataacagaatttatatagactaaattctgatttgtgatatttttattacctctatgcctcttgactaggcgatacgcatgcttctgagcctcagtcaagtggttctcaagctcgaaaatgtaatgtttaagcttctcgtagtcagcagtagtttcttcaacaggtttttcttttccaaggacagcatcactaacttttgactggacatcctgtcaatagtgcagatatggcagtaagatgatggcgcaccacaaaggtcaataaagagcagaaaaataatatttacatggtcagaaaaaacattcttaccctaaacatttgcattagatctgcaggcttcttgaatatactagtttcctgaaacctgaatctgtccattgtctgacgagaaaagtaaactgtcattagagacaagaaccttctaatatgcaaattgcagtccttccagtaggaaaaaagaagaagcattctacgagcatttttatgtgaagatgatgtagtagcaatgtgaagtccagatatcctacctcttcatctgcttgcaaaaaggtcctaagatcctcactctgctgaagctcagggtgtaatgctattcgattaacaaatatatccaatgctgctcgcctcatttcaataaattcggcactaaagcggaatttttctgccaaaaagagtattaataaacatgaatccaatatactaatctccatcagataacaattacaagaggaaggcactcataagtaataactttatcaaagctgtacattaccctcgtgcactttccaaagtctcaacacctaatcagagacctctactaacaacctctaacctccctaaatggaacaaggatagctggattgactgacataaaactatagagatgcacaattcgtatctttgactcgatcagataatg

SEQ ID NO: 28820 - DNA, 1869 bp, Arabidopsis thaliana landsberg
  unsure (1)..(1869): unsure at all n locations
taagaacatagtgctcacaacagttaacaaacaggacgaaaatacataacaaaaaagaactgttagacttcataatgaagccacattcccatccatcagattgtcaactgcgtgcagccaaggatcgtgccacgacaccttgtcatgggcgccacactcctccaggccggacgatcattcccaactgtcaaagcgtcgacgactgacaagggcttgatgtcccaattgagcctatcaggtccgatcactcctcctacgatcaaaacctcatcactcaaactcgtcatcgccattccgatcctccgcttaaactctgaggccgatgcaaccatcttccacgtgtcaccttcttgcttgaacaccagcccatggctcatcacgtaaagcacgtcctcaacgaccaccattggaccttgcggccagccatagtctttgacatcccacccgagtttaacgctctcaagaacctgcaccgtggacaagcctttgtgcaagacgtggactttcccgtttaccactagacccgagcaggcagagttatgagtctggtggagatctgggatggatgtccagacgtcattctcaggatcatacatctccgctccagatatnnnnnnnnnnnnnnnnnnnnnnnnnncagcaacaacaatcttcccttgaagaacgcagcaggcgaacatagcacgaggcacgagcattgaagcgcgaggagtccactgtctctgtacaaagtcgtaagcncagacctggtcagtagcaaaggtaccgtcgtgatccccggtaacagggctgacagcgtcgctgccaccgcctaagacaaagagcatgccggcagtagtgacagcaccgaaatgggcaaggtggcggatacgagaaggaaggagagggagggtgagccagcgatcacagttgggactgtagacttgccagatgttctcaggatcgaaagcacagacgcagaggagatgctcagaagatcgaagctctttacggactctgaagagctcatgactgcggatagcagctcgccaggagcgagagacgagttctaaattgggatgaaggtgtaaaggcacatgagccaggcatctcagagccactgcttcggggattccatccagcagcccagacattgtttcttgtctgtaacacatttacgagattgatcatcagatacaagcaattgcaaatgcccaatctttgaatacaaatatgccaaaattgaccaaaaaagctgagaagcgtgtaaagtgaagattttgggtgaagtaacttatttcaccgtaagacctaataaattcttctctcgaagctgcatcacacagcattataatcgatttcaaaagacaccgccgcatcacacagcaaataatcgatgaaattggatttaaagaaaccctaaaaacttgaggcgagagagagaatcaagattgggctccgacgaaagcatttaatcgaatccaatgcaaagcaaaagcggaaactgagacaccggcgacgattacgaaagagagacaaatcaaagggaacacaaagaagaagaagaagtcgcacgctaagaattagattagattagcataataaaccaacaacagatttggaggtaattttacctgaagcgcggcgggagattgatgaacacgaaggaaggagattgtgatgatagatatctctcgggagaaacaagttagcttgtgattttgccggacgacgacaattgaatcaaatcaaatcaaatcaaatcgaggttaaggaacaacaagagcaaggagagaacaaggttttaataaaagagctacgtcgtcgattttacgtttatgatattactaaaccgattttataatcatgatttatgattctcccccgtac

SEQ ID NO: 28821 - DNA, 1767 bp, Arabidopsis thaliana landsberg
ggctcacttttgttccttattgaataacatatacatagctaattaatatcataaatactccttcgttgttgtttaacataaatatggcttcactaggggaacgagcgagctgcttaggtgcatggacattacttcgttggtcgaaccaacgagcttgccaccaatgaagacggctgggaccggctttgaacaccctagcctcataagagccttctctatctctcggcattcagggtccttatcaatctcgtggatcttagggttaacaccaagatcttggaagagaacttgaaccgcataggacaaacaacaggagctcttggtaaatataaccacccctttttcggacgacattctcataactttgtccattatcttgcataaggtgaagaagaagaagtatatggattgaaaggagtagctagagtctcaggctatttataacaggagggaagaataactgaataagaatccacatacagagatcacaagaagatcgttgaaaatgttcccaagtccgactttattatatatgagcaagatgattcgacgagaccgaaccttttcttcggcagcctttacccttttgattgtaaggaccaataatatgaatgatcattccatatattttctcttggatacaaagatgcggtctcaacgatcctcctacaagttgctaaaaagagagtgtattcgacgttgaatatagatagatagatgcttcatacttttggaccatttgatttattctgcagattccatgaatatcggacataaggaatcttgggacccaaactatgcaacaagaaaatcaacttgcattcaacttttcatagctattccaacttggttgggtctcttaaaggcaaaagagctcacatatttttgtatccttaacaaatcttgccgtaatgttgtttcttttgttcagattatggttttaatgtttaatcaaagcttgtacaagtgtaacgtagtatacacataacgtaatcatgatcaaagaagggcaagaatcatatgagaccaaaaaaataataacaagccaaggcaatgggaaaggaaaacaaattcagaaaactgaaatgaagatgaagaagagcagatgatggagaagagaatcagattgaccataacagtggatcgagcttgtcagtcgtttttcgtgccatatagatatgatgagaatcaaagaggggtatacaacgtgatgattttgaagggtatagttgtcattcttcttactgtagattctgattgaggggtaggtaatttgatttcgctgtagaaattgattggttttgggaaatattcaatccaaggatagtgtcgagcaaccatggatttgtgttttcaaaatcccgtaaagtgtggtgatcgtttgttctccgcattgaatacctctacgtattacaagctgggtacttcgaatttagggtttaatggtccagttttagagaatcggaagaagaagaagaagctgcctcgtatggttacagtgaaatccgtttcttcaagtgtggttgctagtaccgtacaagggacgaagagagatggaggagagagtctgtacgacgccattgttatcggttctgggattggtggattagttgctgcgactcagctagctgtgaaagaagctagggttttagttcttgagaagtatctgattcctggtggcagctctggtatttacgagagagatggatatacttttgatgttggctcttctgtcatgtttggtttcagacgataaggttggtttgt

SEQ ID NO: 28822 - DNA, 1900 bp, Arabidopsis thaliana landsberg
  unsure (1)..(1900): unsure at all n locations
gtactacttctgtaagattcaattcagattctaattgtactctggatttagatttgttacgtcatgttcacaagttcattttagtacgaattggtaacttttgctacttagtttatcatttgcctgttcctgaagtcttaaactttctcaaaaaagttagcatacagtatacacttaaggattgattcagataaactgttttggtaagaataaggagatttgaagcataaactaaagaatttttaaaaacatgtaatggcgattggaggcgggattgtgaatgagattcaaagtgatttgagtataaaaaatacacaaaacacagagaaagcacaaagaaacccgtactatgaagccattttggtattagggaaagaagagcaagggcaccccgtagaaaacctacaggtatttcagagctatttatcaaaatctctcccctgttttttgcctctttcccgattcaattttctcggaaaaacattcgcggaaaacagaaagaaaactactaatcataagaaaatcaatctttcgcctaattgttgagagaatgatattcagaacatcgaaaaattgaaacaaaattcattggaaccctaatgacggctcctgctaaaacctgtgaaactcgcaactttatagtgcgaaattaggagagttagggcggacgataatccttttagttgggccgagaaaaaattgggttcagagttaggtaactattaagcccattgggctactttgtataatctatgtccatcgtttgacctcaccattgttagaacaaacaaaaaaaatagacatcacttcaccattatttcttaaattaatgttaagtatgagagtaccccatgattccttaattaatcatatggattgattcgtacgttttttggatgtaaacaaaggagaggtcaatgtacatataattattggttgataaattatgaggatagtacgttaatgggattgacatttaatgatatctccaatttaacaccgatccatctttttcatcggagcttcatgtttgatgtttttttatttggccgtgtcgacaaatttgtaaaagacgtgtaaagctgaaattgagaagaaacaaaagtgaaattgtaaggaaacgtgatcgatggtgaccccatcaatattacgataaggtaacgcgctaaagcagccttagccgtttttattaaatattatccaaatataacttataaataatcccaccaattgtgtctcctaagcaacagaaaatggaaatgatactgatctcgtcatcgacactcaggttccatccattgaggacatcacaaagaatcgccaccggaagcaatagaagacgaaccaccaccgtgtgtgctgactactacagaggaggaagaacggtggacgagaacatggtggtccttaggaaacgaatccatgagatgaagnnnnnnnnnnnnnnnnnnnnnnctccttctcattggatgcaatgggagaaacgtttctactgcaactacgacgctactatatgtgatgcactcactcttctccaaacttttctcatgaactctcgtcccagcgtcgcgtttggaacgtgtcttcttctcctcgtcagcgttcccgtctcctccgccgtttttgcttttcgcatccttgatctagctctttggcttttggacgccgttcacgtagtatgatccgtaaatatctttgttattttatctagaaactatctttgttattttatgtcgaaattaaggtaattttccaaaactaaaatggaattatttattatcaacaaataccttgagaaattctataatgattttgtttaaagaatcctaatttcatcttttttggaaaaacaaaaataaaaaaatccgtgcttcatatgatttaggaaaaaaaagtatta

SEQ ID NO: 28823 - DNA, 2060 bp, Arabidopsis thaliana landsberg
gtctcacctgaacaaaaagtagcaaaataagccccaaattttgaacggcaaccatagaggcattttggaaccctccaaaaggaataatttcagctcaaaaagattttataaccccccccccctaggttaatgggtttgcaaccattcaaaggggcacaacctatagcatctcccggtcccaattttgccaaccatgaatccaaaaaaccctccagttgggatatgataaatagatgcaaaaaaatttgatagcagctaaaaaaactcataagcaaattgcacactgtaacaaaaactaaagtttcgttttttaagacaaaatccgaatcggagacatataaatcaggacaccaagatcgaattaaaaagaagggaaatacatacaccaatcgaattcagaagaatcgctcaaaatcaaaagccaatggtttcactattacacaaaaaacaaaatgtagagattaaaatgatactttcactgtttcacagagctaatcattcacgtagatgaatacaataaaaacgtaaatataatatatatacacattggtttaaccttacacaggagattcgaagaagtaacccaaaggaggaagaggaaagaagatgtgaatgaagtaggcgaagaagcagaaagtgattagattagttggatgattaggctttgtttttctttataattacttttataaattaattatccatgcagtggaccaatgaaaacgatttttttaaaaagctttctacaaaaataataaaatggtgagagccgtcaataatactaaccacgtatacgaaccatttgggtccgctcgtacgaaccaagccaaaaccataactctaaagaaaccaaaattgtgttttacattttgaaccatccaatattattatccttatctttatccattttattttctttttcagtttaagtatatcagactctgaggtttgcagtagataaccaaatgaattatcttctaaatcaaaatcgatttaaaccgaatactatagaatttaaaccgtataaaattaaaccgaaccggaataaattaccggctcaaccgcgagattatagtgtcattctcgtccagtttcagacgaatcgatggagttgggatccagacgaatctacacgacgatgccgtcgaagctccgatcttcttcttcacttcttccacgtattctgctcctttctctcttattactccttttctattccttaattctccgccgtccgattacttcaaacattgcctctcctccgccgtggcgatctcttctccggcagatgggttttcaatccagaaactccgaaaccgttgtacgacgagacttgtcctttccacagaaacgcttggaattgcttacggaacaagcgagataatatggatgttatcaattcatggagatgggagcccaatgtatgtggattgagtcgaattgacccgacccggtttctagggatgatgaggaacaagaatgttgggtttgttggggattctctgaatgagaatttcttggtttcgttcttgtgtatacttagagtggctgatccaagtgctattaagtggaagaagaaaaaagcttggcgtggagcttacttccctaagttcaatgtcactgttgcttatcacagagctgttcttctcgctaaatatcagtaagattgcttacttccatagtttaaaatcttgtaattagctctgcaaggatcaaacttttgatgaatcttagtattttgggttataggctttgtaggtggttttagaatcgtataaggaacatcgactcctttctccagtttatgttaagagttgaaactgaaagaataatgtttttgtgtatatgttgagttttatccagccttgttttttctaaactgacatgttaaaaggtgccaggatagatcttctgctgaagctaatcaagacggagtgtaagggactaatcgagttgatgttcatgatcctgcaaatgagtggatcaccgtcaaaagcttatatgatgttctcagatttaactgtggccattggtcatggttatatccatgaattttcttc

SEQ ID NO: 28824 - DNA, 643 bp, Arabidopsis thaliana landsberg
cgagaataccagcgagaatatcaataccactctgagatgtagcaaactgctcttgaggaaaacctgtttagttttatggaggttgcacattctgaaaagcaggatcaggattggcaacggcggaaaatgagtccccaaagtcaaagttatgagcagtatcaggatgtgagacctctgaagtgaaggatggaggtggtggctggaaagaagctccaaaattctactgtggggttgagtcggtgtcagtagaagtgaaggacttgaaaggagagtcaccaaatgggtcatcaaatgcctgcataatcgaaacaacagtcatcaataatcataggaaaccatcataatcttcagagtccaagcttagtgtatatacccgagttgtgtcgcagtctattttgcattgttacacaagaaacttttttaaaatcatactattcttaagctgaaatgttatatgttcaattttttttttaatattgtaatattttctttataatcctgacttgatgacttgattacaagccaaatacatctcatgtgccttcactctaagcaagaaatatagatatgtttattcgtataacagttcatagttcatgactgttgttcgttgttgactcccgtcatattaccctcatgacag

SEQ ID NO: 28825 - DNA, 4608 bp, Arabidopsis thaliana landsberg
ttataacaaacaaatatgtatgtttaaaagttttatttttatttaattattcattcctaacatttaacaaaatctttatagataagaatatgtaattttggagataaataacagagaaatcaacgactttaaaaacccttgattcgttgttcttagtgagacttttgactaaatttatacacatgtgaatattgttaagaatagagagaccatttggtggtttttaaaatttaaaaaatgaaaaaaggttccttccgatttctcaattcatctcctgagtgggtttttctcctctgttttatttctctaatagccctagattcaaggagataaaactgctcaaatcaggtggagatttgctctgcttcattggttttttgttttgtttgagttagtgactttatctatttcttcttcgccaaaagacgagatttttaaaacaaatttcgtctttttcaaattctcgtgtcaaattgagacatttgggttgctttgattggatttcgtagactctattgatcttcagatcgtgtcgagatttagctgctattgtggggtttagaatccttctctttaccggattctcaggttataaatctcctttacttctttcaatgaagttgttcgatgaattggctacattttaggtactccaggtgcagttttgtggcactaattcgtcttgtgaatcaacaagtcgagtgattttgattgtggaaggtagtaatttttagttgaccctcacaatgaaaagagtaaaaagcgaatcttttagaggagtttatagttctaggaggttcaagttgtcacatttcttactagctatagcagggttttacttggttttcttagcttttaagttcccacatttcattgagatggttgctatgttgagtggtgatactggtttagatggggcattaagtgatactagtttagatgttagtttaagcggatcgttacgtaatgacatgttgaataggaagctagaagatgaagatcatcaaagtgggccttctactactcagaaggtgtcaccagaagagaagattaatggatctaaacagattcagccacttctgtttcggtatggtcgaatatcaggagaggtcatgagacgtaggaataggactattcatatgtcaccttttgaaagaatggcagatgaggcttggatacttggatccaaggcttgggaagatgttgataagtttgaggttgataagatcgacgagagtgcttctatattcgaaggaaaggtggagtcatgtccttctcagatctcaatgaatggagatgacttgaataaagccaataggatcatgttgcttccctgtggtcttgctgcaggatcttctattacaattcttggaactccacagtatgctaataaagaatctgttcctcagcgttcgagattgacagaagcgatggaatggttttggtttcacaatttatggttgagttgcaagggctgaagacaggggacggtgaatacccccctaagattcttcatttgaaccctaggatcaaaggtgattggaatcaccaaccagtcattgaacacaatacatgttataggatgcagtggggggttgctcaaagatgtgatggtactccatccaagaaggacgcagacgtgcttggtaagattttgagcatccatcataaactgttgttagttgccggaatgtagcaagtccatgctcagaagtctaagtttgaattaccttagcttcttttttattgctgtgtagttatgtttctttttgttttctcttcatctaagtaaatgtacttttccagttgacggattccgaagatgtgaaaagtggacgcagaatgacataattgacatggtggactcaaaggaatcaaaaacaacatcatggttcaaacggtttataggacgtgaacaaaaaccagaagtcacttggtcattcccttttgcggaaggcaaggtctttgtcctaactttgcgagctggaattgatggtttccatattaatgttggtggaagacatgtgtcttcattcccttatcgaccggtatgtgatatcagatgagcattctacttgtatatggctttggtctcagcactcaatagtatcatttgttcaaaccaagaggattcatctcgtccatgtctgataactttgtaaaatattttgtgatgtctggcctctcagggatttaccatagaagatgccacagggctggcagttacaggagatgttgatattcattctattcatgctacttctctttcaacatctcatccgagtttctcaccgcagaaagctatagagttttcttcagaatggaaagctcctccattacctggcactccttttcgccttttcatgggtgttctctctgcaactaaccatttttcagagcgcatggcagtgagaaagacatggatgcaacatccttctattaaatcttcagatgtagtagcccgattctttgttgcacttgtaagttcttacaatctttccttattttaaagcatgatctttaagaagtttaatactgcaggtcgatttaattgaaacattgagatggagatttgctgatttgaagttcttatgctttggaatactgagcagtttatgtgtttttgttgatttgttttgtgtagaatccaagaaaggaagttaatgcaatgctaaagaaggaggctgaatattttggagatattgtgattctgccctttatggatcgatatgagctagtggtccttaagacaattgccatttgtgaatttggggtattgatcatttctctcatgactccatatctgtttaagtctttgaacaatctctgataaggatcagtaaatgaacagtttccctcattgtagttactttacacaaatctaattatgagagtctgaatatcttccattcaggtccagaatgtgacagcgccatatataatgaagtgtgacgatgataccttcatcagagtggaatcaattttgaaacaaatcgatggagtctctccagaaaaatcactttatatggggaatctaaatcttagacatcgtcctcttagaactggcaagtgggcagttacatgggaggtacaatggcttctgttctttacctgcatatagtctgtatgattcagaaatcagaagcagcctcagatactaaattttctcttatactgtaacaggagtggccagaagctgtgtatcctccttatgccaatggacccggatacataatctcaagcaacattgctaaatatattgtttctcagaattcaagacataagcttagggtctgaccctttatcatcgtcttacgttcatctccatcttttactgtcatgaacataagagtctcctaacattttcaaactatttcgactttgttgtcacagctattcaagatggaagatgtgagcatgggattgtgggtggagcaattcaacgcctctatgcagcctgtcgaatactcacacagctggaaattttgccaatacggatgcacactgaactattacactgcacattatcaatctccgagtcaaatgatgtgcctgtgggataatttgttgaaaggtcgaccacaatgttgcaatttcagatgaccaaaacatagcactagccggaagatattacaggattacagatttggcaccaccttaacccattttgtaatttttcctctttggtgctagttgcttacatttacacattcaagataacaatctcttattgtacattgattaggattttgtctaagaaagagatttacactgatatctaaacaaattctttcaaaacgtctttgccataacactatggggctaccaagaaagagaagccaaggtcactgtattatacatttatactactctgctggtctttaagttcttgagtcatgttatcaagattttggctttcatcaagtcgcatttccttaatcatctgcatttcttgcgcttcactgaaagatttccagcttttgcaagatggggaaatggaagagggcatccacaagatccaggtagatgtcactgagttgttttcttcagtgtttgccataatcctcatccggtagatgtgacatacccatagagacaacaagtttggttagtatacagatgaattgatcagaatcctgattgtataaacagaacatctaaacatcaatcttaagagtgtgcaggtcaatagcagaagcaactgtaatgaagaaaactcgaaagacggattgattacaacaaaaaaactgtggcgcaaagactaccaatttaatcttttcatgatcagatggatacagccaaatgtgcctttagaattttgtttagcaccatgtttaatccgcacgccaaaaccttacggctgtgaagttctgatacacggtgcgtgaatcaatcaagaagagaaaaagagaggcatagagaaacttgcacggttaagatatccagatgaactacacagtgataaagtttcactttttatgtctttgaagaagcattatagattgatagagaatcatcagagcttaacctgaaacgaaccatctttctccggacagagaatggcggcggctgtctgaagttattttgagaaagtgaagatttttaggg

SEQ ID NO: 28826 - DNA, 885 bp, Arabidopsis thaliana landsberg
tgtaagacatttccccgccggcgctgactctacctccgtcgcacttggaagccaatcaagtttttatgctccactacaaggtatgtttctcatgctttgttctttcatgcttgaacttggaatctggagatattaaaaatcattttctgaaacaagggtctaagtagtcgcaattgatgttactcttgctagcgattacctttggccatggcagattgtcaaaagagaggaaaaagttattgtcgctatttcgaaacatgatttcttttctttttttctcttcaattagttgttgaaggttaaagctttattcactccttgctaacgcagttcaaaacactggagtatcaacaacaaaatagactatcctcctgataagactttggtgcattagagtttagatgggttggttgcattagtatgtttgacgatcaaatactatctatgggggtccagggtctaggtccatattgggagtgattgaaaatggattctacgtcatcaaacctctaatgccaatccttggtgacctggatacgtgagggtaatgatctccttgcttttaagtctctttgttacccatacaattaaaattacgtctttttgtcaactacatcgaaataaaacttggagctcttttttttttttttttttttggggggtttttgatctagtatgtgtccatgtgttttattatccgataaattcgttaaataaatgtaactcattttcagatctttatacacttagtttagttctctctttagctaggatatatgttacatgggacagtggcttcatttcctctctgattacgatgatgttctttttggttcagatcttaactcgattaccaaccttgcttttacttcttttgcaattgat

SEQ ID NO: 28827 - DNA, 94 bp, Arabidopsis thaliana landsberg
cttcagattggaattgttattcaattgaaaaataagtctatttttttctggttctaagactagtagttctaggagtcgactcacttctttcaaa

SEQ ID NO: 28828 - DNA, 1365 bp, Arabidopsis thaliana landsberg
gagattttagtattttaatcgcagccaatcagaatatggcaatagtataagacaggtttggtcaagtgtttagagaggattagaaaacccaatggcctattatatcccgagaaagagctataataatttcacaacaataattgaaaacagaaaggtaggtaacccaatggcctattatatccctagttttacttcgatgcagctgacagaaaaagagtaattttcacaattgtataggtaaagggtactagagagacttaaaagcaaggagaaaggatcattaccctcacctatccaggtcaccggggattggcattagaggtgtgatgacaaagaatccattttcagtaattcccgatatggacctagaccgtggacccaaatagatagacctttgctcgtcaaagacacccttgcaactaacccgtctaaattctaaagcattgagattcttatcaagaggatggtctatatttagctttattggttccatgttcaaccgttgctgttgatactccagtgttttgaactgcggtaacaagtaatgaataaagctttaggggtctgctcagtgaaaagcaaccaattaatattaaatgtctcagcttcagcaaccatttggaagagaaaaagataggaaatcaggtaatggaataagagaaatctcaaccaagacatgggcatggtagccagtactcagcatgcatttacaatcaataagagtgtcgccagatcacttatatgaaagaattacgaacatttagattctcgctggaatctgacatttattcaacttaattagtctacatgacgatgcagagaactgcattgcgtcagcatagatcagtatgtgctctatccagatcacacagattacgactccaggatctagttactctaactcctttacggatcacaaaaacaactagaatatgtgtgaagcacattttgaatataaatttcaattaaaagtctaagacaggctataaccaagcttgagacgatgaaaggacttccattgatttcgaagtactgaccttttcctctctcctgacgatctgccatgacccgagaccaaaggtaatcgctccaggcaagaacaacaacaattgtgaccacttagaccctcgtttgttctctgaaacaaaaagggcttagcttttcagaaattgatgcttactatccccagattccaagctcaagcattggaagacatagcacgagcaacataccttgaggtggagcagaagaactcgattggcttccaagagcggcggagctagaggaggaagagtcagcgacggcagagaagtgtcttgaccagaattgtttcggtaaagaaggagaggcagagatacttgttgt

SEQ ID NO: 28829 - DNA, 1858 bp, Arabidopsis thaliana landsberg
  unsure (1)..(1858): unsure at all n locations
gtgaccagtatccttcacagcatccaagagcaagagaatatgcttacctcaagtctgccccatgtataaagagccgtggttcatcaaaagtacagcagcgagaacaaaacaatcttcagttagtgtctgaacgcttacaaagtgatctaacctcaaacaaggaagttcagttgaaacaagatggtgattcagatgtaaatcgccatggtcatgaaagcgaaagaaatcatgtacatgggatcactgataagtcagctgtcacggatgtaaaacttggtgtgggaggtaagtttgatgagaagaagatttcggttgaatctcaaaacccacattcagtttcagatgtagggtgtannnnnnnnnnnnnnnnnnnnnnnggttgtttaggagggaaggaccaaaatgctgcaaccaataggttaagtctctctgttgagcttttgagttctggatctctcgttgttaaaaagctgtggtgcagtaaacaggccatatacccaaaaggtgatgaattgagaattttgtatgagctttatactttagtatttttttttttatgtcttctgagacttttgcttttgattgtatgttacagggttcaagagccgtgttaagttcttaagtgtgcttgacccaacaaacctaaccaactacatctcagaggttctggatgcagggcttcttggtccattgttcagggtacactaactacgtagtggtttcgagaatataactgaatatctatttatcatgcagaacacatgaaggtggtaagttactgatcaatcagtattatttccaggtctcagtagaagattaccccactgagaatttctccaatgtatctgctgaaaagtgctggcaaatggtgacacaaaggctcaaactggaaatcatcaagaaatgtgatcaaccagttagctctttgacctctttacaacctttggagagtataaatgcgcttgaaatgtttggatttctctccccgcacgtaattaaggtgacaatcaatttctcatgcatagccataaaactatgatatcctgaatcttcttgcggtggaaagtttttttttttttttttttcttctactttgctggatgagagaagctcccatcttctgtttcagtccccttgagcatctctcttactcgcctacatgaccaaatttccatatgtactttttagcgttttggactgaaagttgaccattgtgcacaggtggttgaggctcttgatccaaagcatcaattggaggagtattggaaccaaaaagcagtgaaactgtttggtgctgaaccaataaaggaaggagaaaaggatgatacagagaaaggaggggcttcagatccctctttggaccgggacacaaggcttctgcgtggactgttgaagaaggcgacacctgaagaattagtaatgatgcatggacttctgtgtggtgagactcgcaacaccgagctcaaggaagagctctctactttggttgataagatggagataagtccttaaggaggagcaagcagataaacacactaacaccctttgaagttgattgtgtttgttgttcctttggttataaactgtatcagtagagaaatctagagaggcaatacaaaagtagacaaaagggttacttcgttgacatgtctttcctttttaccaaaaaagggtttaggattaatgattgtattatactgtgttgcatttgcaatgtaccattgttctctatatttcatttgcttatttgtaacagcttttatgattagtagacgatttcaaacaacagccagatccaaaattgaaccaacctgtatgagctgttgtaacaagataaaataacataccctagagtttc

SEQ ID NO: 28830 - DNA, 1008 bp, Arabidopsis thaliana landsberg
ttgctggagaagaaagaaacttgtgagagtgcgatgatgtgaaatgcgaatgtttctctcaagtgatgggagagaagattgtttgatatttaattaaaacgcggcgtttggttgacagttgttgttactttcgaatttggaatcttcttgatctatagtactaatttaaaatataattaggattctggtggacgtttaaaagtgatgatatttctaattatacggtttaatcatttaatcttggttctagaatattctatcaccatgtggaattatatgtgcatagaaatgtcatgtattatctgaaaatagaccaagtcattcttgacctctttcttctacggagactcagtaatatgcataagaacaactgaacgagtatacacgtcgaggttacacaataggggaaaaatgtgtaacacaaggacagaataaattagtacattgggctcaacccaaaaaaagcccatttatattatctgtagaagacggattctttaagccccaatttatatagttccaggccccaaattttattttttttcaaattgagagaatctctgttacaaagtgaatagagaataagtaacatatggcacaaaaaaaactctcagtttctttcttacaagaatattttaattttcaatatttacaaagtcaacgagctaaattaaacaaaatattaaaatcaggaccgtcaattctaaatgactccataataatctccacacaaaatgactcggtctttctccacaacaacaacaaaaactactccattcacctgacgttgacccaatcacacgacaccgaccaatcaggtaccttctcactcaccaaaccactaatcctttcctccggcgaacctaccaatgaaccaaacataaccgaatcattaaccggagattgaaccgaattccaaccgggaaaatcaaatggattcctcggtgaaaccgaacaagcttcgtcttcttcgccactcttatcatcaacggctaaagaatggatgat

SEQ ID NO: 28831 - DNA, 1400 bp, Arabidopsis thaliana landsberg
tcttttacattatatacattcaaatgattatatttaactcactttcttatatatatacagattctgaaataataacaatggtaaaatgaagttatttgattggaaaacgtacaggaataccatctcgtagaagatgaaattgatcttaattaacacttaacaatatccataatcttcttactctatcacgattcacaagttaaggcatgaaaaactcaaggggttttgcataaaagacggctataaaaagtttataagaaaactgagatttaaagttaagcaaacaaaacacactttctcttgttccacaacgaatccctacataatatttcttgattcttgtagcaaaatctcgatctgggagattcacgtgtaatatgataacatcaggttgatcctttttttcaccccctgcgaagtctttggttaatactaaagggaatagtaataacaaacatttcataccaaaagaaaatcgttcttagctttttcatcatcaaagacccaaacatatcgtttagtaacatattttctaaaatgatatatgttctaaaagaaatatgctggctaatttggttaatcactagggactaagtaccttaagaactcgagggataaaaaaagggtacaagcattgaattgatacataagaagatttcaaatctcttgcaaaacatgttatacataactataaatcatcaatttagaaggagatattatgtacaacgagtaatcaatgattcttttctggaacatattccaaactggaagagatatatacactatgttgatgaaaacaattaagatctcctatccattgcactgcacagaggctctatgataaatcacagacgagattagaatgactaatgaagaaaacaatgagcacatgcgtctgttttctcacaggtactgtcttttacctcaatgtctcaccaaaagctagattcacaatagatctaacaaagatggctgttcggtttgttgctgctttgaaccatttggcttagagatagatgtcccacttctaccccttccccttcctcttcccacagctattgaaggcggtggtgcgagtttcatcgcagattgctctgttctgcttgaactgaatatggagctgatgtctgcttgcggcttctggttaccatatgaactgcttccaaaagacggcattccttggttctgattctgaatcccaaaagaggtcaaaggatctgcgttacttgccctgatacccgaagtctcttgctgtgatttcatagaagagagggaggcattaccaaaggcccagaagtcgttgttagttgtctgaaactgcctaccgtctgttaaattgtttctcaaaccagaaccgctgttgttgattggaggttgagtggtaatactgttatggaaac

SEQ ID NO: 28832 - DNA, 3118 bp, Arabidopsis thaliana landsberg
  unsure (1)..(3118): unsure at all n locations
tttgctgtcatctatcataacgtattatatacttttatttacattgtcactatgatatatatacctatatatatactaactattaaataaatatatattttttattacaataataataataagctgaaaacaacaacgtcaaatatacacatcaccatgtatattatataaaattatatattgtgcatatatacaaatttcctccttactcatgtatattataagtaatattttgaatgtttatattaatgttataatatatactttattaaaaaactaaaatataatttttattactgatttcatataactatttcaaataatattttttaaaattatataataatgacatataataaataattacgaatcatttttcattttctttataaagttactgccaaaattttacagcaaaaaaaactaaatctacaactaacacatctacagctaanagcttacaacaattaatttacagctacaacctaaccaatcacccactgttaagtcacattaaattttagtcaaccttatattaacaaatataaaacattcatttatagtaataataagaaatgaaagagtagttcaaatttgatatttttctccacaaatatatatcatataaattgagtttttcataaagatctgaattttttttaaaagagaggctatttttctcaagtgaatataatggatgtcacaaaaacttatgtgactattttcgttgtagcgatattgacaatttcggtttgtaattacaacatcttggcaacacaaggaatgtttttattattcaatttacagagattattaatttatcgaatattaatttagagaggttaactgtttttttgatcatttgaagagcaatggttaaacattatcttttcagaaattagaaaaatgttttcatggaatgtcttacatacacatatatatatatatataacttgggttataaaattgcagcgatccaaatccaacaatatgatcgttgcattgggccatgtttgagattttacggaaatcatcaatgttacaaaaactgtagaaaggcgaagtctgatggaggacagtgtgattttgttaaaaaaggtgaaaaattaccagaatgttgttgctattataacaaaaattgatactcattgtagtaaccggctacttgagtcttgagcattatgtttgtcttcaacttcttagtataataaatttcttacaataaattaatattgttactcataagcagacaattttatagtacggttgctcaattgtgctcaaatcggaacatgcagttccctttttggtaaatgaaatgctttcgatatttgcgtaggccactctgagaaacgagctccagaaacaagactggtgttaaaagtttaaatcttgttttttgactcttttcaatttcctaataacttgatgtcagaatcagaatctcataacaaaaaacaaaagagacaggtttgattgagattgaaagaggaagattaatgtaatgggaattgaagtgcagaagatatggcttggagaaagagaggatgcacatcttcacccgagaacacttctgactccaacttctccatgtgaggccatatctacaagaacatggtgaaacaagtcaatattcaatctactaaagctcttacaacaacatcccaactattaagttattttttacctcgctcgcatattgccttgtaaatgccgtgagatagccaagtgttgataagcaccactgttctctctcaccgacttcgcaactcttctttgggtttccattctcgctgtccacgtccatcgcagatggcttgtcatcttcagcacctatagattttagatcctgcactgatctcactttagttggatctgggagccgttccttcagtacacctaagaaactttggaacagcaagagcagtaaaacctatgcacaagtcaactcaattagcttttagtagataaaaggaaataataagatcatctgctgcattaaactaatatataatacctcggtctcagagagagctctgttaagaagagcctcttttgcctctagggactcccgaagagataactccgcttcccctgtcttctccactgttgattttaaacgcttcatcttcgctggattctcaccaagaacgggttcaccttccactagggaaagtttgctctcagcagcctccaactctactcgtgcattggctgaagctttctcagcaaccaaaacatttttcgtaatgtttgatatatctttcctcaaatcagagatacggttataagtcttgttaagagcattgccaagtatctgcagagacagaaacagatttacgaagataaacaaacttgctctgcagagtgtagaaaataaatatacttctgttaaaacgcaactgacctcccatggctgatcagacacatgaaactgatcaacattttctggagagaacacccatctaacaattgcctgattagatactagtctataacccatcatcctatcaattgccaccgccgtcatttgtacattgtttttccagtatgtactcacttgagataatagcatcacctgcttatcgttatcaggacaaagctttgaaaatacttggccatatcgctccaggacagtgaccaaatgagtgaaactttttgatccgatgtcaagtaaggtctgtacaactattgtaagagtgacttcaaaaccatgaactggatatatcgtttcttcaatccacactatcatgtcacgtgcggtttgtttttccttgaccttcctgctcaattcggctgacaattgctgttcttctgttttctctttaccttcttccaaggaatacataaaattcggaccagcttttggaggaagtaattcttctagggcagtcgcattctcaatgctctgttagacacacatagaaaaaacaatatagcctgaggaaggatatctgatgcttaagtttggaatgatatatccatgtggataacaagatgaaacattgatcccccacaaaatggaataagacaaataaccctaggctaagagaaaagtaaatctgatgcataagtttggcagctattaggatatctgacgatgtgttcctgcgaattt

SEQ ID NO: 28833 - DNA, 2063 bp, Arabidopsis thaliana landsberg
  unsure (1)..(2063): unsure at all n locations
tttttccctttctattctttcagatttacagagtttcagatatggaactggtgagagtacttccaagctcagaggatgaagttaatgttgcttgctttcatccttctcctgggggaggtcttgtctatggaacaaaggtaattaatcctaaatcgtaatgtgaaaaacttctcggcgctaaaatgttgacttgtattgatatttgctcaatatttatctcaggagggaaaactaaggatcttccggtacaacacagctgctgcgtccaatctcactgcaccaaatagctctcccgatgagaacttggccgaggtagaattattaacaaggttgatcttcttgaaataataataaaagatgaatgaaagcaaacgaatctttttgaactaacatatgaatgtttcgatttccatccttggaaaaattttgaaccacaggtgcagacctatgcgttagaatgctagacagggaagaatttgggtctcaaccattctatatacacactctcatagacagatcttgcattgcgggactatttaccttcctttgtttcttttcgggttattcttcccgttctgtttgctcgcggtgcttttagttgtcctacccgctgtgcgattccaaacctgagaagcttttttccattcacgagctggtggtatctttttcttattttcttatatactgttgagggccgtaggttgggatggcctatcttccatttgcaaacccttttctttaaaaaaacaaaaaaaaaatgaagcaggtttctgagtttgttgtttaaaatgacttcagaaaaatgtaaaaaaaaaagatgtttttttgtttgataaattgatgttgtagtttgtaactaagattgtaaccacgttttttcctctgtaagatcgtttttttccccttggttttttactttcgttacctagaaaagtttggacgtggcggagccctagccataactcagaacaggtttgtgtctttgaacggtaacagtaatagattacgacaaccaacaacaaaaagaagctgcaaaaaattatcatcaactattctctttctaactcaattctttagtttggtggagtccattttccagcggtaaagtccttgtagaatttggacctctttgatacgatgtaaaagactgtaaccaaccaaaaaacaagaagagaggcgttaatgacgcaaacgaagtctgtagcaactgttagaaaacagacgccaatgtgatcatacaaacaaacctggaatctcagggatgacaaacttaggttctttcaacacgtcatgcaatgttcttctctcgttcactttaaccatacccgaagaacctttcactttcacccaaattcaaggaatatatgttatatagaatgattggcaatgcanaatgcatatcatatcacacgtttaggatccttacggtaggagggtgttttggttgcgcttgtgtcctcttcttcggtagtttcagcttgagaaccttttgtaccttctagaagatactggagaactctactcctaggcaatggagttcctgaactcgcctagagaaaaganagatcctgatgttactaccagtgcttcatataacacacacttttcttgaagatgttcgactaaatcatcagtgttataaaaaaagaaatgattctcttgctagtggataaaacgaaagccatatgtaagaatttgagaggctgtggacattaaaaacagaatggctaagctgaaacattttgactgaaaatacttttgtaagatagcgcaggaagacctgaacaagaatttgttaatacatgaatgatgtgtgggtgaagtaggagtgattacctcgtagtaaagctcaataacatcacgtgagtattcgttgtttttatcccatggcagcggcgggctgtcctctgaaaacatgtttagagcgctaaggagggacataaagcgcattgaacagtctatagacgttatcgaaatgagatgcaagaataagaaacgaaaggaaactggcaaaaggatatcatatcaagatgagttgcaaacatgtctgtttcgcgaaagtc

SEQ ID NO: 28834 - DNA, 1995 bp, Arabidopsis thaliana landsberg
ttccggctgtcgtttctgggcggtgcccgcacactctagatctggatccacaccgcctcctccagatgttcttacctaccggccttgctgcccgacagaagctccaccaccacatgcgtgggcgtctgcatactctctggcaaaacctatggcgacgcccgaagaaaccctaatctggctggaggttctttctgctgggcctagacctagtaattaacaaaagcttcagggcccgacatttacttatttgttgatcagcttgaagagttccggcccaacaacaagtttcctgaagcccatctgcaaggcttcttttaaagcccatctcgcatctgtgcacaacctaattgccggcccaactcctttaaagtctcaagccaggcccaactgccttattcctttgaccaggaaatttccaaggcatcgacacttcccttgtttggccaggtttgatctgaactcttattagtcctttcttagcaacattgtgtgtcgttttatgagtacaactgatcatgaacatcatttggagcataatccaactcaattgctagtggggtacaaagtcttttcgtgaacctttgcccttaaaatcacctagacattttatccttgagtttagtagattgaagaagaacggcattatgatctcgcctttacggagcgaagattattgtagcttcttcaatccgctctttacctatactctgaatcgaatcgagctcccacttcaagattgctatttgagattgtcgaagacgcacgtctttgccacattttgtgcagaactcatatttggccttatgggtctttggcgcaaaagttgtcttaccttggagagattttcagatttgccatcctcttttgtggagagaactgtttcaaattttttagttttctccaagtggttctcaccgggaatcattgaaactgaagaacatttttcaaagtcacgaattcttttgatagtgactatttttaagttccccaaattgttcgcggaagtgttgttgacacacgatggtctcggttgtgatatgttgcgttgtagcctctgtctccgagttcttatggatctatcccctatgtttaatgttttcccaatcttcttagctactttggatgtaatcttgtgcttaatttgctttatgtatccaatctttatggttgatgatttgtactatgtatctttttttatttgatgaataagaagtggtttgacaaaaaaaaaaaaaaaaactatcatcaaaaggttgtagttcaaaaaatgtttcccaattaatagtatagatgttggtatcgtccacttagttttgtcatttcaaagtaattattgaatgttttaatttttaaaaaagaaaaaaatgtgaaaccatttttaatgaatatacgtatatatatatatatatatgttacttttggttgacataaattatcatgttttacagtgatcgaaaaataaaaaatgatatctgcttaataccatgtacaagaaggcgcggacattatgaatgttggtttgattgtattcacaagaggtataaagatggaaggtgttgtattaaaaaataatagaaaccgaccaaacgattcgagctgttgaattattattttttagcatcagatttatgtatgctttttcaatgaaaaaaactaattttattatattgtcgcttctataactttaattacttgttctgacgttcgtgtttataaatcaaaatagtattaaattattttcgttgtaaatgcctaaattaaaatttaatgttaaatgttattaagaaaatattttactaacagttatatatcttttaattaaattttgtcactaaaataaattatataatatgaaatgattttcaaatacatatttaataaaataaaatattttattgtgtacagcccacaaattttgggtgtaggttattttctttctacaacaaaaagaaaaagatttttgctgtgaactaaataaacacggcatgtgagctg

SEQ ID NO: 28835 - DNA, 1486 bp, Arabidopsis thaliana landsberg
ggctaccacgctctgttcccagagtcctctttctgacgcctgaatggcaactcccaagttgtttactctcaacagacctgcaaagagggttgaaggggcatcttcaccctggaaaaccaatcaaaatcccactgattctcaggtttttcagcagaaaactgatccggttccagtttcgggattagatacttctcttcaatatgtttctttattgattctttagtttccttggcaaatgcaggaggctgagaaacacgcatataagcaaccataaataagcatttgcaaaaccataaaactttattaataacaaaaagacatcagtgcacaaatctgaacatgtaagagcatccaccactggatacatttatatgtaaaagtaatctggagtgtctcatgtcactgataactacctaacaagattttctaatgatttaaacctctcaccacattaaaatttcagaaaactagcaacctttgattcatttctttaccacataatacatgacacaactctaaaagtaactcctccctaatcaagtaaccagatagtccaatattatccccatacgttcctaattccattacgattgttgagggaaataccaagtatactaaaatcacactaagacctagtaactacaatacagaaacgcacagctattaacatttcaaacgcaacaaattgcatcataaatcagtgcctaagcgaacacagttttgaagacgtaatcaagttcttgctgctaaatcagaaaactcacggatacaaaatcgggaagtgagttcactgcgtcgtctctctcagccgtgtaaagaggctcgacgcggaggtgaccaccatgaccggagaatccgacccggaagccgagctcattgcctgcttcgactttgttcatagtgccttttctctatatcgttatcttcttcgcattccctttcctcgccgtctcttgttccgaactattctgactttatcagcgatcggtctgagagggtccggtgaaaggaaggaacacaacaattagatttccctccggttgagttcagcggattcgcaacgccttgtcgttttaaaactacaaatcagcaatgtgttctgtcttattatactttatgggctcaaatttaggcccacttgccaacaaataattattttaattaatattatcttttctatataaaaataataattaaatgatagggattcatatctcttcgaataaaatatttaagttatagaatttcactttgtttgagtcggctttataaaatttgattctactttcttcagtttggataattaagcatcaatcattttttagataaattattatacttggcttttagtttaaacttttaaaaattttggtatggcttttagagtcgcctctacataaacttcataataccttcctcaagaaatatttgcttagtagtgttaaacaaacgtcatctaggtctggggtttcctgtacccgttcgg

SEQ ID NO: 28836 - DNA, 1680 bp, Arabidopsis thaliana landsberg
actcgctgatgttacaatatatgttcaggttgattttgccttccatttttttaaatccaaataattggccaattatagtaacgtgatagacagaatcacatataatctttaacagctgtcttgatcaatgcatcaaaagccggggccaattcaacaaaaaaaatagaaacaaatcttatttttagtcctaaattaaaataaaatcttattttaagatattcaataaatttcaatatattataaataaaaagttttctctcctatataaacaaatctcacaaacctatttacacaacaaacaacacaaatctttttctcattcatcaaaagaaaaaaccaaagcaaaaaaaactcaaaacgtttttgaagataatgatgatgatgaagaagatgtttgttcagatcgctgtggtttgtctattggcgacgatggccgttgtgtccgcccacgagggtcaccaccaccatgctccggctccagcaccaggacccgcatctagctcaaccgttgtttctgccaccaatatgttcaccgtcttggctattgctgccgtggctctcgtcgttggttccaaccactaagttggttattacattcgtcgttttgtttcagtttctatgaaattgttctcttgacttttaatatattttgaatttttctcatttgtttttaactctctctatgttgatctgatttcttgaataaaataaaagtttattgaacgtgtgtttttaattacgaagatttggattacaaatccgattcttagtaaacgatgaaaccaacgtctgtgtgtgtttttttagctaggagatcttcgaaaacaattgtttccttgtgaaaacaatgttttttaattttacgagaccaatctataatctgccaagaccactcgaaaagttcatcaacgcttaggttattgtttttaatgtgcatgaacaattttattagatagaagcagcagtatatagatacagaatacagagcatgaaattgagttctaacttctatgtagatgaagaaattttttgataatttggagaagtcagtagcaaaatattgtgataaacgcaagtggtttagaaagaaggaaaaaaaaatcaaactcttcttcttctatagtttttttttacatcttagaaattataacaaaataatcaaatctggtacttttaggaaaaccaaatattagtgagcaatgcttctacctaagctcgagtttctttttacacacacacttgacacaacacaaacaaatagtgatatcatgaatcattcatcaagagtcagtcccattaccaacaaatccaagataaattacgaaagccttgttaaatggtaaataattgatacacctgtgtgagaccgagagatcgatcacaggcttcaaattcccccaagaacaattgttgaagaaacacaagtgttataatgattcaaggcttcttcctaatgctccattaaagcggcttcggtttctgaaagaggagctgcacaaggaaagtgaaatttaacttcatgaactctgtgaatgacaccaatatcagattttttgcaatctacgtataacttagagaaaaatctacataacggtttttcttaataaacaaccatttcttagtgcgttcttctatttagacgattaaactaccatgaaacatatgtaaaaaagaggatgg

SEQ ID NO: 28837 - DNA, 1517 bp, Arabidopsis thaliana landsberg
attacatttcaatcttgtaatttacagtttgtgttggcgtgtaattttaaaataatttaaaaaaaaattattccacaatggataagactttgaatcatgcatatgatattcagtcgtgttataaatatatttttatgtcaccatcttacatatatgatatatagaagcattttattttttagatttggatttttcaaaattagttgtttattaaaaatgaaaaaaacaaagagaaattcttaaacttgtcatttttggaagacaacttcaatctatgtaattgcaacctttatttatttcaatttaatcctcaccttaaaactgtatatatttgagtttatgtataaaaaaagtaatcaaattctggaaaaaaaaaagttgttgcatagagacttagaaatctgccgatcgacaaaaacaaaaaatgacaaatagtactcaactactcattgcgctaccgaattatttagttgtaggtcagttagcataacgtgtaactctttaaatgattttactgtttcaatcatttggataattgactcaatggcaaatctgtatataagtgaaatctgtaaatcttttctaacaaatatgagtcatataatctggctatttactacgaatgctgtaacataattaatctgcaacaaccaccaccactgatggtatccagttaaatatcatcgaaggctaaatcatagccttgtcagttgaattaagttcgataggacctaacacatgtggctccacagcaaaattttggatgtttcttctaggtactagctactgtttcttattatgtttaacatgttggaccactcactacttgagccaaacacgcttttaataatatgataaaaacaaacatcatctatttttatgtaagtttctaagagagactatttacacaacaatgccacgtttttgtatcaatctgttgaaggtccatgcctcctccatggctcactttgaaataaataagtctgagcctctcaaacaataaatggttgttgagcttttttgggtcctcttgtccttctcgggttagcgctgagcatgcaagagaatgcgtttctcaaatccgaatcctcttcactagtgaggaactttgctgcatctggatttgccaagaggagcttggccactaggtaacctgcgatggaccaagtctggtaaagccgtgcctgtttaccgatgaatcttgctcttttggtatcgtagtactcgggccatttgtctaaggaaatccgtctctcggctaactcaaccgccttttctgcaatctctggtctacccattttgatgcttgctactgtcagctggaaaaacaacaatatggaactcagatttcaaattagcacaaatgtggctttgcagttctcattgataaaccaaaccgattatctcgttgtgcaatccaatatgtcaaaatatcagttttagttcagatgcaaatcttcaaaccaaagtttaaaaccggtgaaccaaaagggaaagagagatatctgaactaacct

SEQ ID NO: 28838 - DNA, 1703 bp, Arabidopsis thaliana landsberg
  unsure (1)..(1703): unsure at all n locations
ttggtaacatcaaggtatatagatcttacattgtcatagttttgataaataacatgataatcaagttaaagatttctaatttgtttctaaaacgaaggtatttctgcacgctacaacttcaaagaagcaagcaatgcacttgaaaatgaggaacatagagtggtggatgaagaagagacatttgccaatagggtttagacagcgagtccgcaactatgagcggcaaagatgggctgctatgcgcggtgtagacgagtgtgaaatggttcagaaccttccagaaggtcttaggagagacatcaagtaccacctctgtctagacttagtccggcaggtcagattgatcgtcatgatttattatcgattaaagaaaaaaggaagattaattataacgatgaaattagttaatggtgattaaagtggatgagtactacaggttccattgtttcagcatatggatgatttggtgcttgagaatatatgcgaccgtgtgaagtctctcattttcaccaaaggagaaacagtaagtatcttcaaaccaatttaggggacgtaaacaaattaatatatataccaaaatcttattaaaaactgaaattacaattcgtttgtaaagtatgcttcttcatatacaaaataaaaaattgtaaccggtttcaaaaccatcataaagcctttgattgttagcgtgagatccaagaaactgttaacgtcaacaatgaaggcaaagtaatgaaatctttgaaaatgcagattcagaaagaaggagatgcagtacagagaatgttattcgtagtgagaggtcatcttcaaagcagtcagttactaagagacggtgtcaagagctgttgcatgnnnnnnnnnnnnnnnnnnnnnggcgacgagcttctctcgtggtgtctccgacgacccttcgtggagaggctaccgccttcttcttcaacgcttgtaacactcgagaccaccgaagcgtttggcctcgacgccgaagacgttaagtacgtgacgcagcattttcgttacacttttgttaacgagaaagtcaaacgtagtgctcgctattattctcccggatggcggacttgggccgcggttgcggttcagctagcttggcgaaggtacgtctcatttattgacttttaatctcactcattgatatcagtttatagaagaagaaaaaaaaagttgtttaatggatagaagaataatcttgtttcacacattcctcctgaatatatcatatggaaattttcttttaaatttgtttaaaattcataattatgttctcttcatatatcatatgcatttcttgattatgtaaatagttattaattataatcaacatgacaggtacaagcataggctaacgttgacatcactgtcgttcataagtccgagaagaccattgtcaagatgtgcgtccttagcagaagacacattgaggctctatgcagcaatattatcctctcctaaacccaatgccgtcgattttgatgattattgattgaactatttttttgctacgtttgagtatccctcaattctggaacacttaagtggtaactatttcctcttctcatagttcatgtggatattcttttctccttccgcctttcccctaggtttaacaagtcattgaatgcctctactgaaatctacgaattagataggtcaccagtctaatagagacagccagtggaatt

SEQ ID NO: 28839 - DNA, 1056 bp, Arabidopsis thaliana landsberg
cgacagaaacccgttcccattatcgtaatctttgaatgaatcaagatcatcatacgtgtcaggtatatcgctgtacttgcttggtgcaaagctatcgggaacattgggttcaagaaacgaaggctcgctcagagaggtaagtgctctcgaccctctgagaggcagggctttgctttctgatggaaaacgggaaaagccagttgctgaaagaggtacaaaataatgctcggagccctcatcggattgactatcccgtgatgagcctgctgaagaaggaatcaataaagccgcttccctcacagatttcttcaggttatggacaaaagaactgcttgtatctgacaccaaaattagagtgtaaatttgaattagtagataacacatattgtgatgaactactcattaattagtttgaagtggaataggcgtagaatggatgattggtaccaaaactaaaagcgttaaaaattcacatcagcaaagccttcttttgatattctattactatacatgtttcgttttagtagagaaggttattatgtcacaaaccagtcggtaagttgtctggtcgagcatttgatagtgcttggtctgtagagttcttctcagacaagctttccattttattgacctgggaagccattgtctgtcgcttttgtccatttcctcctttaccagaagaagtaggagtggaactaaataactgtggaagctttaatgtaggactagctgagactttctcgagctgaacattagacattgtcgaggtcagctcagcaacatcatttgatacaccttcctgtatcacaagaaaaaaatttacatgagcatctcaataaattatgcatcagaagagaataaaaatcaagtcatcccctattaccataattctcccactgccctgagattgtagaagtgaagatgcttgtccattacttctcgtaactggaggcaaggttgggggaagactattaaccatctcagtacattccgatatggacttttgtatggctggagaaactttctttaattggatgataagaacctgcatatagt

SEQ ID NO: 28840 - DNA, 720 bp, Arabidopsis thaliana landsberg
  unsure (1)..(720): unsure at all n locations
actagcattatccataatcatcaaataaataagtatattaagatttattaaataaatgtgtgcgtgtggatctgcatatactgtatggtgcatgtattaatatgttactatgtctatatagctagagagaggggtcgttatcagtagctaggtgcaaaatagagcaggtttatgtgatgttgaagatggcaacaactgtcatgtaccccaaaatctaggagtcttaattaaattagtgtttctaatcacctcaacacgaacatatagattgaaagaagtgggtccaaaaataatatgggcagaaactagaaagtataatacaatatcttttacaagtactatattagaaattctctatattgtgataagtactatattatactattcgttcctctatatatatatgggcaaaacttaggttattaaatattgagaaagcctaaattcgttcctctataaagttattttcattaattaaaaaaagaaaataaacatatatnnnnnnnnnnnnnnnnnnnngtataagagcttactaacaacgtaacaatatacattcacattatctaaccaaactgaatatagtgtggatcaaaaggtcagaaatttatgtttaaggaaattgatgagatacgaaggttagcagtctgaaaatttgcatgcaccttgaaaaaaatgatcgtacgtacgtttaatatagcctctatattataaacacattaa

SEQ ID NO: 28841 - DNA, 1155 bp, Arabidopsis thaliana landsberg
taacaggaacatttatgggtttcaagccaacatggagattgatggtagaaggctctcccttggaccttctaatattattctaagagggtgtgagcttaagaacactgcttgggctttaggggttgttgtgtatgctggtggtgagacgaaagctatgctcaacaactctggagcaccatcaaagaggagtaggctagagactcgaatgaatttggagatcattctactctctttgtttctgatcgtcttgtgtacaatcgcagccgcgaccgctgctgtgtggttgagaacgcacagggatgacttggacactattctcttttatagaagaaaggactactctgagaggccaggagggaagaactataaatactatggttgggggtgggagatattcttcaccttctttatggcagtcattgtgtaccagatcatgatacccatttctctctacatatcgatggagctcgtccgtattggtcaagcatacttcatgaccaatgatgatcagatgtatgacgagtcttcagattcaagttttcaatgcagggctttaaatataaatgaagatttagggcagattaagtatttattctctgataagacgggtacactcacggacaacaagatggagtttcaatgtgcctgcatcgaaggcgtagattactctgacagggaacctgctgatagcgagcatcctggatactccattgaaggtaaagaaaactagtttcttaataatgtttctgttgttaagagtagtatgtttttctgtttactgatttttgatgatgcctaaaaattttcatgatacagttgatggaattattttgaagccaaagatgagggtgagagttgatcctgtgcttcttcagttaacgaaaactggcaaggcaacagaagaagcaaaacgtgcaaatgagtttttcctctcactggcagcttgcaatacaattgtgccaattgttagcaatacatctgatcccaatgtgaaactggtagattatcaaggggagtcccctgatgaacaagcattggtctatgcagcagctgcatatggtttcttgctcatagagagaacctctggtcatatagttattaatgtgcgaggagaaacgccaaggtgatttagacatgtgatggctactttttggc

SEQ ID NO: 28842 - DNA, 2019 bp, Arabidopsis thaliana landsberg
aaaataagttgttttaaaagaaaaatttgtttccaatattacaaacgacatggtttctgtacaacaataagacgtgtttgtcgtacgatgaaataaattcaaatttcaagtttgttgttataccaaaagacgtgtttgtgttaaagaaaaaatgttattttcacttatggatatgttaacaaaaacttaagtttgttataatgagatctgttaactcacttagtgtcatagatcaacgaaagtttgatatttatttaaaaagtcaacgtaactttaatatttatttcgtttcgtcgagcgctgaagatttaaatcaacgtttttaataaattaggaattttaatgacattccaaaagtttttttttaattgcaaaataggcctccagtttttaatattttcaaatttaccttatttttataaaactatctaaaaccaaatggatgtccaaagctgattgcattgaacaacataaatgggacaaatgtgaaaaagtcccacatgaaaaaaaaaaaaaaaagtctaaaatataagtgaggctgtgtctaggcccaaaatattagaacctaagtatactagaaaatcagaactggactcaaatttgagcctagataattagatagtaggctttataacctatctttttggctcataagtattttgaaatttgtggtcgagttaaccaacacacacaatcaacaacgtagtcttttgtttccagcttccttatccttgatatgacctttgtgtctcagagagtcaattttatacaatgatattccaataaaggatacaaagtgacactccccatttgtctttcatacggaagcgaattaatctccagagcaaaacaaacagagatcaagaaccagacaaaaccttggttagattgctctgaagtaaagcaattgaatcaacagcagatttagcaaaccaactgattccgaccttaaaccggtgttcatcagttggtagtctaatcaaatacgccagttttctcgctgcgtgaccaattggaccttcaagtgtaagcccttcaatgaaacttggcgatatagcagcatcatatcttccaagagtcatcatctcacctaggttctgaaacctgcaaacaagattaaacagagcttaaacttctgttttcaatacacagatcagtaaaaagtctattagttttacctgaatggtaataaaggtcggttatttatagctgcccatatattccagccagtaaagtctgcttcttgaaaagcaacctgaaatttttgattgccgtgtcactctgattaagttatagaacatgaatgtgttcatattttgtagccttttttctcacctgagctgttgtaggaagaatctttccgtttgagtctcttagagaagacgaatcacctaatgcaaatatccgtggatgtcctttaacacggagtgtctcgtctgtttccgcttgtcctctagcattcaaaggaaggacattgggacccgagggttctaatttagtaagcaaaggcttagcaccaactgtccataacactatatccgcttcaataatttgactctctaatcctctttctgcaggttgaagctctaaaaaatatccttcatcttcttctaggttgcttgctctctttatggattgaacaagataacctaagagtaattggacttttctcgacgtaaggacctaaccacaatccaaaagaacactattaccatcttttactctgtctagtcaaatggaggatgcaattggaatgaaagtaccttcatagccgcttctctgttcccatcaggggctgatgttagtatattctttgatacgttaatggactgcactattccacgatcttgcagtctctctgatatggtagcagccaactctactcctgcataaccgcagccaacaacagctacttttatggcagatccgtctttaaaattcttcctctccaatttactcagcttttcgttaaccctctgcaatagcatagtggaagtcacgatttagtcaaaaaggagt

SEQ ID NO: 28843 - DNA, 1904 bp, Arabidopsis thaliana landsberg
tgtgtaagttgtaactagtgctctttggaaaatttgatataataaacctcaatagcttaattactcctactaataagctttttttttgttaaaactaataagcttgttgaccacctttttttttatgattgattacatttgtcttaaagatgtcgccgtcagttagataacgaatggtcttgtgccattgacgacatactgtttaacgattttgagaattaacaaatatataaaactcatgagtcagaagaaaaagtatgtacataagtttgtgatctaaactgtccccatcaagtatatacaaccaaagcagattatattcttttttaaacgaattgtgtttttctttgtagagtctaattttcaagtgtacaaaaaatcatcaccgtccagttttggaaacgaataaaaaattgtcaagacgtcccaatggtctgatgaaaatgtattgcaagcatatctcacacttccaagtgacaatcactatattatttgcttattcgtaacaaaatatacaagattacttagttatctacaaatattataaccatcctatgattatattaccccaaaatattttaatataactataaataactcgtaaaaaataataatatgaaatatatatacttgttaactaacttacattttaaaccgtaacgacaaaatccgacaaaaaatcatatatattatagcgaattttgacaaattacgcatgccagtgtaggatacgatatgtaatttataaaattagtatgtctcttgatggaaaaaaagacagagatttttagttaataatttttcctcttacttaaaaaattctaaaatttaggactatctagtaaagaatagattctccgagtatttagaggccaagaaatgtcattcaccaaaactaaaacatacgggaagtttcgacatccatttcaatagactacacagtacactgtcaatagtaaaaaaaagtcccgacaaaaacttgataagaccaactaaaatcttacaatctgaataagccatccttaaaataattgtcagattgcgagggcatgtgacccacgttgtccgaaactccgcgattgtggacattagccacactacagaaccacatgaatagagtctagaaacacttaatattggatctttgctattcaatctttcaatgagacgtaaacatcgccacatgtgactcatcatgaaacacatatctgtcaaaatttaaaaatagaaagactacaaaatttacatgaacaatcttcacaactctccagaatctcaattagagagttttggttattaacctttgtgcccatattgcaacatcacatatataatgtacagcaactcgtcgtcccaatgtttttttgtttgttttctatgtttgacaataaatgagagtcttgagagaaataagaacaaaaaagggtcaagaccgacccaaaccggttctacccggtactgttgctctctgaagtaccctgctcgctctgtcttcgtttctccctcaaactctctccccacatcttagcctctgcaaccgcacgctccctattgatatctcggttcaatatccgagctgtctctctcggtgaatcttctttctctgaaccttctaaatcgaatttacttcccgagccacctccatcgtcgttccttgttattaaccttgcacctctttcatcccggtttcttctactatcatctttacttggatcataagcttggtttgcaagataggagagtgcagtgacaacatctgctatgagaggacgtgtagccgcctgttcttggatgcacattgatgccacagctaaagcttggtagagtgcacgcgttggaaaccgcccctttaaccttggatcagccagttttatgaactttcgcctgtcgttgaacaattgggc

SEQ ID NO: 28844 - DNA, 2498 bp, Arabidopsis thaliana landsberg
  unsure (1)..(2498): unsure at all n locations
cgggagactgaaaaactccgatagtggttaggatttcgccggcgggaattgggaagctgaagaagggaaaacgttaccgggaatctgatggaaacgcgacagcgattgagtggccactctgtgacgggtgtggctggaagaagccgatcgcgatttttcctctctttctctgctttttgcgtttgcgccgcgctgtacggattttccaaggcttttctaagagttatgggctgggccgagttctttggtcatgggtcatagcccaataaattacaccggttcttgcctgactatttgtttccgtttgaagagatactctgattggttaagaggacacagactgtgagactggtttgcgttgggtccggtcttgattttgttccaatttccgctcgacttagatgtttctttgcctttcttatcgaaacattttttatagcctgattatgtgaaggagttaggagaattgaatatgggtttatcgaaaaggtgattattgttccaatcaaatacccccaggtgactatcggcatccttgataagtatagatatagtttgtgggggagggtgaccacgattaccaaaattaataggggactccagcaataagatttgctttaaatggtgccgaccaaataataaataacatttgctttaaatgggccgtaacgtataaatccagatacaaaaataatggaaattagtccaatanttaagaaataatggtacagaaatagctagctagctccagctcccccaaatcgtcactagggaacaaactgctttctactcgtttttttttatgatttcttttgcttattctgttatggactntgtattttcttgttttctattcgtggttctcttgtggactgattagcgttaacacgttataaatcttgtatactttactttttgtgttatacagaaaatcttcgagagagaaagataacgaggcataacacatgatttttaccaaaaaaatatattaggaagacatatatatggcttgaaaatgtgactgaaaagttgagattctaacaaacattttgtctcaacggttaaaatgtgattgcactctctaaaccgttagtgtgacatcgtgagaaagcagcagacacatgactatgatgttaacatttattatcttaaaatgcatgtagtctttactctttagcatgggagaaaaaacctcaatccaaagtagagtttggttatgatttcggtggtttggcatgtagtctttagttttgatagagaaaagggctaagagacatgcattgatgatttgattctagtttatgctgttatcgactctgtgctagccattatatttgtttagagtcagaatttatgatcagtacgaaaattccaaaaacaatttctatagatatcatcattgatatgtgtccctatatattaatttccattaatgaattcaatttaaaatgaaataaaaaatgttggttactatagtagttcctaaaatcaaatttgtaaggcatgaaagatgaaagaagggagtcatgtttttaatgcatcctctttgtcctcattcactttgttttctttcccttttataaaaacctctctccctatctcacacactcacaaaagtgtctcccttattttcaggcacttcaaaataaatatacgaaaataaaataaccatttcttaagtctaaagaccttctctttcaactagaagcctttaagccatgtcttcttcttccttgatacttctcttctctactctctctctctttctcaatgtctcactcgcagacaatcacacggcggttgttataacaacctcagatactccaccgccacttcctccgccttctccaccgccacggcataacttcacttcctctctcatgcccggaatcgcagtcgttatcgccgtcctcactgcgtttttctctctcactttcttacttctcctctacgtcaaacactgtaaacgacgaaacggcagcgtttacgtaaaccacccgcagcgtttcgcaatcactagatacggaggaggatattacaacggtggaggagtagtaggaggaaggaaaaactccggtatagaccggtccgtgattgaatctttaccggttttccggtttggtgcattaagcggtcacaaggatggtttagagtgcgccgtgtgtctcgctcggttcgaaccgacggaagttctgaggttattgccgaaatgtaaacacgccttccacgtggaatgtgttgacacgtggcttgacgctcactccacttgcccgctttgccgttaccgggtcgacccggaagatatactcttgatcggtgattgtaactcctggttcgagctccagttctctaaagatgaatcaaacagtgttaataataatcctcccggtttaacccggtttattccggttagtcgaatttccggtcgtcattcctcggctggtgaacgagcgagtcgactcaacgagattagaacatcttcgtcgtataaatcgaat

SEQ ID NO: 28845 - DNA, 1474 bp, Arabidopsis thaliana landsberg
taactataaccaagactagtttttgggaagaagacatgtcttgtctaggttggcttcaagaacaaaacccgaactcagtcatttatatctcatttggaagttgggtttctcctataggagaatcaaatattcaaacgttggcattggcgttggaagcgtcagggagacctttcctttgggcgttaaaccgagtgtggcaagagggactaccaccaggttttgtgcatagagtcacaattaccaaaaaccaaggaaggatcgtctcatgggctccgcaacttgaagttcttagaaacgattctgtgggatgttacgtgactcattgtggctggaactcgactatggaggtacatgtaacatattgatatacactagtaaaatctagcatgtattatatgattatggtatctactatataaattaactttatacaatatgtgtattaaattttgatttattgcttgtacaataataggcagtggcaagttcccggaggctactatgttatccggtggccggagaccagtttgttaactgtaaatacatcgtggacgtttggaagattggagtgagattgagcgggtttggagagaaggaggttgaagatggactaaggaaagtaatggaggatcaagatatgggtgagagattgaggaagttaagagacagagcaatggggaatgaagctcgtttgagttcggaaatgaattttacattttttaaaaatgagcttaattagacgagcgaagagtgtcgatgtcataatatttatattttcattgttttaacttcaaaataagcacttgaaaatgtatagtgttttcgaacaacttgaatcaatgatgttttgattcaacgattgtagtttttatttggttaaacatttggtatgaaagcattttaaccatattaacgaatatatttgactctagtgaccaatttatttattttaaatggagacaaatttctttggagagccatcagtattcagccatcatattcaataagattagttaagttgatctggtcttatatggtgcacgcatgtcaatcatcttaaagttgaaagaattaaaagtagttgacaaaattaagagaaaaaatagcgacattatattggacaacgttttcctcatacgcctttatataatcataaatagattgtagtatatagattctctagtttatttaatgcatcattgatttttttttacatcaaacaagaaaatatcatattagtaactaactttattagataattaactattagttttataattgttttctttctattttatttatgcattattctttttttttatttttttcagcatcctttattattttaaattttttgttactcactttatgcattatttttaaggtcgtttcttttgcagaaaaaaataaaatacactaataattaaagcaataatatttttctaacaaacaaataaaaaaggattactaaatt

SEQ ID NO: 28846 - DNA, 1187 bp, Arabidopsis thaliana landsberg
ggatctgtgtgtgagcgggctcatctactccgtatcaaatactatgggagctttgacaagcctttaggacggtttttaagggataatctctttgatcaggtaccattcattttaagtgtgttttttttatctcttaatctgtagcacaccattctccttttagccaatggtgaggaaactgaactcctgatggaaccaggtggaccaactaatccaattaaaattttatggttacgcactttttcccatttttttgacatgaataattgtggaagtaattaaataggtatttagagtcataaaagcaatccatgaaatagtcggagggtaagtttaagaaagagaacgactggaaggaaaagcagaaaaatggcattaatatggtttaaagattccaggataattaagtttgtaagatcaaaagttaatgaagcctatcatgttgtaattagcctctggttattaatagctgaggcttgcattaatttccttgcattaatctcctgttcaggatcagtgctgcccgtcatgtacgatgccagcggaagcacacattcattgttatactcataggcaaggtagtctgacaatatctgttaagaaactgcctgaattgctacctgggcaacgtgaagggaagatttggatgtggcatcggtgcctgaaatgtcctggatcaatggtttcctccagccacacgcagaattgtaatgtcagatactgcgtggggcctgttcttttggcaatttttggagctgagcttttctaaccatgcagcggctagtcgtgtggccaactgtggtcattcccttcacagagactgtctccggttctacgggtataaatagatgcttcctaatataaatattttctgcggattgtttcacttgttattacacattactgattttccctcgtccaatatgtctgattctcaagtagcatcttgcgtaatgcaatcaggcttagcacttagtatatattacatcagatgtactgtctagataggctctgcataagtagtactgtagtgttggtcattcacttctctaattgtcatctattcggcaagtgtcagtctatgtttgacggttgtggccttgtattaaccaaccacgaccacgccagtaatgagtatcaaataaaaaattcttaatgcagttttgggagaatggttgcttgcttcc

SEQ ID NO: 28847 - DNA, 2449 bp, Arabidopsis thaliana landsberg
tgaccgctatgttcatcggttaaaccattcaaaaattgatggaaagtcagtagagatgagcaccagttgtctgtcacaccaaggggactgtggtctctgtgagtgtagtgaggatacaggaattagcggagctatctttaacagcaaagttgattcagtatgatattcaaccacccttagccatttttttttcctggaaaaagaatatgaatcttagatcatcagtttgcctcagtggttttatgattttatagttaactaagtttttgtggaacagattgtaatcgagtataatgaccttcttgcaagtcaactaaagggacagcgacaggcaagtggttcttctgatgcttgtttctttctcttcttatgtatatatgaacagactgaatagaaggtgaagttgtagccacctaatggtatactgattcaagagatctcaactacttgcaattgtgatgtctttcagtactatgaatctctcattgttgaggcgagaagcaagcaagaaagtagtattgccgaagcagtagagcaaattgttgttaacacaatgcaggagcttcagaataagattgaaaaatgtgaagaggaaaaaagtggtatcactgaagtaagagtatctctgcctagttgatcattgttcaattctcgaaaggtttccttatgcaacattgggttttcaggttaacacaaaacttataaaagagcaggatacttggcggaagaaggtcaaagaaatagaagagaggtgcaagaagtttgctcttctttcttgattttacataaacaatcatcagccatagtagaggaatgattttatcttttggtgtttatctagggaagctgcattgctaggatcaaaagacgagatgataactgatcttcaagaacaggtaagtttcttatacttattgaggtttgctattaacagttaacgaatgacctggtaaataatggattgtacagataagagatattacggtcttcattgaagccaagaaaaccttaaagaagatgtcatcagatacggatggtatacgcgaaggaaccgtcttaccggtgcctatcagtgccgagccagtttcctcagttagaaggcaaaagaagtcaaaccggagaaagtaaagaacagatttggtatgcttatagggatttacttaggtttgatgtatattcaggactactacattgatatatattggattaggtgctattcatttgagtgttcatgatcacgttctaaagcccataattcgtgtttcacctattattagacatatccttgtgtgggcccagatatatctataagcatatcctttcgaatgctttgcgactctttgcaatttattagtttctgattttcatctcaagtgaagttatataagtagtacaacaactacatcacctccttgcacgtttcttcaatcgtggtgaataagaagacgcctcctctttttcaccagcttctctgcttcgctttgctagaataggataagatggagcagcttctctttctgagtttcgaccattattgcttctcttcacaggacttgctttcttatttgtttgtcttatccgtggtatcggtgttttcttattatcagctttgttgctgttattcttcctctgtaccgctcctcctccttttcccgtagtagaagaatcagcagcagagctacgcttcaatgtgtcatccgaagagcccactttcattctcctgagaaaactcgcagcccctttctttttcgagccacctttcttctcttcatcagttttcttaaccttatctttgctatcatcaacattcaaactggagtcacggttcttgacgttcctgttagctacttttcccgtcgaggaggttcttcctctagtcattatcttcacaatcagagagtcatcatcgtctttcccagaggcttcaccatccttgtctgaaaccggcttctcatcatagtccacaacatgatctgttttcttggcctttttatctggtccaggaggcaataatagcaaaggtttagcagccaaggcactacgtttccgacaagctacaatattaggaacagacattcttggtttagaagaaacaggctttgatgaagggattgcaacaacttcttcttttggtggtgagattgagatctcatctctattactaagtcccttgagagtagtagtcatctgtttcttgacgagttggtgaagctgctcagcaaatttaaactctgaagatcctctgtgataaaacactcttgcattattaacaagtagcagcaaatcacgaaagaagttgatcctccaacttttgtacaagcctccttcgactcgcttccgaattatctcaaaatctacgtgctctctaattattgtaccgtactcaattgtttcctgcagcttcaaacagaaaatgcatgccattagaacaatgtagaaatataagcca

SEQ ID NO: 28848 - DNA, 2001 bp, Arabidopsis thaliana landsberg
  unsure (1)..(2001): unsure at all n locations
ttcaaaaagagttaaacaaactcaaacaaacaaaggcacaaaaagtgcatatatatcataataagtattttgtaggtggagaaaacatagaataaagtaggttgttcttaaaacaatttaaacttcaaatgacaaacatatttacgataatacccttaatgtgaatcatgcaagcacttcaccacgaggttgcaaataaacacgtaaaccgttcttcatgaaaagcgtcagancnatcttttgctcaacgcggtgaccgggaaccggaaaaacccggtaacggaggagaacggctgaaccaccgacatcgatctgattataagccaagtcctttcccaagcaagtccttggtccggcgttgacgctacgaacttgtaaccatctttgggagtctcaaaccgttcaccgtcggctgtcagccaccgttccggacggaactcgagacaatcttcgccccaaattgttttcatacgtccgatcgagtaaatcgagtaggtcaccgtcgagcctcttggcacgaaagtcccgtccggcaaaacgtcatcgtctacgacgtatttgaaatcctggtcatttgaaacgttactatacgttacacacagctctttattatgaatacatgatgagtaattttgcgtcaattcttcccttttttattttggtaaaaataacacaaattaaatactcaaattatgattgtaagtttgtaacagtcatttgatactagagctagcagaaaaagaaatctgtaatattcagcttaaaagaaaaaacaatggaattcgtcaactagtcataaaagatttatttcaggtgtttctataaaagttgatatacatgtttagacataaatcaatatttgtgcaatatctaattctttctgaatttttacgttttctatgtaattctcgcctagccaaaagcgttatagttaatgtttccatgaatgcaaatagttagccgtcaacaaaaaaagaatgcaaataattaaagagagaaaaataaaagattttaatttatcacctgaggcacagaagggtataaacgcagcgtttcagccaaagcagccttgaggtaaacgagcctatctgcctcgtcgaactctaacggctcctccgtccatttctcctgatcattgccacgtgtctccttcagaaccatcgacaactcgttaacgatcttcgtttccacctcccggttattcatgacgagccagaagaaccagctcaaggccaccgaagaagtgtcacggcccgcgagaacaaagttaagcgcgatacgctgaagaacatctgttggaagaacgttaccgttaacgtcacgtttcttcaagaaacgtgacaaaagatcatcggagggagagtttttccgagcgtctattgcatcgttcatgtaagtctcaacgacttcaagactcttcttgagcttatcttctgatccaatccccatagctttctgaatcctccacaagaaaccggtgtagagaagtctctttagagtagcctctgtcgcggtgtcaaaagcgacagagaagggattatctggtagatccagagagagcgtctccgggtctttaccaaaagtcagaccacaaatgttgtcaaaagttaacctcaaaaacaaatcttgaagatcaaccggtttgttattttgaaccgcacggtctaatataagccataaccggttcttgatagtcccgttaacccaccgagccatggcttgtctaagagttctagtagtgaactcaagcgctgcagtcttacgttgcataagccacgtctcaccgtcgctgttgaagattccttgtcctaacagatcgtggaatgcagcgcgccacatcggacctttcggatagttgtcgaaccgtgtcttaaggatatgctcgacgttttttgggtgacacgtcacagtgtaaaacccttgcgtcttggctacgaaaggtatcaccatggtgcatgtttgatacgtaccaccagttgctcggagattatcagcgatcca

SEQ ID NO: 28849 - DNA, 1792 bp, Arabidopsis thaliana landsberg
  unsure (1)..(1792): unsure at all n locations
gaattgtagatttgatgtgatatataccgtgtaaattttgacccaagatgacacattttacagtcccttagtttcatttcctgttcgatatgttgtgaatctgttgttagttttgggttttgtaagattttacgcagatttttgataaaggaatggtcttgctaagtgtttatcatttggtggtttttagggagttgagaaacttattgcatcaaagatgatgctaccaggttccaacaggagaatccattctgttcatcgtcatgctggcatggtatttttttttctcctaaactataggaaattagtttctgctgaggatatgtatctttcaagttttttttaattactattgtgtctaggctcgtagtatattattttgtttcatgattatgggtatttctacttctgtcatgtcaggctgttgctgggcttgcagctgatgggaggcaaattgttgctcgtgctaagtctgaagcacgaagctatgagaggtatcaatgaaaacatcagtagcttatatcttagatttattactatgaaagaactgttcaactcctaaagcttttctcaaggggatgtttctcttagttaaacgttcaaaatatttttnnnnnnnnnnnnnnnnnnnnnnnnnnnnaaatatatgggtataagatgtcaatgtgtatgttctcctttcttcctacatggctttgcataactttttccgactgtgtaaccaactctaccttcacttgtgataatttagtgtttatggcgatgctgtacctgtgaaagaactttctgagcgtgttgcaagttatgtacatttgtgtaccctgtattggtggctcaggtttgtccaattcatctacctctttggtagtcacctacgcatttctcctacttgaatgaattataagaaaatggtttttattttgtaggccttttggctgtggggttattcttggaggttatgatagagatggacctcaattgtacatgattgaaccatcaggcatatcatatgtaagttatttctgcccgtagatatgtgtctttaagtatgaaattttacgttatttttccctgtcatcatatgaattctattcctgcagagatactttggtgcggccattggcaaaggaaagcaagctgccaaaacgtaagctacagcgtgaatgtatttggtatcatactagtattttctaggattctcttatagtggatatgcgtagtcactaagggtatatactatgtagtaccactaggattgatcaatttaacttgtccgaaggaaattctaactaacttaacagttaaatcaaagaaatcatttaaacttgaaggatcaagtgagctttcatggttgataggattgatgattctccataaatgttattaagaactttatgacagatgtttctggattgcataccttttggccgcctttgacatgtgtggaactagtttcaactaaacggttatagatttagttatcaaaaaggcaagggtatgcaagtgttctgatggatcagaggatttcttgcagggaaattgagaaattaaatttatctgagatgacatgcaaagaaggcgttatcgaggtggcgaaaatgtgagtagtgcttgcttctcatgtacatgttttctggttctcatgtgctttctataaccaggttcattttatagcaagatgtgatgttactttttcatgtgcagcatctacaagctacacgatgaagccaaggacaaggcttttgaattggagatgagctggatatgcgaggagtcaaaacgagagcatcac

SEQ ID NO: 28850 - DNA, 647 bp, Arabidopsis thaliana landsberg
aaataaaggaatggataatttttgctcgagtgtgaacatcaaataagcataatatatagcctaatgcgtcgtcagcgtacatcaagttggccctatcagaaacatagaattctaacaacggtcaattgtggataaccaaacggtgggtgtggagataacggcgataaaaacggcatgctcagatactccgtcaaatcccagtcatctatcgccgtcaaacgtgactcaacattctctccgtcgctaacggcgtaactctcctccttctttagtactttcttaacaaccgtcacttcctcctcctcgccgtttctcttccgtttgttgttcaggccacgaacatcttcagcgcgtggattccacttgccaacttcaagcgggaaattcagaatcgcctttgatcctcgtagtctaaacgcttctttgtcgtaagctctagccgcttcgatcgccgtctcaaacgtcccaagccaaacccgagttccacgacgagtcggatctcggatctccgccgcgaatttcccccacggcctcatcctcactcctctgtaatgcctcttctcttctgctgctacaaccggttcgggaagttccggtttaggatttccggttgcgaattgaatccacttggttcggttcggtggtgc

SEQ ID NO: 28851 - DNA, 1502 bp, Arabidopsis thaliana landsberg
agataaataaataaaaataaaaatttgagactacatacaaatttttatgaaggaaaaaagtcaagggaaagcgatctcttattgaaataagagtaacaagccatagacataccaatactcctttcctaacatttccaagcggacctcggtacttttcataagctgcaagaacgcgatacacaaacagcaatcaattgaagaagaatgtaataaaacgtaaaacctaagatgcttctaactaccagacagatatgtttggatctatgatgaatcctcttgcaagaaaactaatgatatctgaagctgaatttgtgtttagcagatatatgcaagaaatattatttacatagatgattcctttagaagagaagtcaactgaattgatgcttatgaaagaagaaaacattgagaaaatagatggataaatagcggactggagttgcagtaaatgcaagtagaaaagtttcatacttaggaaagcacgatgcatgaatccagttcctcgtgtgtcgctgctaaacacacatctgtacccaaccagacctctgcagaacacaagtatacgtaggttatatttcttcatggggaatgattcaatgagcagcaagcaagattttataaaagtaattaaaaatagtaagctaaccttgaaggacaagttagtgacagtctcgtcctaccctcatttccagggacagggcccatgtcaataacttccgcccgcctgtgggagagagcttccatcactaatcctacgtgttcatcattaatctcaatagtcacctcttcaattggttcaagcttttgtcccttttcagttttatacctgaacataaaggacaaacgctcagaagtcagacgaagaagtacaacaaagtttgtagaaataaagacactataaggagtttttctaggctaaaaagtaatccatagtcgaacaaacaataaccaagtaatgtttagtgtaatagtaacagcatagaaatcaggtaacttggtaaaaaataaaagaattcttctattgctttatgacataaactggtaagacccttttcttcaaaagcccactaagaacctctacaactaccaacatctaataacctcaacaactaactctgattatacgacgaatatagtatgtagtgtaaacaaagagatgtgactaacatgactttaggtggtgagactgagagctcaaaaccttcccgcctcatattctcaatcaagatacctgttagacacgacagaaattaatttacctggcatagagaaataaatacagttacgtgttttctggcgtgtgtcatactttatatccgtctttacaggtgaacaaacactaaacacaaactggaaaagcacaaaccaagttgaagttctcctctcccttggacttcatatgactctgacaagcctggaataacgtttatggcaagatttgtttcagcttctgccattaaccggtccccgattcttcctccagttaactgcatgcaggttag

SEQ ID NO: 28852 - DNA, 2069 bp, Arabidopsis thaliana landsberg
gagtttgactagttgaatctaatttgttttttggttttaaggttaataaagttgatatgacttggttacaaataatttatgcaactcggccaaattcagccgatgtacatggttaaaccgcaaatcaaattgtctgtccggtcgaagtttatttctgatcataaccaaatattgttttgatccaacacaacaaactataactaaaaattggctaaaactccatcaaagccaaattaaacccaatatatggttagtttcccgaaagaaaaggagggcgctgaaaattgaagcagtgtgggtcaatgataaacactggaaactgaagcgacttatgtaatggatattaattctgagagagaaaaccactacagtttttgttatttgcatgcatcattaatcatgcatgccacttatattattgggtacttaagataacctatacataaattgcatatactgtatacacacaaagttcaaaaaaaaaaccaaaaaaaccccaaacaaatggacataaaagggtttcaaactttaaggtttacccatgcatattcatgaactccagtaatagtgcataattatttctagaacttatgattctgataaaagatttgaattaaattccattatagttaaaagtggatattctagttatctagtggacctagtggtagagctctaaaaccatataatttattcttttaagatgagttttaagctgaaacaacttgttaataccttgttttttcatgcaacttgaattcatcaattttgaactatatatatgtcacaattatcccttaatcatatattatatatcatcaaaagagatgattacatgagatgttgtctagtgaattgtacttctgttctcaatgtgtgtactcagaaaaatgcttgctaatgatttttttttttaaacggaatatatgccacatgaccggtcactagacaattgaaaaatatcagtagaccagaaaccatttttcgtatcactaccatatagatttgcagtatttgttagccctaagattagcctaacacctagtagtctcttagatccaattttgtaaacacatatgagcgtatatatgaatgcatggcacatgcggatatgtccagctttggtatgataaggagacacaaatgttcatttgttatgttttcacatcacttccctatttgtgtggcgtaatggggtccttcctcttcactttgttgcccacttgtcctatacactctctaacctgtcattttgttctctatttgtctcttaattttcttataaaaataaagacaattccatgtttttttcttgtttctttttccttaattttatggtcaatttttgttgcttttgttaaaaatatctcgagctcctttcacgaatatctttgagtatacccaccaagatctgtacctaccatgttccataaaatagcatctcttacttagagtatgtaacgatcaaactataggatttgacgaacttttagtatagtaagttagtaacacaattttaccaaaaaaaataaaaaaataaataaataaagttagtaacacaaatgctaatttgaattttcaggtataattatcggaaatcatctatgagtttgagaaatgagaatatttggtcgtttacgtgctctttattcatctgcttatgtttcatttactctcagggactttaactcgtgcttttgatgtcaacaacataaaaagactttattacaaaatgcgttagcaaaaagccaagtgagtggagaagttttatttggtgtaaggaagagaagcaagaaaggcgagagtaaaaggagaagtggatttgccaaacattgtgcaaaatggaggaagtctttcgagaatcctttggacttgtggagtgcgacggttcaagtcagttctgagtttcaagagaggtctttgcttcttcttatcatcagatacttcttcctccttgtaaagtttgagaacaaagctagttggtgcctttttcccacctgcgaattgaatttgatgccatccttcttcattgctgcttttctcgcctcgttctatcatcaactcttctt

SEQ ID NO: 28853 - DNA, 986 bp, Arabidopsis thaliana landsberg
taggcaaagaagaagaagcaatgttcatcttcgtaccatcagtagttagtgcactaagagttccattttttgtaggattctcaggctcattcaaagcaacggtaatctccttagcattactggctggtgcatcatgaagatctggaaattctgcacagaatcaagactgtagagcatgagttttgaatgaattaaccatcttgaccatttagcattaaagtgaaattggaatccatttcatgcagttaaagtaaggttggctttcttatttcatagctgtttcctacctatctcaggaaaatacgtccctctgattggaccacaagttataacaaagaaagagagtttttcctttaacaaacaaaccaacggattattcatgtagtgtagtattcaaagaaaactaaccatcttcattcactttaatcccctttgatggggtatcaggggtcatcaccaccttggaagaaggttgagaatggatctcttgtggactgctcttcacatttgaatttacatcttcttgtctctcacaaggcaaagtaggcgatccggtctggttcgagttcccatttttgatactcatgaatgcaactttagcagcgctcatttcagccaactttttggttttcgcctcttctccactgaaaactttaccagcaaactcaacagttgaagtaaaagtaggcgcatgcgatggaccagatgtagcagttgcataaaatggtaacagagaactctctttctgtgcaatttcttgtaacaggttcttgtaggcaacatcaattccctgaaacaacaaaaatttgaaaatcaaaatttaaacaaatgttgaaaaagcacataacttgtagtccaaaaagagtgtgaggaactagcctctggactttgtggcgtcaaagaagcaactgcaatttttgcagcggcatgttcagccgattttagtgtcggaaagaattcagagctctggaaagtctgtccacagc

SEQ ID NO: 28854 - DNA, 2206 bp, Arabidopsis thaliana landsberg
catgctgacttagcctaaaagtagagttagtaaaaagatcctgactctatcattacccgtttgtatcgaactctcaaatgcagagatatcaccgagcagaacaagaaagatttgcaaggcaacgacctccggtgcctaattttcctcctccaccactttcgccgcctccaccagttttaatcagcagcgatttgcctagaaaaatgtcaagtggaagagcaacgccgcctagaagacgaggaagagacagacggtctggtcaaaggggtcacaggaaagctaacttgccagtaagattaccagattcagcttaagagttggcgtccgtcttcttcttcttcttcatggtcactctcatcaccaacatcacattccaattttaccacacagtatgtttattttttttgtttctctatttgattctaaggattcaaaatcaattttttaatgtatatatatacacgaacattttgtacttggataataaattatagtttcgaatttttgaagttcaaaatctaccaaagagaccatcggagtttggttctgattgtaatccatcaacttcttacaaattatcgaagtctcttgttatactttcttttttttggtcatacaaatgtaaaagaatttatattggatatttatactttaatagctcagtgtttaatttatttctttgaagaacttaatttttagaatttatggtcatgtgactcatgtgcgtatgctgcaccaattatgtctcgtagtagacgatcttgaatttatgatattggcttgaatgcattatgcatatatctaccactatgtcaattcattagaattcattgaacttttctttctgggccatgattataggttccatcataaagagaaatcgacttgttggtaatcaataacgaccatttttcttttctgttgttgataaataataggagtataattatgtttgggttatttacgtacacatgtgtctcacatagcacatcgggtcaaaatcaatatcgccagtcatgttttcaacactggaataaagtcagcatggaactcacatcaatttggagaggaaagatattatctctgactcaacgttgataagtatatctaaagtcactctttacttggcttattatgaactaacaccaccattcttgacttggtcttaaagctataataataatgtaacatactaacatatacttcaatattctaaaatgcactcacatcttatgatatttcatgcgactattacaatatatcaacccactatgagattccctaagactattactactgaatatacctaagacccacatcttatggtatgcactcagaaccgactatatctaaaccaaaacaagagaagctttgagtaatttgcggccgaaataggtctatatattgtataggccgcttcatttgttgatgtatttagtatcctaacgggtagaaaccttgttaaatatagtggtgtagaaaccataaattgaatcacttctttcaagccaacgactgactacgcgagttcaacaatggagctataaaaacaaaacaactagttgcaacaaataataatcaagtctacaaacaaaatagcttaagtcagcattccatgtattaaagcatatgacaaaatgattgattacaatagtccgtaaacgaagacaaatggatactaaagataaatttctaatcaagataacttttctataacaatatcctcatctaaagataaaaccaagtataaagatatttctcttaaatcacgtctgttttttcttctcgaaattttgttttcttgctttttatacacacaacgaaaatttagcgtaacacagagagacgatttgtttttttctatctccacaattcaactctttcttttgtcatactcaatgtatgtagagcagaaaataacacgtctctttttttatcacgataaaacaaaggaccatccttagttggaaattcaaaccctagtagtaagtataacgtttttaaatcgcatacgcgcccgctatgttatgtcccaccgttttaatttcccaacttccttgacaatgtatcacacgatccaaaaccacatacaaacaaaacacacacaaaatgaaaaacatataattgctcattgacccctcaagctgatgagaaatatcatcaaaaaggcccaaacagaggacatcataacagcaagcagcaagaa

SEQ ID NO: 28855 - DNA, 1924 bp, Arabidopsis thaliana landsberg
  unsure (1)..(1924): unsure at all n locations
taagccatgtttgcctggatttctccaaaagaggttttccaatttagaatacattggatttcaaggaggagtgggaatgcattggatttcaaggaaaagccaatagaatcggtgataaagcctaaatatagtaaaattttacctcaacatcgttgacatatgtttcacaattaatttcattatttttgaacatgacatttatcgctacatatcaaccttatcctacattgccaatatgaaatatttatgcttggaaggtggtcactcaagtttctgataacatgacatttttttccattttagctattgttttttttatgttttaggaagcatttggtgtgattttaaggtcaaacaggaaatattcaagtatttatgaaatcaagaaggttttaggtgttttggagcaaaaaaaaaaaacaaaagacgatcaaaatgcatttttggacagattcgtagctcaggttttgcatccatttaagacattcccgtgcaccaaattgagagattttggactctatggaaatgtagaagggtcaaaaaccgcaatgaactggaattgtggctcggtcagaccatttaagtttacccacctctccacacctatatctgcatgccaaacacaaatgaacagaatacaaaaacagacacatttataaatattagtttccatgtagactcgaggatgataattttaacgcaaatgactgttgcgtaaaacaagtttatcaccaaaaaaaaaacgaatcatcttgttctctcatgcatatgtttcatacatgggtacagatctctgtatgcaggagaagagacatgaattacatgattatacttactacattatcggagtggaacacagtttaaagatgttcaaagttcactcaacacagatttttgaatacttttagttgcttgagacactgatatgtgattaccataaagttcaaaataaaacaaaagtatacgtggaagataaagaacaactgcagtaggcgatcgcataaaccaaaagattttggcattcccataaatcacaacaaggaacgagggaaaacaaccaagttgagcataccacatataatctttatacatatacatatatgatgagacctataaaaatcatttatgtccgactaatatagataaaactatgagcatgtcttaccaagtatcttcttgctctatttcggttttatactttataaacctaaacaagttctctactaactataacttactaactaatgtgttgtttcataagatcattatctagtaaggtgaaattggaaatgaagtaatagtaaactcaaaatgacctgaaacaggagcttattcttcttcccattcaacatcttcttcttcttcttcctgactcatctgtcctctcagttcccctgactacatcagccactccttccctgatcatccatagagggaggttttccactctaggatcttcatcttccctggtcggattcaatcttgcccgattcaatcttgtccgattcaatcttgtctttctaaaacgtgcttcggctgaagcgaaaaaactagcagacgatattgaagaagatgaagatgatgtaggagcgcttgtagcagctactgttgtgtttgtactcgagatactcgaatcgggttccttcggtccagaacaannnnnnnnnnnnnnnnnnnnnnnnntcaagcaatgatcgacattntatagagaatgtcaagacttctttgcacctataaacaggacattgtttcttcttcttcttaacatcgttttcgtagtttgagggatcacaatctgtatcattaacatgtttatcccaatgtaatgcttcaatgttggtcagggttaacctcccattgtatagcacgaaacgccngaatattacatgtgacatctcctctgtttcctcttggaccatcgtgt

SEQ ID NO: 28856 - DNA, 1283 bp, Arabidopsis thaliana landsberg
agaatggaagagaagaggaggaggaggatctgagagtcagacctagagtgaggctgcgcattcttaagcagctttaatggagatgatgatgatgaagacgaagattggattgaagcagtgccatctcagtttgggcttttggattggcgcggctttgttcttgccaagtatcgtattttcggatgggcttctggcgatctagagcgccacgtgtctatctgttcttaggatcacgaaattaaaattagttttcttccagaaaacactacaaatcaaaaattcaagaaaattgaatttatatcgcatattcgcatcaaatttttttgcaaccaattaattcagacaaaaaaacaaaatttttttagaaaataacatttttaaggaacttgatttgtttagggcttaacttgaaaattaagtttttggcttcaaaaaacaaaaacaaatattataattgaacgatgctttaaacgacagcgtttagtgtttgttaagctgtaatggtaagtcaaaataactcgaacgtgtctgactctttactttaccggtaagcggcgacactgatcaccggagtttttcaatcgcggtctttcttctacttaaatccgatcactaccattgtacatcgtatatctggtttaggtcatgtccaaatctcgggcagttgtggagctcaccgctcgtttcgatctcggcggcgacgataagatccgagctttatctctctcacctatctccgattctcaaaccctagtatacctcggaacctcctccggatctctgattctcctatctctcgacactttaactaataccgtctcgcgtctcgcaagtgtatcgctgagcccttctcctgttgagtctatctttgtactcggcgaggaaagagggagagttctagctctctgcaatggttacttgttcttattggattcgcttctttctcaaccagctaagagattgggtggtttattgaaagggatcaatgtgattgctaagagagtaagaggacgtgattcgtcgagtactgacttgttgccttctgagatttcaacggattctagctcgagtaagaagtttcttcagttgcttggtgctgggaatcttgtgagtgatgttagaggtaatgattctagacatgagagagtccagcaaggtcactatgttttcgctgttgctattggtgagagaatgttcctgattgaacttcaatgtgctgaaacagaaggattaagtggttcctttgttgttttgaaagagattctgggaattagtgggatcaa

SEQ ID NO: 28857 - DNA, 3492 bp, Arabidopsis thaliana landsberg
tactttttttttagtgcccctgggaacagtgagctggaacctacgttgtgcaatggtaaaaaaacattaagtgtggactttaacttattcgttgcatgctgattagtttttctttgttgccatgtctctaactgtcccactgaatagttgagcatgcggtctatgaagctcacaaggtaagaaaataagattcttaagcttttggtaaaacaggttccacctatatcaggcctatgtaaatatgtaatacaataatacttgttcgtgcagcatgagctgaaaccggttttagctaaaagagcagagcattatttctcggagaacatgcgagttatcaaaggcaaatgttcttgaattcttgtagatgtctctttatgtgcatgaatgattcattaagctctttatgatgcttaacggacttttatgaatgtttgttcttaaatttcaggacgggaagcctgggcttcagggaatcttgaagaatttggaaagctaatttcagcatccggcttgagttccattgagaattacgaatgcggtacattacactctcttttcttctctcccaaatgcaacatatcctatagtgaatacagaccactagtatgcttacagacattattctctcttagattcattattttggttttaaattctgtgagttttgtgaaggtgcggagccactgatccagctatacaagattcttctgaaggctcctggtgtatatggagctagattcagcggtgcaggtttcaggggatgttgtctagcctttgtagatgcagaaaaagctgaggcagctgcttcatatgtgaaggatgaatatgaaaaggcccaacccgagtttgctaacaatctaaatggaggaaaacctgttctcatctgtgaagcaggtgacgctgctcgtgttcttctctgatcaatcctggagtttttggtttcttccccacttaaactcgatttttttgtcccttatatctctcacgcttattgattctttgcttgtttatctctttttgatcctgtctgagaaattctctggtctctttggtcggagtttcatcattgcttgatacattttttttgctacaaatacataatgtaaatcattctctaccgttttcgagtcgatagaagaatcgcaaacttcaagaatgtgactaacatttctccataaatttgttaaattttcaacaattggtgaatttagttctgtaattgatctaacaaagacactatacaagtatgaaattagaaattgaaatcgaaagttagttattataatcttgtttgtataaaatagtgtatatctcaaatagagatacagattagttttttgtttggacacaaagacccccgccaaagtattgaaattcgcgcctgagaaattctccggtgtggctctctagggttttagcactttaatccatttgtacttgtaaaaatccctaaaaccctctgggcatgactccagtattatgccattccactgcttcaatccctaaccctaactctctcatgtctctctcctccactctccgtctctcttcctcccttcttcgccgctccttcttccgattccccctcaccgacccattatgccgtctccgccgcactgaaccctccgccacgcgtttcttctcctcccgtactcctcggtccggcaaattcgttgtcggtgctggtaagcgcggagatgagcaggtcaaggaagagtccggagctaacaatggcggtttggttgtttctggggacgaatctcgtattgtgccttttgagctacataaggaagctactgagtcgtatatgtcgtatgcgctctctgttttgcttggacgtgctttgcctgatgttagagacggactaaaaccagtacatcggagaattctgttgagtgactttcgttcggctcaaagctactgatatttttaagcttagtcagtggtattgttccttctaatgttcgattattttgtcttccagctttgcaatgcatgagttggggatgtcatctaaaaaaccatacaagaaatgtgcaagagttgttggagaggtatattattgatttttggaaagtgttttctcagtcgatttctctaaatatcttattctgaagaacgatttgtgctgttgaattctttgggttttcaggttcttggtaaattccatccgcatggagatactgctgtttatgattctcttgataggatggctcaggtaaatatctgaattcatggaatggaattcaagtcctcaaataatgtttcaggcacgttacgattcttcccaaacttctaacttttttgttttaaacccttggtttttttggcagagtttctccttgagatgtccacttatccaaggccatggaatttttggctcaatagatgcagatcctcctgctgctatgcgttacactgaatgcagactcgatgtgagtgccttttaccttactttcccttctagttgaaatggttttccctgcaattcactttttctagttgtttcacttgtctttgctatctatagtgtatctctcatctctactttttctcttgtcttgagatgaacatgtatttttgtcagtgttttcagctgattgtacttattttttttctgcagccactggcagaggcagtactattgtctgatctggatcaagatacggtaacctcactattaatttgttgccaagtttaccgatactcaactagatggtccttaacctcttttgttttggcaggtggattttgtggccaattttgataactcacaaaaagaaccagcagtgttgcctgctcgtcttcctgctttgttgttgaatggagcttctgggattgcggtaaaataatcaaacaaatcttaaatctgaactccttaatagattttgttcgagatttcttcagttaatcttgtgcagattttccctgctgtatgagattgaatatgcagttgaatcttgatcatttcacattgtttaggttggcatggcaacaaatattccccctcataatcttggggagttggtagacgtgctttgcgctttaatccataatccagaagcgacggtatcactcatctcccctttgtttttctgtgatttatcaatttgtgggtcttttgttttacatgaaaaatcctctgttttataagtagacaactcataagattttgtttccactttcttcttcgtctgggcagctgcaagaactgctggaatacatgcctgcaccggattttccaactggaggaataataatgggaaaccttgggtaactctttgctttccaatttctccccaaagggatcttatacattaatgacttttgtttgcccacctcgtttgctaattttttgagagtaggctatctataggatcaaatagaaagactcacttctaaagtgtgaaactttttttttatggaaatagaaaagcattttgttttgaatatatctatgattctaacagattacagaagctgtacctatat

SEQ ID NO: 28858 - DNA, 1941 bp, Arabidopsis thaliana landsberg
acacaactcaaaaagtttcatgcattgcattgaaaaatttttccttttctgatttacggaaggaacacatacgaggtatcgagtcgttttatatttgcctcagcgatatatctttctcaaagctgatggaacattgcctgccaatgatgggagtactaggaaaggaggaaacataagaaaatataagatgctatgagaacaatcaatcgagtatatgaaaagagaagaaagtgattgttcttggacctggagtcatgccaaacttcaacatccgagaaagtatctgtttctgcaaaagcaactggtcatctaaccagtttttcgataatggaccaccccaactgtgatgtagatgtagttagagatatgaattatgtgagcttcaagaatgaaagataaatcaagctcagaaggagcactggagataggagcctgaaaatatcaaagatcaggttatttacgcgtaaagatttcccatgcgagcccaagcatgaaacgctggtccaccaaaataatcatccagatcttctttgctgatattgaacctctaacaaaattgatatagaacttggttagcggtatatatcaacttatattaaataaaaaagttgcaatatctaatcatgtcacagcaaacaattactaatgcaatctgactttttaccttgaaaaccttttgccaaatagcttcttgtccagtgaatgctagaggcaggttaattccttgcaatgccatccagtcaatctctctctcccatctctcccatccccaccaaacatatgaatctggaaaaaacaagaaagcaggcagtagcaggagtgtgattctagtgaatcatgacatgaggaaacttttgattccaagaagtgtatatatcttacagctagatgtaacaacattttggtaatagttccaagggacaggacgccggataaagatgcgtttagaatctatacgaggtagatgtccaggttgtggaacagaggcaacctgaattccaccagttttgtcccaagaaacatgagcattacatttatacttcaaataccaatggagcccagaagcaatctcaactccagttttgtgcctttaatcctgagacacaagacggcaaaactaaaagagaagaattttaagtaaaattcgatccctcatcaggaaatcagaagatacttacagaatttcaggtccaattcgtcccgggccatcatagttttcaattacaaagcagctggtaccaccacaagcatcctattgtaacaaaaaacaatcagtactgaagaatcacctagcatagtggggcctaaggaaataaaaggaagaacctttgagataattctgagctcaaagctctgagaatgggtgggaagcagtctctgcaataaaccctttgctgctgattcttgtacagaagaagttggtaataaagaatccaaacggtcaagcagaccatcaatagttggatgatgttttgacaaactttgagagtgaaaagaaattatcaacaaaaccaacaaaaccaatttgatggaatgcatgatgatgcttttcctcactagtgagagaatcagcaaggaaaggcatagaaaactgatctctgaagaaagtggccggataataatattatatttcttacaaactaaaccggtataaagcaagataaccggtgtggtaaaataaaccgggtcagtttttctagtttatagcaaaacgaaagagaggaatcagagaagtatagaataacagagaagaaggcgtgttttaggttaaaccctaaatattattatatcagtgatttctggggtttaaatctgcgtcctgggtctgtagctgcaaagttcgttgatgttgtattgattcttacttcttcgaaaatgaaaaatttccagcttctctcggaggttcctcagaacatccatatgcataaaattgaagaagtt

SEQ ID NO: 28859 - DNA, 2299 bp, Arabidopsis thaliana landsberg
ccccaaacgcgaagaatcttaaacacataactaataatttccttgtgatgttggtaatccaatcctaaggatttgcagcatcgatatgaattcctcaatcgaaatcaatcaaaatggttaaagccttaagaagtccttgtttcaataaaaaaaggattcaacttgaacatcatcatgcaaacaaagagcagagaaaaagtaacgaattggtcatagtaatctacactacacacagaagttttgatgataaagtttgaatcattaaccatgaattcgagaacccaacattaagaaatcaaatcaaaatcataatttggagcaattctatagaaacccaccagagaatcaatcgaaaattaagatctagaagcgaatttaactgagaaaggaaaaccctttgataagaaaacataccgaggaaagtctgaatccaaaagggtttttcgcagaggaagagaaatcgcaagaaaattgaagcgttttcgttggattagaaatctccgatgtggtggtttttgcttcagaggttaaaaagagatttagggcttttgtgtgtttccttttgtttttcgttagattttatgcctttttataaagcctttccacgcgtggccccaacatgtcgaaccgatcaaagtatagaccaaatttgtttggtcaatttcggttagactgatacggtcgaaccgatcaccgtggccccaacatgtaactttttccatcttacactctccatttttttattccgtttttaatctttttttttttgagtttttgcacaataatttgaatttgctgaccaagtattaagtaatttttgcaaatgagggttgaagggtattctcacatgtgtgcaatcgattgtagaaaatacttatgtattcgagattgaagtttaagttaaaggctttgattttgattcatcgtatgtatcagacaactagagttgtccatccaagtcagattatcccgaatatttgtaagcttcttgactctacaagttgtttaggtccattgaatattgaagccgttggtaagccaatctagaaccatatcaaacaacaacttcaatcgattagatcaatgtattaccgatctactgtgatatagtggacaagaatcaagattcaagattcattcctcacacacaagctgagttaaatcatcacctttcatccacctctaagcaacaaaaataaagttcatcactttaaattacttaagagctacatttgagcttatgaccatgaccaaatctgaaacagtatccactcaatgtatatgtgattcatattttgcaactactcatatagttctcacaaaatattgaattaaccgttgaaaacaaatatagaacataagattaaattataataaactacaatctcttcttccatttatcatatagaacctaagatcaaacgggtaaaaccacacagtacacactgtaagaaactgaagcttctcaaaaactaggaatcaagattcattcctcaacacaagatggattaaatcttcacttttcatctacctcgattcaacaagatataaagctcaacactttatattgctaagatcaaaggttgattgagcctatgaacatgaccagaatctgaaacagcatccacttaccaaaactatgatttataatgtgagttagaacactgaaactgttaaactatcctctgaccacatactgattcatatattactagaccaaaaaatgtcaaaccttcctctgttgaattgcactaaattaaccgaagaaaaaaatatgaacatggaaagcaattatgcatatctctcacattttctcattggcaaactaagtaaactaaaatgttgtcttagattcatcataaaaacatgaacagatttaatcttaaccgtttcatctacctcaatcctcaaaacaacaagagaaagttcatcactttaaatttctaacagcagagtataagcttatgaacaatagatacgaaacagtatccaccattccacctactaaaactgtgattcatatgtaagcaagaagaacactgaaaccaaaatattcataaccctcacattatctcactagcaaactaagtaaaactacaatctctgctccaattcatcatatataacccaagatcaaatggattcaaccacacagtgtagcacagtgagctaatcaaacacttagaatcaaaattgatttctcaacacaaaacagattaaatccttaccttttcatctaccttgaaccaacgagagatcaagggcatcactttaaattgcttaaaagcagagtatgatc

SEQ ID NO: 28860 - DNA, 1701 bp, Arabidopsis thaliana landsberg
caaaatcaaacacattgatgatcataagatttcaaaatcaccaactttgtcatcatattactcagcttaatcacaatagtataaatggttcaaaatctttagaagcaaagtataatgcagaatttgatctccttctcaaaaatctcacacaacttgaagccaattccaatgatccaattgataaagtcttgcaatttaactcttttttcttcctacattataaacccttgactaaatttccacctttgtgaagctcaacagtacgaatcaaccaaaattgaaaaccctacatcaaaacttgataaggaattaaacgacatacactcagtgtaatgaacgtaatactcgtaatcattttgaccgccgttatgtatccgccggcgctcaattactttcaccggatggtgtttcccgtctctccaccgacacatcacacgagtacccacttctagaggaagcatccccattttcctcttcttcgacggatccgactctataatagcttgatcaggagttaaaggaggaggaggaggatgagacccatcaacgccgttcgtagccggaggcttttgattcgacgacggtggcggtgcgttgccgttggtttctgtattcgctgacgatcccatttctcggtcgggtcggagattcccgggtgggctttctttctcatacgagtaagagaactagagagagaaaaacggacacttgaaataaatcaggcccattagtaacttttcacataattgggcctatatttatgggccgttaaaaatattgatatttaatggtgtgaagtacatacattttcaccgggatcacagtttattcataaaattagaaagttgtttgatcatgtaagaattatctcgaatcacattgaaatatttctgtagtaaaacgaattagatttgaaaatatatgaatcatacccatggctatttagtgactattaatgcattgtttgagctaaataatttggttagacgttaagttcttgcaattatctctaggatgtgaatgaatgtataactatgtggcaaaaagaaagaaaatatattaaatgatttcgttagcaaaatggatatagctaggtttccatgaatctcactgacatttcattgtgtctttattaaaacctatgaatgtgaggagacacaaaagtcagcggaagtatccatgagtgaagtgaacaaggagcataggtttccttgaattaacctctctgctacttttctgagattttctgaccaacaagtgtggagcaaagctctggtggtttaatgcttgtttgtagtcaaaggttttctttttattattgggaaggtaaaaagagatcttgcaactgttttagttgaacttctattcattaattcgaagacaaaacgagcaagtacattttctctgcaccatcctctttataatatgtctcgatatatactctctttctggagtagagtatctgtataccttatcggtttgttgtaatttgagattactttatattacaaaacatcattttatgggatgattgtcgtaattttcattatgctaaacgttactatagctaaacatttttcgttaacatttttacaacaagtataatcggatacgtttagtcagttagactttttagttttcaggtgatgtttaatcggatactaacaagtataatctaatagactaaacgagttgtcggaa

SEQ ID NO: 28861 - DNA, 2358 bp, Arabidopsis thaliana landsberg
  unsure (1)..(2358): unsure at all n locations
gccagacctagtcgtttcacggtacataaattcacgaaaattcttaggccatcaaatacactaaaacgatcatatcagtgaagtgtacatattagtggaaaatgatgcttcaacatcaaaattccagcaagagagtgcaatcatctgaagagaaacaaagaagattcaggtcggaaaatcgctagggttttacctgagaatacgcacgcagagccacagaataaaaacgactgagcaggagaaaaacctagcggaagcttaaaaaggaacaaaacaccagcttctccgtattgccctctaactcaatcgttatttacaagtttaccctcaaaactctcttttgctctgaaaatctctctctctctgttcatcaccatttccctcagaagctaaaacctctcttcttctccgatataagtacacttgttgtcgaattagaatccgactagtttgcttctcatgacccttctgaactatctacactgtaatcgctcaaaatcatttctttttcagagattttactcttcttatagaatngctcacaagctgttcgatggaagtttccaaagaaatgcgacaacttccattaaccattcaatcagtgaatccttacggagaaattctcctgcacgttctctttcgatcttcaaggaaaatctccagctgggttattttggtcgtcatatggacgaagttactctttgtcttgcgcttaaagcatgtcgtggagacttgaaacgcggctgccaaatccacgggttttccacaacttctgggttcacttcctttgtttgtgtttcaaacgcagtaatgggtatgtaccgtaaagccggtcgctttgacaatgctttgtgcatatttgagaatctggttgatcctgatgttgtttcttggaacactatactctctgggtttgatgacaatcaaattgctctgaattttgttgttaggatgaaatctgctggagtagtttttgacgcattcacttattccactgctcttagcttctgtgtgggctctgaaggatttcttttaggattgcagttgcagtcaactgtggtgaaaaccggactggagtctgatcttgtcgttggaaactcgtttattacaatgtattcgcggtctggaagtttcagaggagctcggagagtttttgatgaaatgtcgtttaaggatatgatttcatggaactctttattgtcaggactttctcaagaaggcactttcgggtttgaagcagtggttatctttagggacatgatgcgagaaggtgtggagcttgatcacgtgtcttttactagcgtgattactacctgttgtcacgaaactgacttgaagctggccaggcaaattcatggtttgtgcataaaaagaggttatgaatcacttttagaagttggtaatattttgatgtcaaggtactccaagtgtggggttttggaagctgtgaaatcagtgtttcaccaaatgagtgagcggaatgttgtctcttggacaacaatgatttcctcgaataaagacgatgctgtgtccatcttccttaatatgcggtttgatggagtttaccctaacgaggtcacttttgttggattaatcaatgccgtgaagtgcaatgagcaaatcaaagaagggcttaaaattcatgggctatgcatcaagacaggctttgtttcagaaccatctgtaggcaacagtttcatcacattgtatgccaagtttgaggctctggaagatgccaagaaggcttttgaggatataactttccgggagattatatcctggaatgctatgatatctggatttgcacaaaatggattctctcatgaagctctcaagatgttcttatccgcagcagcagaaacaatgccgaatgaatacactttcggaagtgtcttgaatgcaatagcttttgcagaggatatatctgtaaagcaaggtcagcgttgccatgctcatttactgaaattgggtttgaatagttgtcctgttgtttcaagcgcgcttcttgatatgtacgccaagcgtgggaacattgatgaatctgagaaagtctttaacgagatgtctcaaaagaaccaatttgtttggacatcgataatatcagcctattcaagccacggtgattttgaaaccgtgatgaacttgttccacaagatgattaaagaaaacgtagcaccagacctagtcacttttctctctgtgttaacagcttgtaatagaaaaggaatggtagacaagggctatgagattttcaacatgatgatcgaagtctacaatcttgccccgtctcatgagcattactcatgtatggaaaatatgcttggccgagctgggagattgaaagaagcagaagagctt

SEQ ID NO: 28862 - DNA, 2733 bp, Arabidopsis thaliana landsberg
cttttgaatttaacaaatacaaatgaaataaatccaaaatattttatttttatattatatattccaaaacaattaaggggtgaagggcttttacataatgtacgaaattttatcctagataatgtaatttcttgcagtttaccggtgaagcttacctgaggttccaaaatattgtatacagaaccgatcatcgtggtctcctgtcgtacggagagagcatattcatcgcatactgcagaaccgtaacatcttgatatctcatttgaaaattctttctatagcttcgagagatacatcacattgatgattttgatatttttctcttgaatatcttccttttggtttcgttgttggaagtcgatccgttcaaaagcttcaaactttctcctgaacttgctttcagatttgtaaagatcctcataggtttttttacttcaaacttttcctaagtcttaggtgttaagaggcccgtctcaatatatttataagcctttggtaaaatccaaaataaatctaagacctcttagtaatttttttttgaaataaaaatggaccttttttctttaagaatttttttgaattttgtaatggacccatggcatttgccctactctgccatgggtcagagacgggcctgggtgttaagaagggttttgaaagccaaatccattcaaaagcttcaaagtttaacctgaacttgctttcaaatttgttaagattctcatagtttttttttacttcaaacctttccaaagccttaaggaattgatgcataagatcatggacctttttgtcagcataagtgcacattgcatttaaaattatgaggttgattagtgtcctccattattcggtgatggttgatgatatatggtagtgaatgacgatatactagtctgttggtgatatggtatcgatcgatctgatccattagctaaacagaaggatttatttcaccaacattaatgacctgcatattttctacaaagctataccgttcacgtcaacaccatgtcacaagataaacatagttttttgtttgttagttactaataattgaaaggatgtggttgaatagtcttctgagttcttaattacgtttcaatacaaaatccatgtatcttcactagttttgatattctattattctgagttcttaattatgtttcaatacaatttgttcaatgtataggtattctaaaaaactagaacaccacgtacatgaaatctaaccagtctagtgtcagtatcaacaactttgttttcgttcacctaatatgctcatgttaaacaattggagattctaattgcaaatcaagataatcattatctaaaaaaaccaagaattttgaaatatatgttatattattgttatagtcagttgtgtttttatctttctgttatataaaaaataggtgacatttgtccatatgcgttgctactgatgtttactaactatatgatatcgagttgaataagtattccaataactttgtttttaagtttcgaagctaagatatatatctatagaggaataactaaccggagcattgactacctaattctgctcatggttgtgcacctgccccggcccacccccacaagttgctacctaagttcgttagtgtatataacttacgaaattaaaaataaaatagcttcatctatattatataatttggtatacttttttataatttaggggaaaaccccccaaaaaaaaccatcgtctaatttaaatttgtccatttaataccaatttattgaactctcacataaccacctgactacgacaatatattcataacaattaaaaaagaaattgtatatatagtaaacaccatatggttaagttttaactacagctagtgattccgttacggtcgttaactcagatatctgattttgccaaaatttaaaaaatcaaaagtttttaaaagacataaaaattaacttagatattttcgggcaaatttcataattcagatattaaacgggcaaatttaaattagacggtgtttttttggtttttttcctaatcatttattagtgatttttctgtctattacattattgttatttcttatattattagtttattacatgcataataaaattattcatgacaatataaacacttggatagcaaatactttcatgaaatactcaagtctcaacaacggacaattctcctaacaattataagtatccacgagagactttttacctagatcacgttcttgatagatagctttattctaatttagtgatcattactgaaatttgctacatatttaaatattttcatatatatagaaattatagtaattttcatatatatagaaattatagtaattttcatatatatagaaattatagtaattttcatatatatagaaattatagtatattattttttaaagacatttttttattttatattaccaaaatttgaattttcaaaaaaaatccttataaagagatatataatgagaattaagaaaagttgaccaaaaaataaattaataaccatataaatgtatattatataaaagtttctttcaaagaaaaaaacaaaaacaataatatatagaagttgtgcaggtaaagagatgtacaacactttttattaaaggtcaagtaacaactcaaacaagtgaaaaaaaaagaaaacaatttcactttttttggaatgtgtgtctctcttccacttccatatattatataaacacc

SEQ ID NO: 28863 - DNA, 1734 bp, Arabidopsis thaliana landsberg
aatttccatcatgttacacttttgggaaagattacttttttccaaaagatattgattgatgttttttgggtagtttaatcgggacaagtatcttatcttatctcctgccacatcgaagttggtgagtgataatgtaattatttgcactcccagagatcctccaatttctgtcaaaccataaatcaaataattgcaacaaccagtgattgcgtttagcggttgtatatataacccttaatctaagatcaacatacacatttccgcaaacacatgaaatgctaataaccgcgatttcaaccaccaaaccttcgacctgaccaaccaacaatcatcttggaatatgtttcgaaataacggtccaggaatatttgatttcaattgtaaagaaactaaattgcttctgaaagaattacattatctggaggatatggagaagagccgaacggttgagcggtcatacgaatgcatatatggtaaaagctcaaagcgaggcgtaagttctgcggtcacgtctgtgatggaaaggtccatttggtctgcaagtgtcaagaacacattaaaagtgtctacattgcggatcacagatgcgatataagccaccgcgggactgtgttcttcttgtgtcgtgtctctgtcttcagtctcgagagagccatttcctcttttgggtgggttctttaaaagggctactagcacccgaagtagatgagggagacatgacggatcatagattacatctgcgcctagactgttaaaacgcaagggtcagtgagataagcaacatcttctgctatataattctagattttttactcacacaatatctggacgatattggcttagttcactttccgatgcagtttcccatggaagatgagtgcatttaactcgctgtttaagaaaaaataagaatcaatcttgaataggttacgtgtatcctatatactctgaatcagaaagcaaaaagagagtttaacactcactgtactctgagcttctccgggttgtttgagaaactcgtcatcatagtttaagtgatttctctccaaattaagcttcatgttagacaaagttaaaagatctccgtctgttagtatcacctgctcaagaaaaatatttgtgtgtcaacatagctttgtacttatgatgtgaactttggtaataagcaattaagggatacctctttggcctttacatatgcaaggcaaatcccgaccataccaactccagaaccaacctaaacaaagcttcatcgaatcatgaaatgaacataatagatcacaaagtaaacctcatcagtcaataaactaacctcaaaacaggctttattggcgaataactctggaaatgacaaaacaaattctgacagaaacagactcgatggccagatggaacacctgccagaaccccaagataaaaaatgagcaacgtgaaacgagactcttgcaattgaatgatcatataaacactcctacccggtatctccttcaagcatgttcaacgaacaatgcagcggaataactaatttcctcgaccttggacaactcgggtgtttgtacgaacctaatccacataataagtcagcaaaacacatctcaatagtaactacaaacaataaacaaacacacacaacaaagacatgactttaccttcagggaaaagaaaagaaatgactttggttaccttatgttcctttcccaatatatcgcctacaacaccgaccgaacttagttt

SEQ ID NO: 28864 - DNA, 1421 bp, Arabidopsis thaliana landsberg
agagggcattgctcttggtactgatataggcgaggtatgtgctcggattctaagtcttatacctcatgtttattttctcctttcctctgtattgaatattgattgcttgaaattttaaattgtaggcgaatctgctcaaacgttatgaagcagagagaaaacctgcaaatatagcaatgatggcggttttagacggaatccagaagatgtactcgttggatttcggaccgctgaatgctctaagagcagctgcattccacggggctcactacatttcgccgcttaaaaagcgtatcatatcttatgcttcaggagagcaatctttgccgctattttcttgaagaatgcgagggattgttcgctttgttctcaaaatactctgcatcatctcttcttttgccttatatagaaatttaatggtgactgaaaacagctcccagagcccatgttttaaataagtctgttgtatttagttttttatgtttcagtcaataaaatactaaaatgttacataatctgatatcaaaacaatgtaaaatgtgaatactgtgatttaaattttgatgtccaacactgccacataaggaaggcaaagtcattgttccattgcaactgtgtatataacatcaagtgtatatgtgttaataatgcaacttaatcagctatatatttctttgtagtaactttaaaatgcaacttatatgcacaattgtacaaagtttaatccaatattcacaaaaacgcatcccggactattctcgccatgacccttgacccaagccgactcaaaatctcaggcagtactgtggcagagattccaggcaacactggaagcagttcccgaacaacttgagatacatctactacctgttttatgatgatgaccacacataggttaaaaacttggtactcacacagactgattttttttcaaattatgagaggtttttgaatctaacctgatcaggattattcgacatggagcttcttgcggtaaggaactcgattactttctgaacattgttcaagatgaccttgtcttcttccgtcacggatggaagaagtgctgcaggcttgaagggtcccagtgttggtggtaacataccgaagattggtgtcgcgtttctgaatccgaataccgccattgcttgcaccagctgttctcttgtgattgcatcgataccttttactatctgtgttttgtaatcacgaaaatttcagaactcaaaaggtgtcatgaataagcatgtttttgaatcattatgtggtgattatgagcaatatttattgtacagatttataattcattgcgcaatagttcggagtatttatgtgacaagattgaaaaagtggttagattttgattagtaccttcttccaatagaaactcgcggaagaaggtccctttttcgaaagcagaa

SEQ ID NO: 28865 - DNA, 1522 bp, Arabidopsis thaliana landsberg
  unsure (1)..(1522): unsure at all n locations
ccccccagcgggtgaagggttttatttttccgggaatgtaaatccaaagggtggggggcactcccatatggtctaaaaataataatgggtgacaattgaaatcaatacttgtctcctaccctcatgtcttcttacattgaacgtatagttcggaacaggctttataatctgaaggaaaccgcatccaaatttgaggatggcttgcgaagttggtttggtgctggaagaccttaatgattattgtatttggtttcttttatttaaaaaattcggaacttttagtataaggttacattcattgtacaaaggtctttttttggtttaataaatctaacattcattccaaaaaaaaaaaatgatcatatgaatgaattctttaattatgatatctaaatattcaaactttgagtaatgtctcttaatagttaatacaagtagttttgaataacaaaagaaataacagatatcatcccaaaagaagaattaaaaaaacggaaatatctttgtggcaaaaaaggaaatatataggaaacaaagaaaaaaaggaaactagaatctgaaatgtattgaccgttgaacacagctcacatatatatactcactacgtaaccctatagcttcacaaattctccttctctctcaatttgctctcattacgatttgcaaattcttattcttctgttttgtgttgagaagcctcttccaaacatgaatgatcccattcccaaacccgtagtgagcgttcaggtccaagctgtgaaagtctctacaaactcgatcttcctcatcgtcaataccattaaggatgagatccttataaaccctgtcactggccatcgagccgaaacgtccactccgctttcctataaatcacttcccatcaatttcagtctccctagttgtagtcaccaccacatccaatcgttactccacgatcaactccatagcgacgacaattggttgtgcgatcacttagtcccaaagatctcaacggctgcaatcaacgcaggttttatgaacaacggcgttgaattgaccgttggcgtcacagttacttaccagtatgtccatgtcgaggagacatcatcaaaggaatcgaggatggttcgactagggagcatgaaagcagaggaattgaagagttttaacatggaaacagagtcgtgttccatctgtctacagagtcgtgttccatctgtctacagagtctagtctccagttcgaaaacagaacccactcgcatgagttgttcccatgtcttccatagtagctgtctcgtggagtggctcaagagaaaaaacacttgcccgatgtgtcggactgtgctctacgatcgatgatgatgattggaacagaggattgaaactagggtgtcatctagctactctattgcatttaatgaaaaagttatgtaatttagttatcaaggtttcaaattctatatcaataagagggtttggtatagcatcattacttctaataacatatcaacangaggttttgtatagcatcattacttcta

SEQ ID NO: 28866 - DNA, 2512 bp, Arabidopsis thaliana landsberg
cgcttctaattagtacaagatattgcatgtgttattctttttgaataaaatgttaaactatattcaaatactttttacatcagtttttttaatattttgataataaaaccttaagcaaagctttaaactaaactaatattacatattatgatttcggacatggaaagattacgaactttacctcagaactttctcgtatttcaaaaaaaaaatttatatatatattttcacttataaaaattcccctctcccattttcatactaaaaatgcactatatacgaatataaaatttatcactttcatttccacaaattcgcttcaagttaataaacatcatagtaataatctttacaaatttaatttcttcaactctgtattatatcactttataattttatattttttaaagaactcaaaaattgagaaatcccatcccaaatttatgtcatccccaagagaagaagacagacaaacaacaacttggctagttcgtgaagcccacgctcactgcagctggcaacagccaatttccctctcattctttctcctctcctttaaaatcatcaaatctctcaatctcttcttcacttgccaaaaacctcactcttaaccattaacaatgtcgtctccggcgactactatcaccttctttttcttcttcactctctcatccttcttctacatcacttcttcactccagaacaacaacaacaacaacaaacacacagcaaccgttaactccttaaatatcccctccgccgcggcggagattacgctagtaaacccaaagcttccgccgcggagtctctccctcacatcctccaaaaaattcgaaggatcttcaaatctagtccacctccgttaccacatgggaccagtcctctcatcttctccgatcaacatctacgttatctggtacggacaatggtcacgcccacacaaatccctaatcagagatttcctcaattctatctccgacgctaaagcaccttctccctccgtatccgaatggtggcgcaccgcttctctctacacagatcaaaccggatccaacgtctctagatccgttttaatcgccggagaatactccgattctaaatactcccacggccaacaccttactcgtctcacgattcaggaagtcatcgcctccgccgccagatccgcttcctttccggtggatcataaaaacggaatgtatctagttctgacgtcacacgacgtcacgatgcaagatttttgccgcgccgtttgtggatttcactatttcactttcccgtcgatggttggttacactatgccttacgcttgggttggtcaatcgggaaaacaatgtcccgaggtttgtgcttatccgtttgctttaccgggttacatgggacacggtggtcccggagagctccggccaccgaacggagagactggagtagatgggatggttagtgtgattggtcatgagttagctgaagttgtatcgaatccgttgattaatgcttggtacgccggagaagatccgacggctccgacggagatcggtgatttgtgtgagggattgtacggaagcggcggaggaggagggtatattggtcaagttatgagagatagagaagggaagacttttaatatgaatggtaaaggaggaagaaagtttttagttcaatggatttggaaccctaatttgaaagcttgctctggtcctaactctgtcgactaataaaacgaagaagacggttaatgatggtgatttgtggtaatcactgagataatgatgaaataactcgttaggttttagaagtgtaacattattttacttatgatttcttatatatataaagttttaaagaatgctttttatactgtttttgtggtgaatttgaatgaatctttgattttcacactcacttttttgtttatttcaacagtattggtaatgtttaagagcttttaatgtataacttcgggaagtgaaaaagtttgaattcaaaattctttagatattttttcttcactttctgcattattaatggtactagtataatcggtgtttcaattaatgtaagtgtacgataacaataactttagttgtcatcagtatttatggaaaaggcaaatcagatgcgaatcatagaactcttacaacgctaagattcttaataaatttatcagttactggcaattagatgagctgtcggatcatctatacatgaataagcggtctagaactacatgtactatgtttgataacctattaactccataaatttttaatcttattagttggcaacacaaatttttatacatcggagtcatctctaaacgatactattgttattggaattatgaatctacctctctctcttttaaataagtaaggtgtggttaaagttcgttaatatcctccagttcgagttctcgaatatttgcatagttcaaaaccggacgtcatctttctatttgacaaatcaataagaaaccggttagattgaggcaagccacttttatggtgccttt

SEQ ID NO: 28867 - DNA, 2005 bp, Arabidopsis thaliana landsberg
atactcagtctcctctctccggaactccaccttatccctttcgctaacgttgtgattgcgtccatgaaataactcgattctcggttataacatatccactcggtcgcaagatccggtccatctctagcaaaacgtacttcatctcacacctattcacattaccatatggttcaacaaacacattaacaccaaaaccaaacactttctaaggcattctttaaaaacagtttacattttcttcctattgaccaatgtatctcatcattcataacgtacctgtgactctccaaggtaaaaagactgtcgaggtgaagaagatcatatgttcttggatacgtcgagaaagcttcgcacctacaattccggtttcaggttaatatcacaaagatcaaataatggaaacagagtgtatttgacaaaaaaaataaatgttaccagtcgtggtaagtcccgatgagaccgcgatcaaagacaacaggaagcgaatttgcgctgtacgatgatacaacgttcatgacccaaatgggatcgtcaatgagagccgcagcgaaacctccataaacagtgttcatatccataacatttcttatcttgtctgtcccaagagctggtaaaactttcttgtaatgcttaactctgttcttccacttcccgtcatcgtgtttcaaaccgtttgcgctccctccgtgaacatcaccgattctctcgggtgcgacatgtaacctctctggccattttgggattgatcggagaccggacttcttgactttaggggtcggggcaaccacgcaaggacggagtggagtataccaagcggagtcaggttctatactgtcgtcacatttgggcgggtaagcttccatgttcttagcgattttgtcgtagcaagatttgtctgagagtttctgccacacggctatgtcgtctttttgagcgtactttttgaaacacatggaggttagaagtgactgaagcttgttgtagtctgatttctgatcttccatggttgtgttccatccacgccatcgtctattatagttcacaggtggaccagaaagaacccaaaaacctccaggtcgaactatacggtgaatctcaagtaaatagattccacctacaagatcagagaacacattttcatgattcttcttagtgcaaatcacaagaactcaaatgcaatggtaggtagagatattagtgcttaccaaattctgtccagggaataagacatcttgagcaatgagccatatcaaatgcatttgaaggaaaagggagacgttgcgtagagataatcccgagaatcgcaggaattccacgttctagagcaaactgaacctgagcttcatggttatctcttggtgcaagagagagtgatagtatccctcggtccaaaagatcgcctccccagctcgcaacctacatagccgataccagttagagagtacattataagcagaactgattagagaacttgagtagttgaagagagactaaccccacagccagtatcaatggcggtcctgactgttccgtctttcatttcaggaatcagatcttgcatcaaatcaacatagtgactaactccacgaggaaacatggttccaccaccagggaaatggaacttatctccttctttcttaagccaatgctggttagacttttgcttattgatccaatcataaggcacgttcctgtaccaacactgttctcggctcttaggccatcttataggcggtttatacccgtctggcggtggaatcaaacattcattcttttcataaaccggaggacaatgacgctccaagaaacttagacgatggacaccatacttcttccacctctgagaacaagaaacacaacaatagttcaataatatgcagctagaagtgactatacaaagtgagagtggaactatcttacctttggatcggtgcacggggtgtaatcttggaactctgacccgcactccgggaaagaaacggatttgatttgaataggactaact

SEQ ID NO: 28868 - DNA, 1564 bp, Arabidopsis thaliana landsberg
gaagaccacaaccatgttttccagtgacaccatatcaaacatttttactatacaacatactctcttttttttctttgcttaaatcgttgtataccttttcaccattcttattgccgcttagtacatttttaattgataacacaaaagtttcggttgataagatccaaattcataatatacaaaattcttatttaacattcaataagaaaaaacaaaatttgctaatgctacgatgttacccactcggaagcttaccatagtctgttagtcatagtttgaaagtcaatttggtcagctgtagcttacggttaggctgttcttatcaaataacaaaaagaatgtcaaacacgtattttatcgtattcaatttagggcacgttgataacgtttccaaaacaattattcaatagttggtaatgaaaattaatgaaagacccaaacctaatgaatgttaaccactaattgaccattcaccaaccaattatttaatgaaatatctttgttagtttcgttatttagtattgttaacggtttcttactctttttgactacatcagacggacgtaaaacgacatcgttgtcgaatattcaaaagattcacaatttgacaaagagaaacagagacgacttgtttctaaaaaaaccacgtgtgtctgaaaacggaaaaaaagaagactgaatgagaaacggcgtgtaaaaagaaaacgcgttgaaggttaggctctcacaatcgttggtatacagagagaccaaacatctcgtcataaaaaacggcaagaatcatcagttactttatacccatcaatcaagtcttgtcctttttctccttctctctctcatacgagcttctttcctgctgatgaggcttgagctttacattttcaatcttgattgagattctgcatgtttctcgatctttaaactcagatgaagaatcttggggggttgttcaaaattcttctgcttttcttctgtctctttctatcgacccacataatttctgtttcttgtttaaactcagatgggctaactctactctctcttctgaagcatttggatagagtaccaccacaagttacttcgacatggaagataaacgcatctgaagcaactccatgtaactggttcggtatcacttgtgacgattctaagaatgttgcgtctctcaacttcactcgttctagggtttcaggtcaattgggtccggaaattggggagctcaaaagcttgcagattttggatctgagtactaacaatttctccgggactataccttccactttaggaaactgtaccaaactcgttactctagatttgtctgaaaatggattctctgataagatcccagatactctcgatagcttgaagaggttggaggtgctttatctttacataaacttcctcactggtgagttacctgaatccttgtttcgaattccgaagctgcaggttttatatcttgactataacaatctcaccggtccgattcctcaaagtattggtgatgctaaggagcttgtggagctgagtatgtatgcgaatcagttctctggtaaccatcctg

SEQ ID NO: 28869 - DNA, 1611 bp, Arabidopsis thaliana landsberg
acaacttcctttttctggtggtgttcacaaaaaaaaagagtgagtggaatcctttcaacaaactaagatttcacaaaccacttttatttttatagggaacaaaaaccaaatgaaaaccacatgcagagctaaagcaccagattcgttataaattctctcagcttcacaggaccaaaaatatcagaaacatttgcagggttttcttcattgatttaactgacgtcaaaggtaatcaaaccatgaagcaattcagagactaagattttagattaaaactaattgatataaacgaagcctgggtcaacttaactgtgaacatttcaatctagggcctcactttagacaataagaaaaacagtcatcataccctaaacaaactcccaccaaagggaaaatgcaacacattatatcaaagaactccttctctattccaagtttcaattttacataagaaaacatgttctggtgaaattataaaatcccccgagccatttacagtttatgaattaaaaaaatggtcagcctcatcagttcacgaaaatgcagaagatagaagggtagcaatcctaatcttcaaattactggattaaaaaaaagaaaagaaacgaacagctggaataatacctggacagcaatatcacttgcatctacagcatatacctgtaagcataatgaagttttgtaagaaaacattaacagtgttggtttacccccgtggtcttatggaatatataaacaacagacacagagaaacaatcaacatcaatataaaaagtttgtgtacagaactacagatgtaactaactcatacccgttttgcacctgcttgagcacagaagattgaaaggatgccagttccacagccaacgtccaccacgacctgttacaagcattcaatgcagcattaggttttcaaacaaaacaataaactaccacgttatacacacaggctaagctaaaagtaaacaacagtcccaatttgaatcttgttcaaatatcaattgtgaagatttaagaccatagttgagaaattacagtaacgagagtattaccttgccttcgattaagctctgatgctgcattatggcttccctataagtttctgtccttgcccgatcctatatcaaccaagaacattccgcaaagaagtgaaaaatcctaaattgatgatataatagagcaacagagcaattacatacatacccaccctaaaccaaagagaaattcaaccctaaattacaagaagaatgcgaaagaaagtacctagatcatctcttcgtgaatcccaacgtgagcataggaatgaaaataggcaacgtcgaagtcagtacaaggcggaggagaagattccgaagtctccaatgacttgtgctcgccaagctggtcagaaaccctaagcacattggcgagaccgcctcgagggtcacgagctccggcgtgactgcgcttcttggctcggccaaaagagctgagactggggccttgcttgtcttccaattcaagctcgcggtgatggtctccgtggaaaccgttgctgaaatcgccgccagattgcatttttttcagttagacactagagagagactttctctgacgccgcttgacgacgac

SEQ ID NO: 28870 - DNA, 2054 bp, Arabidopsis thaliana landsberg
cataaccaaacggagaacgggagtgtatatcccaccacctccatcaataacacttgttctctattttctctgctacttttgcttttcagtttccttttcagaagtgcccacagctccgagattggcctcagcagcagaagcatcaagcaaacttgctgcaattgctgccttcaagtcatcatctttcatctctgaaaaagcctgcacttcctcacgtgacaatgcctgattccgtctttgttgattaacattgtcattacttctcttgtttctggcagaagaacctgagctcgtgttctttcttattctctctgcgtcttcaggagaaagccactgcccgaaactattggaagcttcagaagaagacgacatgggacattcctgagggaagtttcctttcactatgaagatactccatcctgcgcctttgagagagtctaagaacgcagaaaggtagaacttcgataaatgttgcggggcagcaaggagactatcaaagttataccattcgccattcactttccttatacaaaaccaatggtcatgcaagtggcagataaaggcgctttcaagctcagggtctatctgcgcaggctctgcatctggacaattgagtggaattacttgtagatcccacacttccaaagctttttgcaagacctgtcaatcaaacagaagcattctcagtgaaacgaataagcaaagactagatcaactttgcaagattaaaatgctacaccaatcgcataaaccctctgtttgcagtgttttatccgcatccaacttcaacgtaatccgttaaaatagctttaattttagatatctaaaaatgtgatgtaaaacaccatactatacccttgaatctcaatacataaatcttgcaatcaaacctgacttttgtagcaacctaatcaaatatcaagttatcaaccaactcggtttaaagctatccaagaaacaaaagatgataattgaatatacagaacctcactaataactaacatatccaaaacaattgagtcccaagataaaaaaaatcatctcaagttcctccatttatcagcatagcaatgttcgcacaatgaaactagccttcaacaaatgagttttaacccaaagtaaagatcgcaaattcacaccattactgatctcaattcttcttgaatctatctaaaaacgaatccaaccattcaaaagtttatcacttcagcataaacacagcaatcaaaagcaccataaaatcgaaaccctaattttgcctaaacttccaacaacacaataacaaaaaggctttacaatatataaatgttgaatgcaactcaagatttatcaatttcatcgcgaattcgtacctggatactaaaatcgccgccgagggaaacattgtgcgactcttcagctaagaaatcgccgggagcaaaacctccaacggcagcaccttcaagcataacctgacgctccttcccgtctagatcggcggcgacggcagccaaatcgaattcagagaagaaaggcccttgcaacaccgtgttgacgcagtgtacggcgcacagatttgactcttgaacctcgtgatacaacattcctccgttgcttgttcgttccatcgccgattaagatttgaatatcaaaattcactgattttgcgatgaatatattattattgctccgatgcaaaagtctcaaagagattgtgaagcgaagatgaagatgaagatgaagaaagaagaagaagaagcaagttaacagattatttaaataagaaaatgtaagggacggaaaagtaaatatacaataaaaggatgccacgtgtaataaccgactttctaggcctttttcttattttgcagacgagcccgatactgttttgagataggcccattatctcaaaattgacagaccaacttaggttccttgcttcccaagatttctggtgatctctttgatggcgacttctgataatgtgatgggtatgatcgggttggtttatgcctgcatttcgggataaccatgtctgagtgcactgattcacagttaggaatgatggtcctgag

SEQ ID NO: 28871 - DNA, 3415 bp, Arabidopsis thaliana landsberg
catctctccatcaccatcatcatcatccctcagatgcatggatttagtagcagtaactcttcttcttacatcgcttctctctcctctgattctgaagaacgtcttagctacaacgttctctccgtccctgataaaccagactccgatgacaccaaaccacattttttcgactacattgataacttcaagccgcaggtcaaagccacggtggaaaaacttactgacccgggtccaccagattcgccgtcgcgtcttgctggattcgtggtggatatgttttgcatgatgatgattgatgtcgctaatgagtttggtgttcccagttacatgttttacacatccaacgcaacgtttcttggattgcaagttcatgttgaatacctttacgacgttaagaactatgacgttagtgacctcaaggactcggacactactgagctggaagttccttgtttgactcgtcctttaccggttaagtgtttcccctcggttctattaaccaaggagtggttaccggttatgtttagacaaaccagaagattccgagaaactaaaggtattttggtaaatacattcgctgagcttgagcctcaagctatgaagtttttctccggcgtagatagtcctctgcctacggtgtatacagttggaccggttatgaatcttaaaatcaacggtccaaattcatctgacgataagcaatcggagatcctacggtggctagacgagcagccacgtaaatccgttgttttcctctgtttcggaagcatgggaggtttccatgagggccaagctaaagaaatcgcaatcgcgcttgagcgaagtggtcaccgctttgtctggtctcttcgtcgtgctcaaccaaaaggatcgatgggacctcccgaagaatttacgaatcttgaggaaattctcccggaaggattcttggaacggacgacagagataggaaagattgtaggttgggctccacaaagcgccattctagcaaatcctgcgatcggagggttcgtgtcgcattgtggatggaactcgacgctagagagtctatggttcggagttccgatggctacgtggccgctttacgcagagcaacaagttaacgcgttcgagatggttgaggagctagggctagcggtggaggtccgaaatagtttccgaggagatttcatggcggcggatgatgagttgatgacggcagaggagatagagagagggatccggtgtttgatggagcaggatagtgacgtgaggagtagagtgaaggagatgagcgagaagagtcacgtagctttaatggacggtggatcttcgcacgttgctcttctaaagtttattcaagacgtcactaagaatatctcttgaatctaagatgatgaggctcgtctcagaagacgaagaaacatatatattagcacttataagaaaaagacatgttggcagagattcaagacatatatctcttgaaccagattagtaacttactgtattttttctttctttacttgcattgatattaaaattacattcgctagtgtcaaaaacgtcactgataaaacctcttgaagacgttagctaaaaaacatcttttgactattctcatccatggctaggatgaattccatgtttcgttgaaaatatctttataagaattgaaactcctgacttcactatacagagtttttaatatacatagtcagatattctagattcgtaactgccaaacgttgtacacttgaactattgagctttctaaacctaaaaactacatatataaattgtgtggccatataggtgaccctttatactatatgggtcaaacttagtctagtggacatttatgggccttgtttcatatccacttcacaatgtagtataaataaatggaattaaaaaatagtttcctctgctttgggagttgcttgaagcctaagtttgatgtcttgaattatgagtattcttaaaatggaatcatgagaaatttaaaatttaaaatagtcactcgtacttagtggggaagtaagtagtcttagctagacttatagttgtgcactttagttttatttttttaatgtaagaaaaaataatttataacctaaaagataaagacagtgaatgattaagagagatgaatcaaaagtctcacaagactctcaagccaagcaaaagatttttgctacgtcatttcccgtgaaatttttggtgactatagttgttagacagattgagtgataagttttcaggtatttgaagttttttttatatggatgattatttaatgggtgatttacatgaataacacttttattgaaaataattaaagatatagcactatatatgtatttattaagtaagtaatttagagggtaggtaaaatgacctaaagtggtggtggtggaggttcagacgacggcggcggtggtggtggtctggcggcggcggtggtgattccggtgacggcggcggtgatgattccgacgacggtggcggtggagattccggcgatggtggtggtggtgattccggcgacggaggtggtgattccggcgacggcggcaatggtgattccggtgacggcggcaatggtgattccagtgacggcggcggaggtggtttcccggcgacggtgatcacggtggtgggtccgacgacggtagcggcgtgattccggcggaggtggctgtccggcggcggcggtgggtatccggcggtggcggtgggtatccggcgatggcggtggttgtccggcgacggtggtggttagtggtggtggttaatggtgttagtggtgagggtaaaattgtagtaatatatattatatagatgtgataatgttaggtttttttataggttactttgtgaatttataaattttttaggttatatatgcaaatttcccttatttaattcgtacacgttggttatttactattgaaaagggggccttcaaaacaaacctaaccattttagggtttttcaaccttaaccatttcaattttaggaaaaatattagaaattaattctctcataatctatgggtgaatatgtaaacgcattgaattctgaatattttttaatttggaactattgcttcttcttcttcttattctgttaaaggattttcttaattaaagaaacgaatgcctacaaattattttacaaaaataaaccctgttgaagaagtgaaccaatttcgaaagactttaaaggggacctgctaacaactatctgccaaacaagaaggagaagaagatatggaagctttatttggtatattaggtcaaatatctctagcaccctttgaatttcttgatcgtctaaactaataactaattgagtaataaaccacaaatgcatatgtatataaaccattaggtattatgtctcagccattacaaaacgatttttattttta

SEQ ID NO: 28872 - DNA, 1263 bp, Arabidopsis thaliana landsberg
aaacacttttatcagttggcgtaatcgttgaacataataacaacgcaaacacaactacacgagggcatatcagtttggactgtgattgtgggtactcttatgacttaattaggtgctatgagtctatgagactgaatgcataaatgacaaatacactgacagaagagagataaagtcatgatcttgtagttatcactaacctgtgtgtcaggatcttgtagtttgatgagaatctctgaaacagtcctgtggcatacaccgcaactgtcctgacgagcttcttcgacaagagctacaactttgccacaaagattcatcctcttgcagaaataatgaggttgaaacgactctagttgtaagaagaaaagaggaacatagtaatccaccaaacttatgcactgcatcaattcaaaaacatactatttattcagcacatttgatatattaacaaaacaaacagtctaaagcaaaaatatagagagtgtaaggttcagcatcagcaaaatgagagaacctgctgcgaatatccgcgcaattgggaacaccgatcatgaagatcttcgatgatctccgcttgtgtgacatttttctcaaggtagctgagagcatcagtaacatattcctcacacagagtgcaaacgtcttccttgttggaaactttctctacacggacaaaagtaaagctgaaaagtcttaaaacttctactcaaataagattatctgagtctgagccattcttttagttttgggggaacttgtgtgttgaaatataaaactacctcatcatctccagccataagaacaaactatttcatcaaaagtatcaaactttacccctaaagagcaagcctctagaatcaaccatgaattctaaattttgtctaatatcttacctgagatggtggagtcaacgaaagatctagcgtcagagaccaagatcaaacccaacaagagaagcacaaaggttccagctttaagacccatgattcctgataaagaaaaaaagatcagaagattcaagcaagagtctttacaagagatatatcgagttatcaaaagattcaaccgaaattgtagagaaagattttaccttttcgagcaaatgattggtagaatctggtgtctgtgggagaagaacaatttatcgagaatcaatgagtaagcagatccgtggaatgagtcgattgcgtatgaatgtcgaaaggtcaaatgaggtattttaacactacaagctattatccaacgcacgtcatgtcaaacatg

SEQ ID NO: 28873 - DNA, 1802 bp, Arabidopsis thaliana landsberg
aaattcaaggcaaacacaattgtagatcatgggcttggactaactatatttagcctctagtttatttttgccgtcccaggcgtatttgtttggtttgtttataatactatcgcacatggcccagaccaagaaaaaagataacaaagtagtaacaaccctttgaaatttatacacgcaggcttcaataaccaaccaattctatggtagagatcacacaaattagacacagtaaagcttttttattatcattaagttacaatcctaggaatgtggtcaccatggccttacccaaggaacaaaaccgtgttaattttggtgggtttcagcatctgacgccgttgttgtatctttctcctgtttctcctttttcttgctaagtctatcagagtaacgagcaaaaacagcagagagtgcggtcttcacagttttctcgggctcgggctccttcttcttgcgttttctcgagtcctccacaaaatcctcgtcttcttcaacaggttcctctgagttcacatccttctcaactggagcttccgggattggtggttctacaacagacgggtagctcgaagttgcacgcttgaaaggctcgtggaatgtatcatacaaccgcttcacctgaggttttacagtgattttcagacttctatcacaagattattgagttttccaattatagacagaggagaatgtaccttacgttcgccaatcccgggacaacgtgctaaatcttccatggatgcatcgattatatgagcaagagactgcataaaccatgatttttgaggtttccaattttagtttgaaacataaaaatcataaattcacaataactggacataaggtctttttagctcaaccccgaatgtagaaccaagtgtaactacatcgctcttgtttacatgtcgaatgcttgtaagagaatggtttagctgcaaacatcataaactcagtgagaatttacaaaagtgacaaaaaaaatcaatatgccagcctaaagagtttccatacccgtgaaaggtaatctgtatccatttggccttggatgagatctgcaggtttgttttcatagacttttatcgtttccaaataacgggcacattctgtcatgctgcaagagaattcacacagaaagtggtatcaacgagaagcagagtgcttgaaatgtgttttcatatgagatgcaaataactagattgatgtatagacagagacctccaggcacacaatagagtgcaatcatgaagtagagcggtttttgtgacttcaagcaacggtttcaccgtatcttcctgtgcataagtatcatagtacataaacgaaaacactggatgcaatgtaactgaaaaagagagaaatttagcatcaaaatatggttttaagacttaccacgtcgacatggcaaagaacaacacttagcttgaaattcttttgtagttccctaatgcggaaatagaggtaatccggatgtaggagatgataccgcaagctgcagtaaatcagatgtatctagtgtgaaaattttgtgaattttaacacattgatggaaaattgaagttgcagagtttcaccttaaatacaaagcgcaagagttttgaccaagcacgtaatctggaatgatatctgagaaaacccatttcacattcctgatatgtttaagaagcgggtttcctttctaccatcaatgttatccaacaaatataagtcagacgaattccaaagaagatggaaattgaatcatggaggtttaagtctcctcacctgtcgatggctaacgagaatagcgttacgattttgagtgt

SEQ ID NO: 28874 - DNA, 1697 bp, Arabidopsis thaliana landsberg
gcacacaaaatcataataccttggatgtcaagcattttcagaattcacttttttttttttttgggttcacgattcacaaagcaactttacattgaaaatcaaaggaaaattcgacaaggcttcctttaaaaatagcccgtgacaaactcgattccacaaaatgacaagtcgtcctcgtgatgatgaattattagattttgtttttatctaaagacgcatgttaaattaaaataagggataaaagaaagagacagacctggaaagtgagagaggagagtggggttcgcttgagaaaagtggtcttagtgtttggaaccgacgaatgtatcatacatgccaacgattcccacatgtttagactcagtgagtcacccacgaacatcactcgtttccctctccatttcttcaaaaacgcttccccatcaaaccttcatttacattttacacacatgaccaccattatcatgctcaatctatgtataatatgttgatattgatgttgatgttacataccttgggacggtgcatgaatcaggctgccaagagtacttaaggaactgtttgtctggtcggccgaatttgagacagtcgaactcaccgtcgatgaaagggcacgtggatgaatcgtagaaagggtaagaagcatcgaaaacccatctcccttgaaacaagttacaaccactcgtctgcttcctccctttcaacatctcttttcctcctcctcttccggcgacggctgctaacgccgttttgttgcgttggctcacatgtggtttcttgacgtaagccaaggcttggtcggctccggacaagattgtgagtatgagaagcgaaagaagaaggaaaagagagttgagtttgaaacccatcttccaagaacggtttttttttttcttttctcttaacttgaataggctttgtgatggattcgagtttatatatacataggtaaagtagtgtgaagagcttcttggccttatatgggttcaatttttgttaaaaatatcattcattaggaaatccaagaatatttaggctgtccatttacggttcctaaataacaattgtttaggacatgtaaattaaatgtcctaaatagaaataaaaaataaattaatctttatagataaatttaatgtaaaaatttctaaagtaaaatactgtatgatgatcttctaaatctgcatgatttctatacttttggacaatcatcttgaccatctattttggtagatttctggttctcgtaatacatttccgaagttgaaattctattttttgatgcaatcgtgccttttcactttccacaaaatggttttgaccaaaatgaaaggatttattccttcactcaaacataccaaatttcagagattttttaactaaaaatggatcaaaagttcacaactgcatcactaaaatgcatccggtaacgagggaattagtgacagaaaaattattgctataacaaaccgaacaatttgtgatatattgcacacccttggtaacttcgttgttattttttgacaaaattgttgctaaataatcataaattaacgacaaagtaacaattaattgtagtctctaaggcaaagattacaaagaaattgttgatgtattcttaataaattttataaaaagatgaagagaaacaaaaagcgatattcctagaaggcgaagaatgaaaataaaactgttga

SEQ ID NO: 28875 - DNA, 2032 bp, Arabidopsis thaliana landsberg
cgatttgacagattctagaaacctgaaggagcttcctaatctctcaatggctactagtcttaagaatttaaaccttgaaggatgttcaagtctggtggagcttccttcctctattggaaatgcaactagtgtccatgacttaagactttttaaatgttcaagtctggtggagctccctttttctattgggaatttaactaatctttggaaattagatcttcgtgaatgttcaagtcttgtatcactcccgcagcttccagattccataagggtcctaaatgcacgaaattgtgagtccctagagaaactagattgctcgtttcataatccagatattcttctcaacttcgttaactgtttcaaactgaatcaacaagcaagagatctcatcatccagacatcaactcgtgaagttgcggttttacccggtggagaagtgcctgcctactttagtgaccgagctactggaggtaccatgacggtgaagctgactgagagacctcttcataaatccttgagattatttaaggcttgcatcgtgctggttgataagattgacgatgaggctggggttattcacatgttgtatgtgtcatataggatcatggacaaacagaatggcctcattgtcccatgcataccgggacaccgcattataccgctcgctttaactggacatttgtacacctttggattagaagcagatgtgacttccaacgagatttgctttgagcttcaagtcggagattacaaatggggtataaaagaatgtggggtactccaactctcataagtctttttatgttgtaatgttttataagtatcattaagttatgttgggttatgtatagttcaaaatattgtagcttatgtatgcatgtctctgcagagtaagtgatgcagttcttctatgcaggcttcccaacactatgtaggattgatacttttagggaatgtgataaaatgtgggagccatcagtacattatattcagaagtatatccttgccaaggattccttggattgctttgatgagccatcagtaccggaaatttctgagttttctatcccaagcaataaaacaggtccacttttcacaggagagacgcaaagcaggctttgtttttctactcgaatttaagaaggtcttacatatttttataggcccatatatgtttgaaacccaaatttggatcttgattaactttgttacttttcaatcataattaatagaattgagctgttttgtccaaaacaaaaaagaaaaagaatttacctgtataacaaaagaatgaaagaaccataaccatcctaacaaaaaaaaaagtcaactatgttatgatatcatattttgggaaaagaatttacagaaaacaaaggaaaattaatggaaaatatatataccattgaaacaaataataaaaacataaatatattcttactcacttgttaaaaaaaaaaaatcttgaaaatgaaaatattaaaagtcacgtttttcatttatttattcttactcacttgcaaaagataatgttaaattagtaaaatatctggaaattttaatatattttttcagcaatgaacaaagcagaattaaatggtgctccagaatttgtaagatcgggtggtgctatttaaatccaatatcagaaacacgtcgaacgagaccaatagagctagcttctgatacatttcgactttggcgtttctcgatctgttgtttctgctcccaaataaaaaaaaaaaaaaatcggatcggggatttccccaaatcgtaaaattaggttttgttcttcatttctagccctagcttagttttctcgttatcttattcattaaggtttgattgtacctttgtttcgctcccctcctcgaattttgcaatttcgttatcttttgtttcgccttgagagatttattaaaggatcctagtttttctggctcttgtactacgtcaagtttcatggattctcgagtttcgattctcttcgtctgtgcgatagccctgtcatgctttacgtctgggaatgctt

SEQ ID NO: 28876 - DNA, 1400 bp, Arabidopsis thaliana landsberg
gggctaagctagatgtacctacgcccctgttctaatttctgaatttttggtttgggattgttcttacagttgcagtcgcgcatataagagctggatcttattacgaaatcgatgcttcgattcttcctcagagatcgccggagaatcttaaatcgattagagtcgtcatggtattcactcgattctctgcttttttcaccttttattatagacagatctcgttttttgttgttcgtctgggttttcgagtgatttgttaaggtttattgatgcaggtgagcaaaatcacggcgagtgacgtgtctctccggtacccaagcatgttttcactccgatcgcatttcgattacagtaggatgagccggaataaaccgatgaagaagaggagtggtggtggtcttcttcctgttttcgacgagagtcatgtgatggcttcggagctagctggagacttgctttacagaagaatcgcacctcatgaactttctatgaatagaaattcctggggtttctgggtttctagttcttctcgcaggaacaaatttccaagaagggaggtggtttctcaaccggcgtacaatactcgtctctgtcgcgctgcttcaccggagggaaagtgctcgtctgagctgaaatcgggagggatgatcaagtggggaaggagattgcgtgtgcagtatcagagtcggcatattgatactaggaagaataaggaaggtgaggagagttctagagtgaaggatgaagtttacaaagaagaagagatggagaaagaagaggatgatgatgatgggaatgaaataggaggcactaaacaagaggcaaaggagataactaatggaaatcgtaagagaaagctgattgaatcaagtactgagagactcgctcagaaagctaaggtttatgatcagaagaaggaaactcaaattgtggtttataagaggaaatcagagaggaagttcattgatagatggtctgttgagaggtaaaatgcataaaaattaacgaattttatgatctctgaatttggattttccttggttctattgattgattgtggttaattttgaaggtacaaactagctgagaggaacatgttaaaagtgatgaaggagaagaatgcagtgtttggcaactccatactcaggccagagttgaggtcagaagcaaggaagctgattggtgacacaggtctattggatcatctgcttaagcacatggctggtaaggtggctcctggaggtcaagataggtttatgagaaagcacaatgcatatggggcaatggagtattggttggagagttctgatttgattcacataaggaaagaagcaggagttaaagatccttactggactcctccacctggttggaagcttggtgacaacccttctcaagat

SEQ ID NO: 28877 - DNA, 2699 bp, Arabidopsis thaliana landsberg
ataaaaagtgctaacactactaaagttaaaatgagatacaatgtctagtttgactccgtatttcaagggactacacaaccaatcaaatttaatacaaggttgctaaattatacgaaaaacatcaaaaacttttcggagttagaaaaaaactaatcatagcatagagggtagggtaaaaatcttttcagtttttaccagaaaatcaggaaccattggtctattatattccacatcactgttttggtagacgcacgaaattgacctttttctatcactattttgataattaacatattaacaaggcaattgtttatttgcggaaaattacatgtaattatcttttgttttgtgtaacttgtcgacagaccacctaaacaggtttgaccctgacttgagaaaaggcaaagaggaacatataaagcaagtggacgttgactgttatgtctattctcatgttatttttttattaaatgaagattttttgtttgtttatttttcttgtcaaaaataaaaaagattattgttttcttcatcattagccaatacgaattttaacaagtactgctgcaagagtgtactactatactattctcatgttatttttgaagtaattcaagataatttggttttttcataacaaaaataaattcaagagataattgttttcttcatcagtagagacagtatgaattttaacaagtactgcaagagtgtactactatactattcgaactgctctactcgttagaaagttatgattcaactttaattctctaacaatataaaggatagcattttgaaaaagaaaaaaaaatggtttataaacctatgtaaaatgaacaattttttatttattttttatctcatgtttgatttaatcacgaggaaaataatgttatttacaatataaacttatactgtagtagttttcacgtatgccaaaaaggtatcattggtaaaagttgtatatcgtagtcaattattaaattttcaacaagaagatagattggttgatgagattatactaaatggttttaactaagccgtcggtttaacagcggagaagtaaaacaaataacatgttgatccaccgatttcgtggggacctaaggatttacataaaattgacacatttttgagattcagattttcttgtatatatatatttaggtttctaatttcgcaacttggaaagaagaagagaagccttattgcagtatatgagcagcaaggacacgtcattttctggaattagacaaatcaagttcacgttgtaacttgccttatttgtctccttcctattgtaatccctgccacctacctgttcctcccccaaaacacaattcacgacaaaacattttgtatgaactcttttcttttgactcagaaaatgttagtatttcagtaaaatagataatatgaaaaacataaattattagtccaaactccattcaaatatgatcctgaggataccatgtgggtcttaggctggcttgtggtgcttcttagaagttagaaccctccaaatatcgcattacttgagaccactagttccattttgtcggttcgatcacaggccgggctctagccgaagaagattatgggtcaaacaagtactagaaataaaactttgtcgactctgtataattatatcggcccaatgggctttttgggctctgaagcagttggtttccctggtttagaggctttgatgaaacaaacttgtgaatcagaaatttgaatctatttcatagcgaattttgaaaaccaagaattcctaaacagaaatgtgtttgttgaaccggttctaaaccgaagagagaagaaatcaacacaggagtatacaaacttcatatgtaaaatatgggatgatgaatcaacagttagaattttgatagattcaaatttcactcggtgttgaagtctctgaggctccattttcggatttgggtttgagttcgggttccggttcaatgctggttcgtcagtttccaacgttctcgatgagcctaaccaaatcagacatctttggcctctgatctgctgctttcacaacacaggacattgcaatctgcacacatctcaaccatctcttcctctatgtttgtatacctcagaagctcgatgtcgaatacttctgcggcccattcctctctcactactgaatgtacccatctaaccaagtggatgatctcgtcccctgcaatgtccatcacagaatgatcattaaaccgaaaatatatcagctgaaacagtctagtcacttcgggttgtagcgttacctgcggtagtgtgaatgggcgattttcccgtgagtagttcgagtagaacaacaccgaagctgtaaacatctgacatctgtgaagcacatcctgcaattgcgtattcaggtgcaaagtagccaaatgttccttgtagtcctgtggttggagagcttgaaccgctttgtaaaccatcgctactcaaacacttagccatcccaagatctgttatctgtaaaaatgttatgtgcattaaaacttcaaatttagcctcattgaacactgaaaatgtttgtgtatactaacttttgcatgccaattctcatcaaggagaatatttgtggatttcacatctcggcctaagactcttggagcggcagcttcatgaagaaactcaaatcctcttgcagcaccaagagccacagagcttcggatgtt

SEQ ID NO: 28878 - DNA, 2251 bp, Arabidopsis thaliana landsberg
agagttgatctgggcgggaacaactgaaaaagaggtgatcgggcgggaacaactgattgtaatttgggcttctctgcttggcgatttcagcatctccccatcggctccatttagttgggctttgttacgccgtaacaaatatttgggctttgttaaggcccaatacgtatttccagataaagacgcaactagatgagtgggagggaatcgatgccgtgccgactcgccgactattatttgccgatttaaaatataaaaaaagaagaatattggttcgaattaaaacttgttcgattttgtagctcttcctctcgtaatttcctcttcttcttctttcagacagaagcttgcctttgtccgaatttagggtttccatttttctttccgttcttccttcaatcaaatactcgaaaccctaatctcttcttgatcaggtgatactttctctctttctgctgaatgattgtttcctgttgatttgcttgttcgaaaaagtttttatttagagatttgtaggtcattttattttctgatctgaatgcagctctttttggttcaaaatatatactctgggttttgtttcttcgcaaaatgataatgtttgattgttttttctttcagaagaaattgactccaaaactagatatgttatttattctgtagaaaatggtatcgaattttagatacagatactatattttttgttttgatttttgattttggaatcttgtgatatgtttacgcaatggagacttttgcagaaaatggtttctttattatttgttatatgaatctttgattatctgaataagacattgctaggataaccagtgtcacttttttttacgttatgtaacttgaaatcatttttggactcgtaattctaacattctgtttttgttctcaggccttgtcgatttactgtcccttgtatcaacttaaggttcatgtctgatcttgaagttcaagtccccactgcctttggtaaggattgttctgaaatttggcggttaaatttgttgagaatatgatgattattagatgattccacagcattcttgtttttggaatggagtatcttcttctgttatatgatcttcttatgctttgtgttttttttggtgataaaaagatccgttcgctgatgcaaatgctgaggactctggggcgggaacaaaggaatacgtgcacattcgtgttcagcagcgtaatggtagaaaaagcttgacaactgtccaggggcttaagaaagagtatagctatagcaagatacttaaagaccttaagaaagaattctgctgcaatggcaccgtcgtccaggactctgaattaggacaggtatcaagaaagctaccatagctctcaagatacattttggattgcttttagttgctaaatgacttaatatctttggtgtaggttattcagcttcaaggcgatcagaggaagaacgtctccacgttcctagtccaggtaaaaatcacactctttcacaaacaggctaacaaaaagattgttactcgatcatgtttctcatacgtctcaatgaacaggctgggcttgtgaagaaagataacatcaagatccatggtttctgagcagcttctgttgcatttcccgtaggccgtttaagtggatcattactctatcgtgcagttacaaaacatatcttcacctttcccttagattacttgttacttgtttctgttttagcgttggaatgatactaagagaccatcatcgttttctttcacatgtaacttctgtaatacgagattgttaagcattctccattaacgtttgactctactctcagtatatcttgttaccagggtggatcacaacacttaaactattattcttgttatgtgccaattaagacaaaaaaccatcagttaaaaacacagtagtcgaaatcgaaagtcaataaagttgaccagaggcctggaagactcttaggcgtccagagtgtttcaaagtcgctgggaaattacgaaataaccgcttgtcttctctatcgagtccaaagtggagctctgcaaatcctcgggcaagacgacgatttggaaaacgaaattaggttcggagtttagactaatctgaaaccgatattctttcaatttcaatattctagttcgatttcccaaaatcccctcttcggttattttggatcacaggtaaacgatggaggagatatttgctctgatagtctcaatgattctcatagttgcggtgattcctatgatcttta

SEQ ID NO: 28879 - DNA, 1761 bp, Arabidopsis thaliana landsberg
  unsure (1)..(1761): unsure at all n locations
ggttatgagttattgaattgaaacgtttttggcttttgaaattatttctctatattttagtctaggattctaggatttagttttttatctactagtaacatatatatcactgtttttagaaatgtgcaattcattttcagtcaatccaaaacaaatttaaaggaacttaggcaaatcaattcagttttatgcttttggtaactaaagccgaccagtccataccaaatcctttttttttttttaaaaataacccatttcaacgcaaacgggacaggatcattccacatgggattataacagccattggttactttgacttaaagagtgtgataccacaaattccattacacgaactgagtaattttaactgattcttaaaacatgtgtaaaacggtgtacaatgaaagcaaattaagtagaggttattctgacctcacagattatgtaacctcccgaccaaatcagttgagcttcattgatgcaaatgatgaagccatatccaaagccgcctgcacttgagaagcatgcgttccctaaaaccaaaacaacatgttgaagatttaacatctctttgtagatgatactatcacattgtagactaaagagaataggactcatacctgccctgatgcaagaccacctttccctttcccgcaccttccttttagaggacccaatgcagttgtcaaccattcagtgacgtctaacggcttaaactggtctgatttttctggcactcctgcacacacaaccgccttgtttgtgctttcatctgtgctgaacaccattatcgacataccctgcaaggttaatcaaacggaaacgttaatttaactttcttgctatctatgaacaggttatggtacaagtgatgatgtaagaaaatacggattaccttcttttccatgacttttgaaacggcctctcgcacagctgctgcatcaagacccacatccagctggattatgcagaaagtcttcccatctgatgctgcggactcagctgcctctgttgctaatttgacagattttttcaggttttgttccgctattttcttctgagcttttcttacttcattctgcgaagttaggaaaacaataattgccacttcagaattgctttgattacaaaattacagggaaatctagacaaagctgctgactgtaacctgaagcgaagcaatcttagtcctaatatctgcctttttagctgctgggataattgctgcatctactcggcttttcaaagcagaaactttctgtgaatgtgcaaatacaaacacaataagttttacgtgaatccaagtaacgacatcgtcttcattttgtcaatagtttgacaaagagagggagaaaaccttttccaatgcacttccctccgctctggaggcatcctctacttctctttcaagtaaggacgccgcattcaatgcatcaaaagcacattcagtagtcacagcagttaccctacgaatacctttagcaattccctcctccgatagaagagcaaatgctttggcttcgcgggtgtttgttatgtgggttcctggaattgtcaaaataaccctatactcaacattctattcagaacgtaatatcttggtcccaatagctaatgccaatggaaacagaccttcacaaaactcggaagaaagcaatgaccattcattgttttcaggatcagccaagagatcctcaaccttccttccaattgacaccactttgacgggatcggngtngacctaaatagagtaagagagaa

SEQ ID NO: 28880 - DNA, 5316 bp, Arabidopsis thaliana landsberg
  unsure (1)..(5316): unsure at all n locations
tctttgattttgtttaaaaagtcaaaaacaaacaatcagagagagttaataacaagagacatcttttagggtttcgttctctgtaatttaaaactctccgtttccttcttaataaacaagagacgaaaaataacttttgatctctcaataataatctttattttgtttttttcctctataggttttgagttacaatgtcgtcgaatacaacaattccaactacgaccatagtatcagcattgacaacgatgacaaacgtgccatcatccacatctatcatgacgcaaacgtcgatatttgaatgttacacatcagttgggattaaaattttggacaatatataaaaaatatagcgatttttaacttttgagctaatttttgggataagttagaacacattcctaataccaataatgtgcaaatgtcggtgtccgtacaagtaaacaagtaactgtatcatcctcaacattaacaacgaacgtgccaacgtcgacatcaacactgaggatcgtgacaacatcaacgtcgacaaggaatgtgtaatcgtcgatgtcgacacgaggggccttgccagtgtctacatcaacgaggaacgtaggtacgttgactaatgcatcgcttcaccatgcttacgaggtatgcggtatgctgaagattataggtctcaatcaagagctatagaataatcaacacattgcattgtttctatttggtagttaaatctcatacattttctcgttaagttcctacagtatttataagaaaatatcacatgatttgagtttatttagtccaacaaaaataagatagacataaatctcaaaatcaaatcctaaacataatttaataatatcacgtataaaccaaaacgataaaccataacttgttgagcggattatgagcccattaggaaacaaccggcgatattgcaacgtgtagcggtcgtggagaaaggagagtgcgtgatatgtttggaggaataccgcaaaagtgacatggagacggagctgccatgtaaacagaactatcactttgagtgtgtgcagaagtggttgaagattcacacctcgtgtcctcaatgtagatacaagctttgttatgtatataaaagctttttgatgttgtgatttgagagattacaaatttataattgcaaaagttttgtaattggaaatgttttgttgctttcaaggttacatcagaagaaagaggcttattgacttggttatcaaaatcacctaaaattactctactagtttgaattatccatccacttgtgttgattgatttgaatcttcctcattggttgtgttatccctctctgcttcattaaagacttgagtactatatgattccactatattcacctattcaataagcccctttatgatgtaacccaaatttttctttttgtctcaatatcgttactactatatgacttgagtactacttgtaaatttttcttttttggtaggccctggtaaagaatgtcactcacaatttattcataaactaaaagaaaaaatatcatatgtgaatgcttctcggtctcgtggacccacgcgtatcatttacaaagagcaaagtaacaatatctggaacataagtagaagaatgaaatcttggcgacaaactaaacgcataattagctaatccatatgctagatagttaattagcttttcgatatacgtgaaaaaatgaactatctagtctctcgaaagaaagtcatgacacaagcgtaccagaaaaaacattgaattatactcgcttattcctgtcttaattgttattttatcatattctttcaacagacataagacgaaattctaaaaaccaattgttaaattgaccaacacaaaagagctttagtaatagtagagacaaagtgaatatattagttttttgcatgaaaaaaaaaaagaaaaagaaaaagaaagttaaaaaaataaacattggggaaagaaaaatattcgtttaggttgaggcatggcgatatgaagacgatttgaccgggaggcttgtgattggtggatttttttcctactgtccgatatctttcttcctgtaggtatgtctatttcgtttaggttgaggcatggcgatatgaagacgatttgaccgggaggcttgtgattggtggatttttttcatactgtccgatttctttcttcctgtaggtatgtctatttcgtttaggttgaggcatggcgatatgaagacgatttgaccgggaggcttgtgattggtggatttttttcctactgtccgatttctttcttcctgtaggtatgtctatttcgttcgtgttggtccaccggattcccagaaacaggagtagctatcaaactgtcatgatgatgctaaatgtggggaaatacttccaatttagtggagcaaaagtcaatattaaaatgctaacaagagaaacagtgagaagcaagattttgattcacatgaggctaccaagagaccatggtacaaatagtcatagtcttggctgaaaaagtatctatatatacatttttaataaagtttttggttgaaaaatctctcaaatatttactattttcaatattaatcctaacaaaatctatctgacaaaatattgtctttaaaaaaatttacaaatcgactttatcaactaacaatttctaattaattatttgtcttaatcttgcacatattaattacgtattatttgagaaaatctaaacaattagaaaagatctatactaaccatatatatgttgttctttgatcacaatattcatttacttgattctaaagcaaattagttattgacttttccgattttgttgctaaattctcgattttatgatacaaatttatctaatcacaactaattaatactaaatattattgatttaatattaaccattcattttatttgtatgtaattaaaagctaatcaaaggcatattctctcttttattcaattatatcctatacgattttcatatatttcttaaacaaaatagcatattcgaatcattaaattattttcccaaaataagattatgttaatcatgcattaattttcggaattgagaaaattgcttgctcacaaagctatttttttattcgaaatcaaaactaaccctaattgtgtatgagctctatatatatcctcactagcaaacaaatatcacaccttcattgtgtcttatgataacctttataacctctcattagcaaagccaacaaaaacacaattgggtgatacattgctaagagagaaaccaaacctcatttaaagtcataagttataataatgcagatgaggacaaatatagattaggatatggtgttgctggtaaaggtgtgaagcgactttgcctccttggtaccttgagaaatgtaatgatgaagatgatagtgttcgtggtgaggatgatgatggtggatatagaggttatgaagctgagtgggaagaagagttattggcccataattctaaaaatatacgacagccattttgaatgatttcaactaaacatacggttagttccggtttatattcagtttcgtaaccaaagaaaaacgcaaatcccaaattttccggaaatggaggaatatttgaatcttatgttgaaagcgagagagattcttgttagtgaaagccatgaagaagtagcgatggtcatcgatcatctctttaagcgtcaagactccgaagagtataaaacatcgcgtgcgctgtacgacatctgcgtttaatgtaacccaggttgcttaaccctaaagcttcttaaactctatcaatattcttctaatgccgttctcagattacgatcaatctatcaactctccgaaactctcacagatttgagaaatcgcaacttcaaactatctctcgactctctctatgaaattaaaggggttttgatttcatgcttgacaatggaagaacccaaagaatctgaaatcnnnnnnnnnnnnnnnnnnnnnnnttgtgtagcttacaatgatgtggagttgcataaaggcaaatgggacgagcttggtgattgtatcttaacgctagtgaatagcaaagaacctgtcaaggcctttcacgtctttatcgatttgccaccagtctacaagagtttcatagacaagtttaagcacaaaatcttagatgaagctagtaatgtctttcttgatccttatagagttgaagattggagcttggctttacaagtttttgttaaaatgtggattcagcttgagaaaacaggggtgacagcagagttactaatggcgttgatggagatttggatttcctctgttgtgaattcagtaaagaagctagtggagatgaaaaaagaacagttttggtacgagggcttgaagatttcgagagtttcttctcaggagacatgaatctgtatcattacactaaagaccaattccattttgtgttggcttccatgaacgagatcgaaggagtagtcggaacagagacaaaggagattgtgaggaagatcaaaatgttggtgacagaaccatatgatgatcttaagaatcgtagagaagagtttgaacgtggctggtatgacattttgaaggatttatcatcactggaagtgttaaagattcttgcgtcctctgaactctgaagataggtccaaagagatagcaatcagacgactcaatgtcttactctctgatcacacttcaaagaaagtgcagatagacatttcagagatgagacaactccaaccattgctcatctcttgcttaaaggaagaaggactttcctttaacagtatgttcaaagtcctaggtgaggtggtgaaccatgttgcatatgagatgttgatctaccaagaggagacatggtacgagctacgagattatattgcatcgagtaaaacagagtttcatagagcggtttatatcttccagtgcttaacaatagcacttattgacgacgattttgtgattcctgtgatggagaatcttttcctagagataatcacaaggctagacccaccaagagagttgttggtagataacagtagctgggtcttggcgtttatgggtggcttttgtttagcaattcacttgatagagacgtcaagtaaagctgaatccgttaaggagattgcacataagatgatagattctataagagagctaatggaaagaggaatggaagttgggcttgtgaggagagctttcagagatgtggaaagcattgtgaagaaacaattgcgatggtatgatacaagcgagtacaaattcgttaagggtctgctttggagactctatgcaatcaaaggtatgaaatgggaaagtatgattgtttt

SEQ ID NO: 28881 - DNA, 709 bp, Arabidopsis thaliana landsberg
  unsure (1)..(709): unsure at all n locations
tagattacagattaatttacagctattaattatccactacacaacattttttcctttattagattcaattaaatattctttcattaattaatcatttgtttatttctataatgcaagtagcatctggaagactagaaccatgatcagtatgtgggcgtgtgtatcctcaatcatctatgtcttttatactaatataagtaacacacttatttgatattttttacgattcttgacacaatgtttgggttattcgactttgaaacgtgattatgtaggttatatacatattgttatatcgcttcaaattaataataaaaatttgagacattgatgttaaggaatgaaggagaaacaatttccacagttaaggaaattaatatattatgttaagccttaatcttagccatacatatatatttagatggatactatatatataaagaaagaaagagcatttaaaagggaaatcttagcatccatttctaaccatattatgaagaaataataaacaatatcaacagcttatagcatccatcagtattgcataagtcattcttgtcttctcaacaaaaaaataaaagaaaagaaaagtttcttgagtgaaatgggaattgcgacgtcgactatggcggngaagttagcattcttcccaccaaatccgccgtcgtacacggtggtgactgaagaatctacggggaagatgatgatt

SEQ ID NO: 28882 - DNA, 5097 bp, Arabidopsis thaliana landsberg
ggaaaaacacaaaaactgcagaatttagtgacatttttttaattaatttattctcagacacagttctgccctaaacacaaatggttagatagctatgacaattctgatgaaataataattcacaaattattggacatgatatatttttaagtgtgctttaaaatgaatccaaattaatcatgtatatattaagatgatcgattgtgtattggtgaatgattattagttatgactcataatgatattctttgaactatgttatcataatcttttcatacagtgctttacaccctctactttatacatatttatttcaataattgtaattagtggatacaatcattcaataattcatttaatcgattaaagttttctattgttatgttttttgttttataagtttttcaactcttccaaagtaatgtccatttcttttataaatttgaatattctgagcaaaatcatggaataaatgaatgtactactaatttcacgccaagaaaatgaactctataaatgctatagcctttcgtatgaattatgagtcatttatttatcttcatttatttgaaatctctaaagtccaactaaaaacgtttgcaaattcaaaaaccaaaaatattagttatgatccgtatgcacaaaccgtagatttaaggaaacgaattaagacttaaacagaggtcactgacgttgtaatgacttatgtgctgtctttttctatcacaaaatgtcttaatccaaagtattaattagtagtagtagtagacccatttaaaaaacttttccaccattaaatagaacaaacatttcatgtgttcttgatagttgatagttgataccaacacatgtctattgtttaatatggttatgctacagccacaacttaacaattatacattagcatgattgcatctacatataaaaataggtattgattttttttttttcttaacctaaacgagaaattaactgatcaatgaagtttcacatcaaaattaaatctcactctaggaccgattttcctggttcaactctcaaatacatcggttcgttctgatcattgatttgagtggcaaagtctataaaccggggtaatgccttcccaaacgaaaccaaaccggaccgaaattctcattttttgtgagcttccaaatcagacattagcttagccggtttagcctttttctgtcggtacttggcatatgagtaccacacaccaccagctgtgttgaccactaaaccggacacgttcaaagcatgtacttcaacaccacccaagaggacaaaaccgagcgtctaggagattaaaaaggaggcaaagattagtaaatgattgcctctatagatttcatctcgaaagagagccaaatgagggtttatacttacagtggaaccaacgcctttgagaacaccaacgatggttgttgttagtgcagagttcacaatggtgcaaagaaacatggtgaagttgaggacaatgcccataaccagtgaaagaatgagaatcaccaagaacggcaaataagaacactgtcaaagaaaaaaaaattgattttgacattttgaagagactagtttctgagaatagccgcaagcttggaatgatgaagtttctaacctttgcaagtaatagtgatagagagtttgggaattcgccggtaactatgatgaggatggacaaaaatgggagagaaaggaagctgttatagaacattatctcgatggaggaaagcccgtcttctgcaccagacttctccaccagcacaaggtacatagtctgcagcaatgatgagaaacaatattcatttactcgtatgggtgagtggagactgatttaagagaaggaaaagaacaaatgaaaccaacctggaaaaagacagatgttaaagccaaaccatacccaaaaagatcaaaagaaaaatcaccaagagctgcaattacacagcctgcagcggtaagtagtacagatagagcaacctgaaaattaaacaaaagattcagagcttgaaacattatacaaattcacaataaaaaatcaacattcttatggtaagtacctgagttgttggtttgcctttaccaaacaaaaccccagaaatcaaaacagcaagtggagtgagtctcttaatggcgatatacattggaatgtttactcctttcaaacttgcaagagcaaatgcaacattagcattgtagaagatagaaaccggaagaagctttttggccgtagccatatcaattcctttagctcttgtgtatcccattcgtctaccaaagtgtataagcaaagaagtagccaattgctaacacaaccaaacaaaagcaaacgggaccgaattcataatcagcatttacaggaagtgaataatctctttagatatctagtacttgagaaatatggatatcagtacctgaagagtaagaacagtcatggaatgtggatactgcataatcacagccttgttgataaaaaccattgccattgaagcaatgccatatgaaacagctgcgactaaactgcatcatagaacaaaccagtaaataaggttacttaaaatgtctatagctttgattctctataactctctagagatccagatctacccagatgaagaaccgcaattcaaagtttcaaaaatcacaactttaagaagttatcgaatcctctgaaccaataattatcacccctactaactaaatcgatcagaaacatccctaatcgaattgaatttgaagaaacagagcactaaagaaggagactacagtacctaatggacgaggtaggctccatttcagcttgaacctccatggggaaagaagagtgatttgagttataaatctttggaaaattcctctcagggtacacgtttcttggcagattcaacgtgatttagacgcatttcgagaagaaagagcgattaaaaattacttctttatcagattttcatttcaatttacagtttttttcccttggattgaggatcttagttcttaagcgaggttacagctttttccagtggattactaaattggacgagagagtaatagtcaacactcaaaaagtctttaaccttctgtcggaacaagaagggcttgctgtccgttgctcatctcatatagtaaggcccaaaaggcccaaaggcttctttttccaattaaaactaatttttgtatagcgaaattatgatgaagaaaatcgtttcatggcacgtcaaaaaactttcgcacaacaatttttttttacaaaagggtcacttttatcagaacctaatctatcatagagttcccatcaacaaaaaacctatcatagagtctagtcctgtgttaacgtaggtgatgggttggtttcatggtttacatggacaattattatggtgtaagaaaaagatgatgggtacacatattccatttaaccaatgtgaaagattcacatcacctttttcgatttttaatagattcggttttaccttctcgtaacgtaattctaagaaaagaaaacgtcaatcatatttactaggaaagataattataatttattgctttttctctcactctctgacctgaaatctcctactgagatttttgaagtgtattcaacaatggcggatccaccacatttctctctgtttcagcaaaaatttcgtaccggagacaaaccatttctcgtaactgtttctctccttttatctttttgtttaagttactgtctttgtcatcgtcaagaactggttcctttttgttttattttgcagactcttgatgctgacttcttaatgaatcacacgaaagtgttactaaaatcggatgcttcagacaaagtttggaaagtgaaactggacggcggtaggctctccgaaggctgggaagagttcgcctgcgaccagaaattcagagacggtgacgttttggttttcaaacatcatggagacgaggtctttcatgtagctgtggtgtccccatctgtttccggcgacatacgtaacgcatcttctagccaagttattacggaagatacttatattgatgttgacgatgttgatgatgatgattatggacaagacgacgaagatgatgatgatgatgatgatgagggcgaggataatataggtaaggtgtttcatgaagtattacacaatctgtttttttttttttagtgtaaccggtatgttagtgaagattgttgtgattcagagaacatatcggagaagacggataaaagacaagaagcagattcttcatcagaccactcaggtttcatcacagcacgtgtcactcgttatagcctccttcatgaccgtttggtgactacttaaactccattttagctttgatgtaacattcaagattataatatttgttgagtgatgtgacttcttgataatgtttttgcaggatctttctagaaattttacgttgttgtttggtgggcaccaaaaaacatgtgagatcgatgtagtggatgagcaagggagaagatggacaatgaaacttgccaaaaacatctcaagtggtgtgttttacatcagactaggctggggaaacttctgctgcgctaatgggctaactcaaggagacttatgtaagtttaaacttttccaaaatgaggaaaggcctgtgctttggttgtgtccacaggaatctggcaatggccgtaaagagaagaggacgtttgatgaagtttccaaaggaaaggagaagaagaccccttcaccatttctgatagtaaagtatacacctagccgtgagactaccgggcaactagtaagttcaacaacttgttgtcataaacgttttttgtgaacatcgttacgagtttaagcttttgatactgatcattgaatcttgttcagtcacttccagtgagtttcacgaggaacaatagcattaataagactggggaggtaattctgctgaaccaagatggaagaaagtggtcatcttatctacagataacaggacttggaagaggcgccggaagtgaatggttttatttgagaagaggttggagagagatgtgcgaagcgaatggagtgggagtaaatgattctttcaagctggaactggtgtggaaggagctaatcctatgtttaagta

SEQ ID NO: 28883 - DNA, 2432 bp, Arabidopsis thaliana landsberg
  unsure (1)..(2432): unsure at all n locations
tcttgtgatcatcatgagtctaaaaaaaagattagcaaaggtaaaaagagattaatgactttgaattctaccgtgattgagaaatcttcgacagctccaagatggtcggattgccattgcagtttctgcacttcttggcttacttctaccaacagagattctctgtttgttaaagttcaacaacccaaaggtaattaatttttatccacttcctacatttatttgtatgtacattatatatatacacacaaataaatataaatgaaataaatctcaccaagcaagaaaactggttatttattgtaaaataacattatctttaaaaaaaaatcagcaattacaaaagtaaattttcttacaagaattataacatttttactagtctatatcaaattatatgattaaagggttcaacatttttgttagtccgatataacatttgttgttacgtaaagaatactagaatttaatatactcattactatattttacttgtcgctatccgatatcggatacacaacagttttcttattttgggtaatatattaaggtaacatataaaataaatgaaatatatgtaaaatatgtgcagataacaagaaggcccgagaaaacgttgtgtttatacatggttttgtatcatcatccgcgttttggacggagactctcttcccaaacttttctgattcagccaaatcgaactataggttcatcgcagtcgatcttttgggctatggaagaagtcctaagccaaatgactcattatatactttaagagaacatttggagatgattgagaaatcggtgatctctaagttcaagctcaaaacgttccacatagtagctcattccctaggctgcattttggctcttgcactcgcagtaaaacatccgggagctatcaaatctcttactcttttggctcctgtaagtcaattatacataccctctacgaatcgatactcgaggaataataagcttccgacttaatgctaattgacaataagtggttataatatggcagccatattacaaggtgccaaagggagtccaaccagcgcaatacgtgatgagggaagtggctcggaaggaagtttggccaccgatgcagtttggtgcatcggtgcttagctggtatgagcacctaggccgcaccattggccttgtccttatcaagaaccatcaattgattgaatttgtcacccgcctctttaccctaaacaggtacatatatttttttttcatagcaaggttttttatatgtcataaatggaaacctaaataaacttgctcttaatcacgtttcaatttatttagaatagattttattttcttttctggtgataaactctagaagtttcgggtctttggaaactagaataagcaacatctagaacagagaagttacgtccacaatatttggataactagaataatcaaaattatgtcataagcaaaatcaacccaaatattacagtgcatgctgttcgtccgttcggagaacaacgaaatgtgtaaaagtctatacgtttaatgaaccaaccactcgtcttcttcaataccttgaagttgactcggaatggttatatttaatgaaaacctacaacttttttttctttatgtaaatcatctctgattggtacactatagtggttcttacataaattaagtgataccatattaggaattaatagacgagttatgcaatctaatagctttatgtagtaganaaagttgccttgaaacatagaaagcgacttataacgaccgtgtctcttccattatttggccccattcaattccattttgtcgtttcatatcttaataagtatatgtataacttttaactatttatacgccatataaattaatttattttctttctatgtatgcaggatgcgaacgtatttgatagaaggattcttatgtcacacacataatggatcatttcacacattacacaacatcatcttcgggtcaggagccaagctcgactcgtatctcgaccatgtccgtgaccatgtggactgcgacgtcgccattttccacggtggcaaggacgagctcattcctgtggagtgtagttacagtgtgaagagcaaagtgccacgtgccactgtccacgtcatccctgacaaagaccacatcaccattgtcgtcggccgacaaaaagactttgcacgagagcttgagctcatttggcaaagaaccaaatcaacttaagtgaatatattttatagtgatgaacctctttttttcttttttctgtttctattaagtatatatttttcttattacaaaagttagatagatatcgttttctattcaatgaagattttgttttagtttcccaaagaaaaaatgtccagcctctaattttatttttctttttattaaagagaattagaggaaacggggaatgaatatttttc

SEQ ID NO: 28884 - DNA, 637 bp, Arabidopsis thaliana landsberg
  unsure (1)..(637): unsure at all n locations
cagacacgtactctccaccaatagctgcaaataagagcaagtaagaacatggtctaaatctggttttactagcagaaaatgacaatcaaaacttacttgtttggctcaagtaaaacggtaaccagtacaagaacgtgtacgcgaccagcttcgagaaaaagagacacaacgcaaacggtataacaccagggatcatacaagcttgcaaaagtccaacacttcttttattctcataccctgaacctgaccctgatgatccctccccatccccttcaacatctgtccctaaatcttcttctacttcctcttcttcctcttcaacatctctcttcctcttaataaacnnnnnnnnnnnnnnnnnnnnnnnnnnnnnnnnaacatcctcaggatacgcagccaagaacaaataaacaagaactcctcctaaagacatgacaaaaccaggagctataaaagaccatccccaaccatattcaagaacaccagcagcaattaaagaaccacaaatgttcccaacagaagtatgagcattccaaatccccattataagcctctcttccttttccaaaccaattcccagcacagccacacagatgccatctgtcgctgaacaaccagcgcatttgataccaaaaga

SEQ ID NO: 28885 - DNA, 2169 bp, Arabidopsis thaliana landsberg
cgttttccttgtctttgcgtctgtattacgatcgagtggtcacaacacgattttttaatatgaaactgtagcttcataattatctttatttatctcgaatttcatagttttttttaaaaaaatttacttgtgaaaatagtttcaacctatactttttgcttagaaactaggagaagattttaacattttcaaaatccctaaacttttcttcttgattgcataatttatactatatgtttgccaaaaatttctcatttttcttgttttttccaattctataacttcttttcaaatatataagatatagccatagttgaattatggaatttttcaagtaacgtaatgtcgtgattaaataggaatatgtagattgttgtcgagcatttcaaacaaagataatgttttgtcctttgttctctatcagttgtcgtattgcacgtcgttgtttcccttacaaagcaaccctaaaaataaggtcaaaactcaaaactgttccaccttttgtataacaaacgcaacacgatgacaaaagtatctatttaataatacttgaacgacttaagtatcatgattttgtcattgcgtctataatcataccgagagtttgagttttacacaatactaaagtgatagttaattaatcatatataaaagaatattatctactctacgtactcataatattcttacaaatatttcatcaactttcaatttctccttacgctataatgctatatcattatttttaacaagaacattactttcaacttacactacccaatatccttaatcaaaaagttctccaaaaaacatatcccatttctttgagctatataaaccatgttatttttatatttatttgtttacttcccaactgcactacaaaagtttagagatgatgataattacaaaataagaactattgaaaattttcaaatacgaactagaaaagtctaattaccacggaccacggtgcataacgttcattgatggaccgaagcaaaccagttggttcttcataagttcttacttattgcttacgtttgattacatcatttcattgggctatcatccatgggcctaataaaacttcattatgggccatctagtgcaaacccgtttggaaaaagtactttacggtgagatcaaaatcgctcttctcatattattgtacgtacaccaagctaagctaacataatattttatcaagaatcttttttctttatccttttatcccttgaaataatatcttcaagcgtgatccaataaaatctcacaacaaaaaccgaaacacgtatacaaaagatacatttcaagacttaatccattagctgttctttccggcttttcggaatttgactccatcaaaaatgagaaaccaaaatacaattcaaaacgagaaagcaaataaaatgtgacatgtgatatatgcatgtgatatcccaagagcttggcgataaatacaactcagttagctacattatgatattatcagggactagtgtccaaactatatattattaaaaatttgatttataccaccaatcccccgatcccatcgagagatttaatttgatcagacaataatcgtgtattcattctcttatattattgcactaagagctcacatgagctgctagctgtatatcaattagaatctacttgattattgttaaaaaattaggagcaagagatcaaatcttatatatctataactagtcgtagtagatggagttttgggaagtgacccggtaactaatagtatggagaacgaggtgggatggatgaatgaagcgtcgaaggatagcagcaacaatggtgaatctttcattgaaatacaaatcaacaaagcagtcagaaccacaggattgagcatctcttcttcgccatctcccgagaacgaaatgcagacgacgacagcaatcttctcatcggccactagttgcttctcagcatacagcagcgtgacgaggttgatgatgaaagtggggtgtttgagtatagtgggagtcataagagagaaagtaaacgtgggagagaggtgggtcctccaagttatacagagacgacgaaacaagagccccctacgatactactacgaaggcagcatgagtaataacaaggatgaagcattaacggacgattccctcaaggcagctatcgcttact

SEQ ID NO: 28886 - DNA, 1992 bp, Arabidopsis thaliana landsberg
atctgttttcgacagagagattaataagacacaaacaaactcacacagagataatatacacacgtgttttatccattacatcgccactttaattaatcgaaaaatattatttaggacccccttacttttcaggtatttcgatttcaacccgtatcttttgttttcctaggttaggcccgtattatatctaccaaaactaaaggttgtttgatcaggttttagttcagcttgggtatggattggtttgtcccaatagttaagcaaccaattttgtgttcttatcttacatacattgaaataacaaaaatgaattgaatattacaaaaatcaaataatcaaacacacaaaacaatctgtttgattcaatttcaatatatctataccaaatggtcatcctcgcctctagtgataacgttatgttcgggcactgaccacgacgacgatcggctagagttcaaagccacggtattacaatcagagagagtatcttgcaaactcagcaacaaatgcgaagtgctaaaactcatggtgggtctagttttaggcacaaccggtacatcagcctcaccaatcagcatttgcaccactgacctcatagtgggcctaaacgctggatccggatgcgaacaagccaagcccacaaccaagacccgccacatctcaccttcatcaaacttaccttcaagcctagaatcagcagctgcagaaactttcccttctttatacaaaccccacacccattctactaaattcggatttaccccaacattatgtctttgcacatttaagtccttctcaatcggtcttcttccactaaccacttccaaaaccaccgctccataactaaacacatccgtcttctccgaagcacgacccgtcagaagatactccggcgctaaataccccatagtcccggcggcaacagtcgcttccggcgacttatcatgctcaatctgtctcgccaatccgaaatctccaagctttgcattaaaactctcatctaacattatattactactcttaacatctctgtgaatcacctgattctcacactctctatgtaaataagctaaagcagatgcaacaccaagcaagatctttttccgatgatcccacggtaacgtgaatcgtgactcaaacaaagctttatcaagcgaaccatttggcattagatcgtagactaacaaaatctcacctttctcgtgacaccatccttgtaatctcacgaggtttctgtgtcttaagcttccgattattgatagttcagataaaaactcgttctttttgtcttgtgagctatggctgcatcgtttgacggcgacgatgtctccggtctccggtaatattcctctgtatacgactccgaaggctccatgtccgatgatacgactctcgttgaagttctttgtgccggctttgagttctttatagctgaactctttcggagctttgatgatttcagatgcgaatgaatcagatctctcgacacgtttgaactttttggagtaaacccagaataaagctccggcgaatagtgctaagaagaaagctccggcggttactactccggcgattgttccgggattctctttgcagaaacggctgtggcaagacgacgacgacgaagtttttaattgagtgttgcttgagatcggaatcgctgaagacgacggttgtgacgccaacggcggcggagatttcaccgaattagctttcggattcatcaaattagcccgaggaggaggtgacccggatccggatccgagactcgacccgaatgatgaactgaagctccaccattcgatactgtgaatctctgtacttccctgagttgacccggagaatccaacgaacatgaaatcgttcacgtatcgatctaaatcgagagggaaagacaaaattggaactttcggtttcagatttgagtaagagactgatacgttgaagacccgagtcaatccgtcgtattcgatccatgaattgatggtgttg

SEQ ID NO: 28887 - DNA, 2070 bp, Arabidopsis thaliana landsberg
agtattgaaacatgggtcaaatgactggctcaagggctgagaaggactggcatccatatcatcgatgttttgaagccgcataatcggtaatgatcctaccaaccgctccatctcatctgtgaagatatcctttttcctctctatgttaatcggctctgacaaggccattgtgttatccacgccgttttcaggactagttttagtttcatcataactctctttcccatcaacttttacagtgtcagaagaacttgaccctacagaactattaccaccaggtttacattcatcaagatcgctaaaggaaaattgttcttcttctatctctggttgcaggatgctttctccacttgctgactgagacttctcaaaatctcctgccgagatatgcatatcttttatggtgattttattttcatcttgaactggagagccagtactgcttccttcttgagaagtgccaatgctccccatatccgcttggtcagctgaacccaatgttgcaatttccacagattcaggagcccttaacagttcttgcttggaatccagatcgcttccacttacagcatcctagtggagatacaatttatacaagacatcagtaccatacatttataaccttcttattctacctttgaagctattaatcaagcattcccaagaatatgaaattgattagatgtagtaactaacctctgctagtgcctcggttcttggttcgacaaagatctctacgtttccactcccttcactagtaacagagaacaccatattcgatgcttcacataaaccattttcaacaacaactccactcgatccatcctcttcacaataatcttccacattagtgctttcacgaaaatcctgctctttctcatcaagaaaccgcaatgtaggagatgcaacaagaggagtctccaatatcgaatcgctatcaactatcatctcagagctaccctcaacacaagattttccactagtactagtactctcaccatagtctttaccatccaaagactcagaagacataccttttccacgcttacgcgtatcgatattagtagaccacttaacctccaataaatcagcagcaatctcagctctctccacaccacaatcttgactctctctaacagacctcccaccaaacacataccctaaaatcccaggcttaccaacaatcttcccattaccagtacgaggactaggagaatcatagttacaactcctagacttcaaaggaatcttaaccttatcaacaacatcatccctactagtagtctcagcttcatcaccagaagacaaagtataaacttcaccactctcagattcaccaacaacatcttcaacttctctaagaaaataagcttgtccagtatgagctaaatacatattgaaaccagaatcaacgccattaacatcaattctgatcaaattcctaccattcttcaaaaccccttgaaatttcccaaatctaacataccaaggagacgatttaaacgttccatcaggttgttcaacaacgataatgtctatcgcaccaccaaatggatgaaacggacctgaaaccgtacctacaccacggtagatatagcttccgatcctaccgacggcattcatttttcgatcggaaaagtcaacgaaagttacgatctttgagataaattaggaaagtttatgatgtggatcgatcaatcatggtttgttaataaaaatcgaaactttgaataacccagaaacggagaagaggagaaatggattagaggaagaagcaaaaaggtatattctgtaagaaagatccagagaaggaagaggagacagagacgaagatcatcattaattcttgccgccggacattatttgtttcggtggggttcgtttcgtagtgatccaattcaacacccttcttctcttcttactctattttttttttatttttttgaataatttattgtcattaattaatgtttcgacaaatgtttttaaaaaatgtgaatctgcaaagagatcaatgtatttgcctatttggattaaattgtttactttattgtcattagtcaataatta

SEQ ID NO: 28888 - DNA, 2164 bp, Arabidopsis thaliana landsberg
acctcgaggtttttagtcttttggcatggaactatgccaatcattctatgggatgaatgccattggattgttgttcctgctactttcattagtgctgcctctctgttcagtatagaagaagtactttgtcctcctcctcctccatacttaccctcttttgcttgaatccttaaccattaaaccttctttttggattggaaactctgcaggtgggtgttcttatagaagaaccatttcctatgttggccttagatgagctttgcgatcttgtgcatagtaacatccaagaagctgttaaatctgagaaagtcatacgtaaccgcatcattgcaaagataaagctccatgaattcaagcactcatcaaatggtcgccatagatcttgattaccggttggtgtgagtgatgtaggttgtcttcccgagggagctaagaacatgtgatggcttaggttagctttgatatatacgtatcgtatagaagatacaacactttataccagttgataggtaaacgtttgtatatcttccttttgtatatgtttatgttgtatatataatatgcagattcaactttttacacttttacataagtcatagtttgggtcaggaagccagttgtaccatatttgctttatttagaatccatttactatctcttgaaactaattctttagccttgttgtaatgttgttattgcacctaaatgaataagaatatgaaactcatctaagataattggcaaaactgctcatgaaaagaagagttttaaaaagctacaaaacttgagccaaaagcaaccatgactcagaagtgtatgtctattattcatctacaatctcggaaactaaaaattaccaaaaatcctatatagaactcatattaccaaaaattaaaaaggatataaataaactagggctttgaggggtggtacaaattcgttagctctattgtagtttgcttattaaatatcagacacaatttccaaagtctgagtgctcgtgaaattttataaatagcaaagtatttgagcttaaaacaaccatgtcttacaagtgtatgaaataaaagacgaataccatcactagaacataaaagtaatctgagaaaataataaacggactatgttatacgagcccaaaatcctgaaaactttgacacaagcttcacatcctccaaatgggtacaaggttaacatcctctaaatggtcaagaaaggtgtaagctttgtgactctgaaaagtttccattcctttgattttaactatagtgatagtgttcctatcgggattgtaatagagaaggtagaaaaagtcggatatagtgtttggggacaacacaatttcacctttacgagtcgttccaacgaaacataacttggtctcttcatatacattcctccacggaggaggcaaaacgtagatatgacttgaccattcgtgtttctccgcgtcttcaagaacccatagttgaataccggtgcatacgttgttaggcatgttgggctgaagcttagctaatttacccttgtaatttactagaattgaattcagccgccttcccaagtacaatatttccatgtcatgaccagcaactttcttgatatatttgaatttgtcagatccaaactcaaagcatactacatcaggatacctgtcgtcagaaacaccatggacaatggctaagtaatacaaaacaccattgatgcataccccatcatattgagaaaagccattagtatgctccacaggaacaggataatgtagtatgtcacattcgatcattttccttgacggtttcttcccggtttctaacgtgtgaacttgatgctcttcagaatcagctcgtcctatacatgaacgcgtcatgcataatactttgaaatttttgtcgatcggatcaaaccccaaaaagcttatcactcctttcctccttgttttcactttacgtaagaccacggattcccctgtgctagggttacatatcaatggctcagtaaccgtcgttccctttgtagttcgttgatgtaaaccacatacccagccacgaacaggacgacaaatattagagggacagctcatcgggaaactcatatgcaaatttgcggctataggagacagatcttgaggatgtggtgatgagaagaagaacgtttcgcagtcttt

SEQ ID NO: 28889 - DNA, 813 bp, Arabidopsis thaliana landsberg
ctcactatgcctgtgcttgtgccagtgaaaaagaagaagattaaaacggcttttacatactgagacaattaattttgttctaaacatacaatacaagaagaatgaaaacgtattactaatgttcttcaaatggcttttgttccttctcacgctataactgagaaaagttgtttctttatctaatgactaccttcaacacattttctggaagatacatttataacttgaaagatctcttctctccaacttttctggagcaaaacgctccaaaatctctcatttctccgagtttatggaacaacacctatctttaatcttgcgaaatttctctactgaccacaacatcgaatggctctatttctccaaacaccatcctttctttggccactataagtctattcattcattatttgaccggatgacaaaatggcatacgcaatacaaaacacaagtcatgctcacttcaacacagagtggacctacaaaactctcttgctaaagctatagataacttgtggaccaagtggtcttcaagctctagcttaccaaagctggtgaagatgacatttggtgaaataagtcttcaggttcagattttaggaaaaacagacaccctaataaacattttttctacaagacttatcaacctagacgtgtccaatttgtgccttgtcattgtattatccacacacaactgacagacaatctaagtgactaggaaccagtgccgtttgcattcacatgagcgagttccaagaataaataaagagccttatgaaacagagagtcatcatacactattataacaaatgc

SEQ ID NO: 28890 - DNA, 1684 bp, Arabidopsis thaliana landsberg
agagaatgaaacttttgaaagctgatgatgagacagagattttgatgggtttaagagacttctggtgggtataaggccggaacaagggattttggtgcccatcgaagataaattgagctccatttgtgtgtgatttagggtttatggcaattactcgaaaacagagcatatagagaagaaagagagcagtatgagtgtaaggtcggttcacggtttggtttggtttggttttgttctgctattaattttatcggttttacagaaatttaaattactggtttggttttcgttttgttcttgatctgaattaagttatatttgtttgcaatatttttttgtgtcagctgaattttattaggaaccaaagaaagtatacatgttgaaattatatatgccggcagacggaagaggaaagttttacccaaacaaatacagggaaactaacgtacattagccttaatatacaaacagaaaccaatgtcgaaaaagagtcaaccatataggaaaagattgaaacctaagcgctaaaattgaacaaaaggaacgatagactctcgccaagtttctctatagaacttgtgaacgtcggaagcactaataagaccggagacctcacaagcaatagcaaaaccgacaaagaggaaagcaagtaaccatccatactagagacacaaatacaaccactatcatacctcacaagcccatacgaagaaagcaacaaaacactaggaagaaggcaaaaaccttgaaaatcaactagagataagtcaaataagatcaacaactctttacacgcagacactcgtcgaaacagcttcagctagatacagacataaaactgacgacgtcctcaaaagagaagagttagagaacgattccattgtttcgccaagaactagtgtcgtgccaagacttatcggggtttaaggcaaagttgatattaattaggaattttttcaaaaaacaaatttaaaaaaattacaaattaaataaatcattgaaaacaaaacaataatataactaagacataatttttttccttcatttttaataaacgttctcaccaaattttcataatcttatgtttttttgggctccaattggatatgatctcaaatacatgtttctaaagagttcaaaaattttttatcatcaaatcagcacaatcattatttataaagaaagctacgataaagatgaattagaatatattaagttaataaatattttgaagagttgaagcaggttaaaagaaataaagtgaataaagaaaaaattaaaaatcaggttagtcactttttaaaaggaataacaattctataaaaaaaagaaacatgggagagaaatcgatccttggttttgataattcaaaccattatgatacaccatcttttatatttgagggctataaacaaggtttatattttggagacccaaggcaaatgcctttttccttacatataggcacaactcggtctagaaccaatcttcaaagaagagtggctaataggtggctgagcaacgaaatactatcagaataaccaacaagcaagaggactcaaggagaggtagagcaaatatcaaattttaaaacccacaaacaaagccagtggacttgagttgaaaacagatacaacagtggaaccatccactttcagaacttgacaccccataagcaacttac

SEQ ID NO: 28891 - DNA, 1672 bp, Arabidopsis thaliana landsberg
gatatcgccacttgtaagttttttccctagtaagacgaaacgtgcagcctgagctttgagtttacgagccttccatttatctgagggcaatttcccttcggatatatatagcttatgatgggttccatccatttttggctgcattcgtccgggtcatcttgatccgtgctgatttgtatcgggaggacgtgttcttcttcgctgagctcaatacttggtttttcaatgaattccactgggatgactcttctcaggttcgggtcggaggttgaggccagagcagctagggcgtcggccgatgaattttctcctcgtggaatccttgttaactggaattcgtcgaaatttttggttaacttttgacatgagtcagataggcttccatttttttgtctcgagccgtgtactctcagttgaattgattcgcgacgagctgggaatcgcaaaaagctcggattttttctatctttagcccccgagctagattgagtccggcaacgagcgctttgtactcggccacattgttggtagcctcgaagtttaatctaaatgactgctcgaggacctctcctgttggcgaggtggggtggatgcctacacacgagccttgcttcgatgacgagccgtctacgtgcagaagccaagttgtatcgagtggattttcccgggcctccttggtgggcagttcgacaataaaatcggctaggacctgggactttgcacatgttttgttctgatactcgatgtcgtattcgctgagctcaattgcccacttagccatacgtggtgattggcttggactgtgtaagatagcgtagagtggcatggattccattactacgatggaatggaattgaaagtagggtcgcagtttccgagctgacattaggactgctagagcgagtttctccatttgcgggtagcgagattccgcgccggtgaatgtctacgagacgtataaaatcggtttttgttcacctctgtcttctcggactaacactccactgactacagtatccgacatggcaacatacaagtaaagtggttccccgattatgggtttcgcgaggattggtggggtcgccaggtactttttgagttcctgaaaagcttcttcgcatcgggtcgtccattcgaacttttgtttctccgaagcacatcgtaaaggctaagcatttgtcggttgatcgagagatgaaacggttaagggccgcaactcttccggttaggcgctgcacttctcgcttgttctgaggcgacgccattcccaataatgcctcgatttgctttggattcgcctcgatgccgcggtgcgtgaccaggtacccgaggaactcgccggatcttactccaaagcgacactttgcaagattgagtttgacgttgtagaggttaagctgcttgaaacattcgcgtagatgggttatgtgatctttctctgccatggatttcaccaacatgtcgtcgatgtagacttccattgtcttcccgatctgtaatgcgaagattttgttgacgaagcttgataggtcgccctggcgttcttgagtccaaagggcatcactcggtaacaaaaaatgccttgttctgtgtaaaaagcagaaatttcttgatcttcggggttcatcgtgatctggttgtaaccggcgaaagcgtccatgaataacagtag

SEQ ID NO: 28892 - DNA, 1879 bp, Arabidopsis thaliana landsberg
atctacccccaagtgacattttggtgttcgaaagaaatttgattttgaacttaaagtcggtaaaagaaggagatccgccggatactttaatgacataaatgttttccatgaagtaccaacttccttcttagagaactctaggaatattatgttcatagatgtaaggaggagctatggcatcaataattgtctccttaataaaatatgaaaggtttaactcatgcaatattaaaagattagattcaatgaatactctaagttaatacttacaattttgtcgcacatgatcatagggtgtctcttccatccatcatgtggtagtgaatgcctaaaacttagtatcagctaccataaattaataattaaaagtggtgtgttataaataaaaattattatattagttatttcttgtactcgttaaaaatattataaattttatttatcttagtccataaaaaattaaaatattaaatttaatttcatcatagaataatattttgtgttatctaatagcacttcatatatatatatatatattttgtcatattaaaacaaaactaaatttatttgttaatatatcaaatatttaaattataaagatataattgttggaaattctaataaaatttagaatctttaattagtatgtacataagaataatgaaaatccattaaataaataaatgcattacttaattattagaaaatagaagttaattaataaagaaacgtgcatatcagatagttgaaggttgcttgtcaaatttaattgattatatatatatatgcaaaagtatattatataatttaattaattttcactagtgcccataatactcgaaatgctgaacaattttatgaacccgcggttaaagataatgcttgggaagccccaaatccttatactgcagattttatcaactgtttaaatacagcaagtgagcctctatatgacaactgcggcgaaggcttgtcaaaaatttcattggctgctaaaatgatgcacattaagacgaaacacaatcaaacagaagcgtgtgtcgatgatactgcagacttgtttcataaggttttaccaaaatgtaatgttgctccaagaacttattatgaaacagagaagttgatgcggactttgagtatgccgtaccacatgattgatgtatgccaatataattgcaaactcaggattaagatgtttgcaaattttgtgagcatccaaggtacaaacctcggaaagcatcggtacgggctactagaaagcatattccatacaagagaatgttctattgccaatatcataccggctcaagagattatatctatccgaaaagacagcgccccatatgagttggcacacaaaacatacatgtcttgatcgagttatgcaacatccttctgatggcaaggcatggaagaatttccaacatcttaatcctgagtttgcatccaaaagcaggaatgtttatctcgaattatgtactgatggttttaatccattcgaatcttctggtggtaactactctctctggcccataattcttactccttataatctcccgccagatatgtgtatgaaaagagaatatctatttctttccatattagtgctagtgcgaaaccatccaaaacgaagtttggattttttttttacgaccactgatagaagaattgctggaactttggatcaatggctttgacgggtttgatattcagcgaagcaaaattttaatttacaagcagtgttaatgtggacaataagtgactttccagcatatgggatgttgtccggatggacaactcatggaagaatgtcgtgtccgtattgtatggatcaaacggatgcttttcaattgaagaatggtcgtaaatctagttggtt

SEQ ID NO: 28893 - DNA, 1921 bp, Arabidopsis thaliana landsberg
agatacatgaccagcaccctcaatagagaagagaaggaagcatgaagctagctctgcagcttcaaggtctcattaatggaggtctctaactcttgttcttcattttcttcatcctctgtcgacagtactaaaccttctccttctgaatcttctgttaatctctcccttagtctcacctttccttctacttctccacaaaggtcttattcacatcacttctctgttttttcctatgttctgtttttgctctgttttcttttgttcacatttgtgttttaaatctttatttttttgtagagaagcaagacaagattggccaccgataaagtctagattaagagatacactaaagggtcgtcgtcttcttcgtcgtggtgatgacacttctctctttgttaaggtttatatggaaggtgttcccattggaagaaaactcgacctttgcgtattctcaggctacgagagtctattagaaaatctctctcacatgttcgatacttcaatcatctgtaagtaattaatgaacaacacataattccgtaaaaacaacattcaactaaattcaaacagtttgaagtatatccatgcattgtcttggctataacaggcggtaatcgagatcgaaaacatcatgttttgacatatgaagacaaggatggagattggatgatggtcggagatattccatgggagtatgaatcttatatcttgatcttacattggtataatttcctcggttatagctattctctaatttttgaaatcgatgtttttgtttagtatgtttcttgaaaccgtgagatgactaaagatcacgagaccggagaggtattaaaacttggatcggtcaaggctgtgattgcgcagttacgagacgtgtaagatttaggcattgatgaagagacttgaggcgggacggagctattgctgcatattgcaacaaaggccttgaagaagttggagaattgattgatgcatatatttatttatatgacacctttgagtgtgttttttcttataaataaatcacaatatccaagacttctcttttttgttctgaataataataatgcaaagattttttatatgtttgtaatcgtgtgtttcttcgaatgtgttacatgactaggaaaaaagtacacgaacgttgttatggggagcacgaacatggaatagaggaacgttgtcaggaagagaatgattctctttgatctgccggcagccgtctcgttggttgtcaccaatgtacaattttaatgttgagcccatttaaagcccactaaatgactaacaagctcgtttaaagcccaaatgctgcaattgatcgtaggatcggatccagataattcgtcccaaaatgggaaatttccaaattagaggtgaaatgtgtaaagacattagaatataagggtgattctgaaataaattaagctagcgccggaaaaagatcgagaaattgaaatttcccacactctctcgctgactctcttcgaaactcaatttgtgaaatttgggggtttaaggatgaagagtttagtgtctactggttggaaaggtcccgtcaagttcaggatgtaagtttcgtcgcttcctctactttgtttgttttgaaatcgaaatcgagttcatgtgtttttgttttttctgatgaatcgatttgtaatcggagctataggcccactgctgaaaacttggtacctattcgattggacattcaattcgaaggtcagcgttacaaagatgctttcacttggaacccttcaggtttctctcttaaaaaccctacctttttttttgttttccatcttctcgcatcttattacagtagcagtgtatgtgattcactaaaacttgtttttggttttggatacagacccggataatgaagtcgttatctttccaaaagaacagttaaagacgt

SEQ ID NO: 28894 - DNA, 1912 bp, Arabidopsis thaliana landsberg
tttaatacagtaagtaaaggcaagacacatatttagcggtaaggatggataaaattcgggtgcaatcttgcgttcatgagtctaaataatcaaggacaaggttcaggtttttccatacatagaatacacaaacattgttcctactcaaggctggggaaaccgaaaagggaaagttcttacggtagaagaaaatcgtctatggaaagtaaaacaaagcattcggataaggacaagacactgacttggttccatcgagttcgaatacaaaacaatcctaaagcgactcagcaaccctaattttgagaatgaatacttttgataatgtgcataccatcgcggagttgtgcttgctgctccatagcttgaagacgaaacttcagctcactgttctggtttgtcaaccccatagaatctctctgagccaccaaaggaaacaatataagactacagacttattcaaacatgatagtttgttgttttgtctcgcacctgcaaatgtgtgagctgagccgataatgtagtagcttcagtctgaagtgtctgcaccttgtgttccaactctgccatgtatcgcgtcttccgctcctttgaacgtgcagcagatacgcggttcgccaagattctaacgagatggttaaatcaaaacagtcaagtcacaacaacaacaacatcaaaatgtctaatgaagcatcactattttattaccttttaacacgcttagggtcagccattacaatctcagcgagtttctcatcagctgcaatcttcttcatttcagctgcagtaaactcactgtttccaaattcaacactataagcacttgaattcccttcacctgaattggttggggaaactttagctgatgaagaaggcggaactttagcgatgattcgtcgccgaaattcaacttccccatgaaacaactgtccatagaaacactcctgtaatgtctaccagtaggagcaatatctccacctgctcttctcttcacgcctgaagaagaagaactcaacgcaaccttcacattcccactcgcactgctatctccttcagaatcactactacttccaccattcgtcttctttgtaccactacctctactactctccatctcctccacattctcattcccattcttgccatcttcacctccaaaagaattcaagacatcaatgttatcaagattcatataagccgtgaaaacatcgtccatagctgcttcaacctctggttttcttcccttgtagaagccttctctcggttctttcttcaccaaattagaccaatctgatgtatcttcaccagagatcgatctctccaaagaactcaaaggaggagacttttgattctgagacatcattgaactaaacccaaaagtaacatcactattcgaacgcctatgcgactttctcggaggtagattctctccatctccggcgttcctagagctagaagaatgacacatcgtaaacggtgacggaggcaacgaaggactaaatccggcaccggttttctcctccaccgacaccgaaaccgacggagcagaaggatttaacggcggcaatgaatcaaaggagaagaaagaagacggttgcgacatagagcgagaatgtctaggttgtaaagtcgccgggatctgagagtaaggagaaatgggtggaatcggcggtggaggagctccggtgaaagggtgacggaagtgatggtgagagcggataagagcaggattcaagtgaagattgtgtttagggatcgaagaagacgatgtaccagaagaagaattaactctctgcatcatattggtatctgttgtatcaccaccaccacccattttgattttctgagattccgaacaaaaataaaagtcagaaactttgaagaagaaccaaaaccctaactaaagtttgatcct

SEQ ID NO: 28895 - DNA, 2271 bp, Arabidopsis thaliana landsberg
  unsure (1)..(2271): unsure at all n locations
aacacttggagtaatatgttgaccacacatcatgcggtgttttttttttatttttgcatagatactatggaccatattggagtgttactcataacatattaggtctaatcacgatcagtcctaagattttgaaagcccaaaaaaaaaaagactttattttgagatattttttcacaaggtaaaattaatttcagtaaaaaaagggtttttaataattaaaaatatctatatattaatattttgtatagactagttatatattaatcaaaaattgggaatcctagactatttttgtttcatcaactggacctggtcctggatcaaacgttgctgcaaactaaaatgacaaagcccaaaaatcaaaacatactctcggttagggattagatcagaccggacggtttcctaccttttcaaacgctgtcgttttgaactatagagtaccacaaaccaacgacgccgtttcacttggcactatttatttcttctgtagttttttttcttctcatacatatatcaatcaatcaagatcaccaccacaaggcaaaatctaaactctctctgcaaaatttctgctaacttcttcctcccattttcttgccatggaaatcgattccgccaccaacggaaactctgacaccgtcatgacggaatccgccgctacgatcactccgtcgccggtcgtcgtctcgtcttcgagatcgaatcaatttacggaatctctcaagcttgagcaccagctcctccgcgttcctttcgagcattacaagaagacgatccgtaccaatcaccgttctttcgagaaagaggtctcaaccattgttaacggcgtcggagaattggctgattccgattggtctaaagacgataccgtttcgcgtcttacttgccttgttactcgattacaaggcctcaaacgaaaggttgatttttccgtctctctccctctgtgatcggtgttttaaattatgtacacgaaactgaatcaattaatttagcgattaaagtttctgattgtgctaaatgatatccacttatctgtaaaaaatttgatcttcgatgttgaagatcaaagtaaagtatctgtctttggcgattatgtctcactagacattggatctcgatgaattcaatgtagtggtggagttggttcattggagcttcccatctgactatttgcattgtcttctaaatttttatcatttgggatagtttctatatcttctggagtaacatcacatggatatggcctggcttacgtatttttttggttttgtatctcagttggaagaagggagcaatgtggagaatttgcaagcccagagatgtcgtgctcgcatcgatcatttggattcagtagatgtggaaaatattactgaatggaataataccaaactgaaacggattcttgtagactacatgctgcggatgtcatatttcgagactgctacaaagctttcggaaagcagcaatattatggtttctctcatcctcttgacactcattatatcacactattatgctatattgctgtcttggttaatatatcagaacatattctttgctgtttcgtttttacaagcagtgaaacagatttgttgatttgtactgcatctctatgaaatgctaattataaatatctcatcttttcaggaccttgtcgacattgacatatttcgagaagctaagaaggtgattgatgcccttaaaaatagggaggtagcttctgcattgacatggtgtgctgataacaaaacgcggttgaaaaagtcaaaggtacgtgctctatgtactctcatggttaagttttactttcattttttatgaactccatgtggtttggctaaagtatccaattttttaccagaactctatgtataattgttcattgctaattatatattttccttttcataacagagcaaatttgagttccaactaaggctgcaagaattcatcgagttggtacgagttgatacagctgagagctacaaaaaagcaatccagtatgctcgaaagcatctggcatcatggggaacaacccatatgaaagaattgcagcatgttctggccactttggcttttaaaagtaccacagaatgctcaaaatataaggtgaagttttccttcttttgattatataactgttgaaaattgacgcttcaacttgtatcttttcctaatgattgattttgtctgaaatgacccaaaaacgtggatatagatttcactggttctttcatacaccnaggctgttcagtaatctttttc

SEQ ID NO: 28896 - DNA, 1234 bp, Arabidopsis thaliana landsberg
atgctactttagctaccacggttgtagctttcgccttcttcaccgctgttatctctgttaccaggttcttcatcgttgatacttccgctaccacatctgctatttccgctaccattgctgtagtttccatctttttcagcgcttatatttcttctaccacgactgctacttccgctaccacggctgctacttccactaccacggctgttactttcgctatcatttccgccttctctacagctactacttccgctactacggctgtagtctccgctaccacagttgtagcttccatcttctccaccgcagatacttccgctatcacctttgatactttcgttaccaccattgatagttctgctaccatggctgctactagcttccgccttatccaccgctactacttcggttactacggttgtagcttccgccttctccaccgctgcttttgatgtcataaccatacatcgtgcgatgtttacgatgatctttagaagcaagagtatgagatatgttacttgctatctgttgttgcatgtggcgtcaaatccgaggaagattcacttatcgatacgttagaccacgttgatgaagttaatctagttggatttggattcggtgatattctaagaagttgtctctcaagagatgtcaacataggttcaccccctatatacgttagaccatgcagatgaagtatatctagttggattcggtaatactttaccaagttgtctctcaacatatgtcaacataaatacacaaaaacaacttttgtttaattaaaacaaaacttagttacatacactagctaataatgtgacattttatacatataaggttgattagttgtcgatctttaataactaacaaatatctattaaattaaaagtcaataacttttcataatatgtctcactatatcataaatacattaatttttttcttaatataggattgttatgttaattgtttacatctgtcaattaaatttattaaagattatttctcttaaaaaaactgtagaaaatattcatatttgaaaatgaattacatgaaaaaaaaaaatgtttccttagagggagtgattggttgttatcttttaaatgctaagtttatgtattaaaaaaaataatgttttacaactttgaagtggaaagcaatattaaatacattaaaaaaaacttataagattagagaattatattttattatcaaattttgttagattaga

SEQ ID NO: 28897 - DNA, 1928 bp, Arabidopsis thaliana landsberg
gtggaagtatgaaaacagagttagaagctagtgaggaaatcccgtcttagaatgttttgcttgatcccgaaatcatatgcaataaccttttgaagtggaagtatgaaaccagagttagaagctagtgaggaaatcgatgagaatgtaaattagagaagagaaagtacaactcactctgtaggattccctgtgacgtgaggaggttgtcttaaactcccattcaggatttgttttttcaacccattcgtagggagatttacaggaaacatcgcttattagatcaaggcctaaaatattcaaccaagcagatagacagagctcaatcacatattccacgctgatcatattttaaggagggcagtgaaagaattcagacctactatatcccaagagcgggacatatgcaaaagttcctcgtcggttttggatccatcagtgctaagcacaccgttaagactgccgctttctcttaatcgacgggttattgcccgtgtgtcaagatcatctggtaggattaaaatgagtaatgttctaaacccagttataatatctagaaatctaaattaagagtcaataaccaaacacacttacagattcccataatgttcctctcagctagatagtcaccaaatgtttttgtgcatcgccagtttgaggtactgccaagattgcaatttgcaaaagtttatctttaccaattcaatgtccgaagtaaggaaagtgattccaatggatgaaactattttcaatgtaggtatcagacttgctcctttacctgatgctaagacttcttatcaccataccagccagaaaacattgccttgattcttcatcatctgggggaaaagcaaaagagaacaaatctcaacctcagaacatgatatacagcgtgtaagaaagtttcaaaacatcaaaatggcatcaccactcaccaggattcacaccagtgttaccgatctgaggatttgtcattagcacaaattgtccagcataactaggatcagtcagaatctcttgatacctttaagaaagatagaaatcaatcagactccattaaagatccagcaaagacatcaagccatgttaagacataactgatgacaaacaaattttaaccaaaaaaaaaaaaaaaaagaatctgaccctgtcaaagaggtgttaaataccaattcagcaacacgggttccagaagcaccaaaagacttagctgaccaaacagagccatcttctaacactagcctagcattgtatgagctccatggtttcctaaaaaacctacaaaaccggtaaaacaaggaattcactgttagaaacagagatgatagaacagaggttaagaactgtttagctgaatgatacttaattctgtgaatgactttcagatgtctctgatatctctgataatttctcacaaatgagactacatgcttatatagaaaagaaatgtatctgcacccattaaacccatggactcattatgtcctacaaacataaaaataaaaacccccaaatttattgtaaaaccaaaactgacaaatgtgtcttaacacacattaactcccctctttactcttgtttgaatcacatttcaacattcacacacattttcagctcatccaaactaaaagaaacaataaccaaaacgatgattaaggcacgaatcaagagcctacaagtaatctgaaaaaatcatatatatacataaaatttgaatcgaaagccaattcgaatctaaagttctgggaaaaaatcaagctgtgaaaatacggaaatggggaaatcggagagcgttgccagatgcggtgcgtgtagaggtgattgaagaaatggcacacttgccgaagaagagcgcaagtctccagggacggttcaatgtgggttgggagaaggagaacgtgggcgaatcaaattccagagcattcgtagcc

SEQ ID NO: 28898 - DNA, 2152 bp, Arabidopsis thaliana landsberg
aaatcccaatggcctgaaaatgcaaataacatcaagctctggattcccacgataaacatttgtatgtacggtaaaagtcatttatggtaaataccgatacattaccttcagaagctcataaatatagtaccggatatcgtaatcagtcaatgttggatacaatactttaaagtccacactgttgacaaactcaaataccaagctaggtgttttggagtgctcatctctaacaatatcatacagcttaacaatatttggtccaccacataggttctgaagtattttgatctctctctttatctgcataacatcaagtttcagcaaaattagccatctttatgtatgcaaattcatcagaaatgagttctactaactgatcaccttcttcttttttacgggtttgaggatcttgataacgcaacgctcattcgtattgacgtttttgccttcgaaaacttcactgtattttcctctaccaacttttctcacaacctcataatcatcttgatgactgaagaatcacacaaaagtatttaagaatctcacactgttgaatttcaaaatccaatatttgctaatagatacttaaaacaaagtgtcttcaagagacctaagtccaaaccctaaaaaattccaatttctctgatttcgaattccatttggcaacaaatcaatcaaattccaccgaaaatttatcaaaaagaagtcaaaaatcgtaaattcatcaaagaaaaattctaaagctagaagttttacccccattgaacaacgagagactcgtagtcccaatactctttaggacgaacaacgttaacatctgtataaaccctagctttcgacatcaatttcgatctgaaaaaatggaggaatttgcgatcgcaatcttctctttgatcgtcaggtttggttcaagtggacgatgatgatgacaacagaagaagtgcgttgtgcaggattagaaaaggttgaagaagaatctctgatacccaaaaaccacctaaaccaaatcgaaccgattcaaccacactcgaaccgaaacaaacccaatcggatcgatttcaatcacactataaccggaccgaattgtttaaacgacatcgtttcgaagagaagccaaagaaaaagaaaggagagaaataaagcaaattcgttaccttcacttttcattttctgaataagagttaaaaaaagacattaatggccttaaggccttgtactggattcacaatctcctctcttcgcaacgcttccgccgccaacaacaatctcttctctctcctctccttctcttcgtcgtctccggcgaagaggaatcttcttctctcttcgctccaggacaatctccgtcgtttcgcatccagcgcttctctttaccgtcaacatctccggaatcaacaacaacaacatcagcaacaacagcaatcgcgcgtgaaagaaaaatcagaaacgctggctcagaagatcggtaaatctatccggcgtgccggtgcgccgtcgaaagctagggtttacgctgatgtcaacgttgttagacctaaggactattgggattacgagtcccttgctgttcaatgggggtatatcttcagattcttctctaattaaacctaattacgtcgatttctagatgtttgcctttggttatagattggtttgggattggttgttctggaatcaatgtggaatgtagatttagggtttcgtttcatatttttgattgatgatataatctcgtaagtaatgcagaattggtatctgatttgtttgtattggtatctgatttgtttgtatataatctcttgaaaattgctggtctatgtgaactagattgttgaattgatatcttgagtttgtatggtgttgttactgtttggtgtattagtgtttgagttagcttcattgatgccgcagtgtgcaggatgattatgaggtggtgaggaaggtaggaaggggaaaatacagtgaggtctttgaaggcattcatgctactgataacgagaaatgtgttatcaagattttgaagcctgtgaagaagaagaaggtgagtagatacagccgcttgcttgtctttatctcaactgtgctcagaatgaagtgtgaatctggcccaacacttggtttgaattattctctaacatattttgcttctcct

SEQ ID NO: 28899 - DNA, 2601 bp, Arabidopsis thaliana landsberg
attgaatttatgttaatgatgtttctgatgtacggatagatttatgaagtgattgctatcggagatttaggattctgattttcacgctattggaatctgtagaaatcctcaaattagcattggtcatggatacacacacgctcaaatctgtctcagatttgcctggaaatttccgttcagctttcagtttcaggtaatatatctctttaaacttgagattttgttttcatcttttggtcattatcgtgttgttgatctactgctggtttaactctaaaggaatggttgcatacatgttatggaatatgatgatgattttcttttctttggtcctttgatataactgtttgtgaatctaaactttgctttgtgttgcttctggatcgtttttgtttagatactttaactcgctgcagagcgagtgctttccgctttgctttcactccgatatcaacatgattatttctgcgccaacgggaagtggtaaaactgtactttttgagctttgcattttgaggctcttctcaaagtccatctctaaggaaggaagttttctccatgctaaaggagctcttaaaacagtaagcttttgagcacttttctgaatctcggcttgatgccttcgttttacaataaccaatattggactgcagctgtttataagtctattttggggtttcttctacctttggtgtcaaggtttacatatctccgtctaaggctttagttcaggagaagctgcgtgattggaatcaaaagttcaattcatggggaatcagttgtttggagctgacaggtgataatgaaacctacagcactaagaatatacaagacgcagatattatcttgaccacacctgaggttagatatcaaattcactttgttgtctgtatttactgtttggaacttgtttactgcttctgatcccccttatgattctagccagaacacaagcaatatctgctatttcattctgtgtttacacgaactacatgcttgtatctccttagtggatcattgtagtttacatgtttcctgcagaaatttgatgcagtaagccgttatcgtgttaccagtggaggattaggtttcttcagcgatattgcgcttgtgctcattgatgaagttcacctactgaatgatccgcgtggagctgctcttgaggcaatagtcagtagattaaagattctttctagcaatcatgaactaaggtcaagtactttagcctctgtgcgtcttctggctgtctcagctactatcccaaacattgaagatctaggtaagacgtagctcacaattctagtcatactctgcagattgtatgactctttttgctttgttaactttgcttcgaagtaaaaaaataaacaaacttgcttcaacacaactaacgttgtaatacttgttcatctattgcagctgaatggctcaaggttcctactgcaggaattaagaggtaacttatggattgcttttcacagaactatgtccttatgtgggtaatttttttcagtttcatcattgtttcccttcccatgttttacaggtttggcgaagaaatgagacctgttaagttgacaacgaaagtttttggtaccggtctcatctcaaaagtcattttatttgtttggttaattgttaagatgatgaatttagctgttgatgactttcctgtttttatgaattggaggaaaatgttaactgtcttttttgtacaggttatgctgctgccaagaatgacttcctctttgaaaaggtatacagtttctgcatcttggatttagatagccgtaacctgtgttgtgtcctttttcaattactcaaatatttcacgacagaaactagattaattcttgttttcctttctttattttctcatatccagcgcctccaaaactatatttatggtaagctgctcttatcattatattcttccttttgttgctgtcttgattaggttgtaacttataataatttgctgagaaaaaatctatgaattttcagacattttaatgcaatactcaaaaggaaaatctgccttagttttttgctcgacacgaaaaggcgctcaagaggctgcacaaaagctagctcagactgcaatgacctatggttactcaaatccatttattaaaagcagagaacaactggaacgattaagggaggcttcgccgatgtgcagtgacaaacaaatgcaatcatatatcctccaaggcggtatggtctgtttcactcttctaagtttgttgattgtacatttgcttcagcattgtctgcaagatgaatagttaccaaaatgtcccaattagttggttatcacaatggtggactttgccaaaaggaccgcagcctcgtagaagggctcttcctgaatggagatatccaagttatctgcacgaccaacactcttgcccatggaatcaacctgcctgcacatacagtggtcattaaatcaactcaacatttgtacgtctttgagtagatatgcccattaagtatttattggaatttcagttaatttccagtaatatactgacatttcttttccttttagcaacaaggaaaaaggtcactacatggaatatgatcgttccactctac

SEQ ID NO: 28900 - DNA, 994 bp, Arabidopsis thaliana landsberg
ttcgattataggcccgaacattgttaccgaggtgagatctgttcaattttctgctctgattgcttatattccttgatcttagtcagaaattgttgaggttttagcttgtttaattaccgagaaactcctagtgagaacgagctatggctgatagcagaaatcagtacgaccgtctcttaattcggtagagttaactaattagcagttcaattcggcataacttcagtttcatggccaatcgttcgttgtagaaagtagaaacattctcttcataaaataggttatagcagcctctgtttgtgttgtttcattagttcttcaagttttaggtataataatacaatttcaccattctattatacaactgtgactctggatcatacttttgtttgaagatttctgaaattattcataaggttgaatattattagaaggtttctatgtccaaccaagtaaataatcggcacaatgtttagatataagcctataaactggtaaaggtcttgtttctggttagttatttattctttattttctcataggctggggttcaaacgtcgagtgggacagtggtggaatgccatacctttcctcacgtcatcggtggtggtagtttgtggggtcatttacctgatatgcctcttaactggatatgacactttttatgaagtatgcttcttaccctcggcaatcatatcgaggttccaaggtatgttctcatatttattgaggcttgcatgtcatgtagaagatattcctattggcactaaaacttacatttccaaagttatttcgtcttgcaaactggtaattttaaattcagatgcctgagctgtcctgattttttttgtttcctcttgttcactcgtttctcgttatctgtgcagtttataggttctatacagccattattttccatggatcactgcttcatgttctgttcaacatgatggcattggttcctatgggctctgagcttgagagatcatgggat

SEQ ID NO: 28901 - DNA, 842 bp, Arabidopsis thaliana landsberg
agacctccctgacctcctcacggactttttcctgccatgtgggattatcggcgaggagcatcgttgtccatgtgaggagcaaagccgtggtttcatggccagcaaagaagaatgtcttgcattcatccattatcaactgaagattgttgttgttattgttattgttcttgtcaatatccatttcgttcaagagaagcccgagaaggtcgtcaccgtgagtgctactcctacccatttcagcgcagtctcgcctgctttgtatgatctcaatcaacaaacgctcaacttcttttttcagagacttgatctctctgttgtatttgcttggaagaaacctacatatacaaaagatttgttattaagtcaatgttagaccacagttaaagtttaatcctaaaacaatatacgttttaaagcttcaccgaggatcacaacaaataaatagaaaaactaaattttgttatgtataacttaatgtttaagaatttgtatggtggcagccgcggtctgtctgctgccaccattactgaaaatatagagattaattacgatttttagggtgaggaagaaaaccaaccggctgccgggaaagcagaggtggcgggtggcttgagcgcaacggcgctggaggacagtgaggtggttgaaaagctctttgcctttctcaaagctgcttccgaactttgtcctcgatataatatcagccgcgagtttatgcatctcctctcctatctccacctcatttgctccttccccaacttccttcctcaacctcaccactagcttgcttgtgcactccaccatatgcctcgcgaatccctacatcataagggtgcttcagt

SEQ ID NO: 28902 - DNA, 1539 bp, Arabidopsis thaliana landsberg
  unsure (1)..(1539): unsure at all n locations
accaccagaaaattgtggcaggtttatctcatttctactcgtcacactggctaactttgcaaatctggttttgtgacattgctattcataatttgcaaaactaactcacatgtcttgctattttagcctctcccaatcctacttggaagctatgtggagcttacttaaaacacctcggccaggaaagttcagtgtgagtcattattctggcgcgttcgcttctttcttaactgctaaagattgccttcccctatatttttatagtcaattagattttgattggtgtcttatcattttgttttagggtgaacaaagacggcttgctctctatgctgctatgtttctcccttttaggaaaactgtatacaaggacactaagggcaaatcggtacgcactcccttatttattttatcatcttttcttgggctaaataaatctgagtttagttgtctacccgaatcaaccttgcgccctttttcagattcctattgtcaaccacatttttaaattctccatgaagaggaagaccagtgacgctgaaacagtgagttctgattattatgttcaatatcttaggccttaatttagtaactatagggtgatacttgtgctgttttctttggcaataacggaaaaaaaacaattaactgtgtacaatcagagcctttacctgtgacattagattataggtgtgatcttgtttaatagcagtgtatctcgttttaccataccttttaagtttgcctgctatacaacataacagtttcatcactaacatgataatgaattccatcttctctaggttatgaatatacatcagaccacggagagatttcgttcgttgattccttcccttgaagtgaagaaagatgtagaactggacgagnnnnnnnnnnnnnnnnnnnnnnnnnnnnnttggaaatccatcacccttaatgatccagtgatcccagcaacttcgaaaataagagtactcacaggttctcttctatagcctttgtagtattgtattactcccacttttaaaacttgagcagataaaaaaaaaatcactagtaaatattagttagtcagtgtcattggtaatttctagacgacggagtattataacacttgtggtataatgaccatattatatctgaccatatgtatgtaactaaaatgttttgttttacaactattacagggtttctacttagagatattaaagacttctggcgtgtttctctgttaacatctttgttattgtctgctacggttgacggtagcaacgatcatcaagatatcgggcagctggacttccaactggaaaggatgcgagaaacttatctgacagttgaggccaccattcatgaactgggtaagcgttagaatgtttgataaatggtagcatataagatagaaattgctaagaggagatagaagaagtaatggctgtgactagttaccaaggctccccacgtttttgtgcttaccagactcactagtagaactaagaacatcaaaagaacatgagaagctgatttcataattcctgt

SEQ ID NO: 28903 - DNA, 1009 bp, Arabidopsis thaliana landsberg
tgaccctttgaaaaaatgtaaaaattgttctaaactttattctttatccttacaaactggttttgaggattgttttgaatttggccatttcttgtgttcttgaaaaagctacgaagctttctcaatcttgagatctccagaatgtgtttccagcaaaagaaaatcattttacaaactttgctattggttatacaactattcaagttccatgttccttgctcggtcaccattctcataacagcttcctgaaattcaaccttttttgcataaacaacagtgcaatgtctcggactagttcattacttgtcttaacaacatggatgtttcaagccaaaattgatcatcatgtttgacttgcagcttctatctatcaaacaactgttaagtataaacatttgagatcatttaaccaaaagaacacgtacaattaagcggatcacggtggctaatcaagccggtcaccaaattatacgattgatcctgaccgttagattgtgtacgttaattttgatgcacaaaaccgtttctttccctcgttattttattattagaccggatccggttcaattctgaaccgagaaaaaccataaaacgttgattagggctttcaatttgttgctttgtctctctcgaacttgtgctagggatttaggattagcgttagagactcagtcgagcagagaatgacgacgattgttcccacctccgaagaagatccttacctcgccattgttcgtttcacttcccagcttgcctgggctgatgctggtcccgaggtcggtgccaacctctgttctcaatcatcgactagtgaatacgattgtttatttcgaaagttgctacatttcgttattggaatttatgagcaatttctgggtatctttgtctttatgcgaccttaatttgggaatcactgatttgtgaggcgttgtgttgataaaaatgaagtctgaattgagcaatttagtgttttaactaccatgtgtctatagcaatctaacttgatctg

SEQ ID NO: 28904 - DNA, 1982 bp, Arabidopsis thaliana landsberg
gctcctaacttgtacaggtgatattcttttagatatactgcaattagactcaaacatcagactgcattttccaagactgacccatatttttgttctcttgtatgttctaggttatgtttagtgtttcttacctttagctgtattggctacgcgatgcccttcatcctctgtacaacaatatgttgctgcttgccttgcataatctcaattctcggatatagagaagatttaacgcaacctcgaggtgccacacctgagtcgattaatgcgttgccgactcataaatttaagttgaagaaaagcagaagtaatggcgatgacaatggttcaagtactagcgaaggtggagttgtggcggctggaacagataacgaacgagctatttcaggagaggacgcagtgagtttccttacactttgaatttacacataaacacacagatacaatcaagttgctgaatataaaaatatttgcaggtctgttgcatttgcttagcgaaatatgcgaataacgaggagttaagagagcttccatgctcacatttcttccacaaagagtgcgttgacaaatggctgaagatcaatgcctcttgccctctatgcaagagcgaagttggggagaagaactctgatttgactagccaagggatcttaacctcgctctcttctggggaaaacgataaccatcaacaacagcaacaacaacaacggagtgaacttagagttgagaatggtttggccaataatgttatctagatcttcgagatttgctctatgtccgagaaaacggcaaattagccgtttgacgatgttcctacacaaaatggggtttgcttctcattgctaagaaggtgaagaaagacacggcgaagatcctgttctgtaaatgctttttgccgttgtgaattggaacctcttgagtgtagaagagttcgagaatcggtgattgagtttgagcgtgttccaaatacttgtttttatttattctctgaatttttcacgagtaccacctctatacgagagccagggatctttcgagaccttgtgcagctaaagtgcctcattcatggtctctctgcgaaaaattagaataaaccaaataaaatatttatacctttatactggaccacaaaacttttaatggcttcaacgattttgttatcttagtttttgaattacttgacactgactcgttggctcggtaaaattagtgtgagaaccggtaacttacaagaagcataaagatcataatagttttgcctttagtagagagagctcacacagtcgaatagagaactttttcttaacattaatctcggatgcatatgttttgaaatggtttgaaaataaaagtgattcagttcctgaaacatttaaaagcggtatagtgccatactaaaaaaattaaccgcagaaaccgatccagagaccgaaaagacacgtccttctaggcggtgttttctgcagatgggttttcatgaacaaacgtgccaactgatttgaaccatcgcagtaggttacggtgatcctttacatagagccatgcctgaagaaaggggaagagactctcgttcacacctcgttcctctaggaatccatggaatacatctctcatcttctcatcgagctctctgtcaaaacaaatagaaacacttacttgccaatcgagtgaattttctatcaattgtaagttacgcattatctttagaacagagaaaacagaatgctgaataggatgcacaaactctcttctttaaaactgagaaatgcaatgagagaagaatgtaaggaacatgacaagagacaaatccttgattcaaaggcttcataatagaaacaaaccgattgtgtgtcaatagtgagactgcactacaaatatgtcacatgaggaagagcagtaactgacactgaaaaatcgaaatgtctagaacacatctaccaccattctattctacattcacatttctcaataactggtacaaa

SEQ ID NO: 28905 - DNA, 3234 bp, Arabidopsis thaliana landsberg
tttatttttgtatttgatagattactaacgatcatgtgagtggttagtttttatattaaagtagcaatcatgattagaagacgacgacaaactgttttatattttgttttgaagaaacatatcacgagattgaaacttatcattcggaataattgatgtaaccgaacaaaattaagaatgcgaagaagatgaaattacataacacgaaagtgttatgcaaaggcaaatctctttacttttcttatgaggcaatcacgaataagataccaatgatgaggatatcaaaaagaaaaaacaaagattccaagttatggagaacctcttcctacaacttttatcaagtagaccaatcttttttaaaagattgcacaaaaaaaaacaaaaaaaaaagagacagagagatgtctttaaattaaaaacgaagattatagccaattcataaagttgatatttctataatattatattacgtaattttaaaatggtccctttctttggactagttcgccatcttttactgatttaatcgtataaagagagacaaagtggttggtaactttgaagaacattttaaaattatgactcattttattctgtctcatttgcttttatagagggttcatgaaaaactccttctcatagttgtgttttgatttaaacaaaggtaggcgtttgaaacaatcagtctaagtgaaaagataagagaatgcgtttgaaatttgacactttttggctgtgttgggagggaaagcaaagaggtgggtataataagaatatagtatagatgcagagattcaagcgcaaggtgtgggttggcattctatttttatgtcaagttagaaagaaaaagcaaaggcataataaacaaacatgactgaacaacacagcacgcgattcagaagtttcgccaagaaaggatcaaagtttgattgtagtggatgaagcacctaacactacacatatatgcatgtactctcacctttttcttctattctattctattctattctagacagggagagagagagagagagaaagacattttaccgtaacacgtagagaatttatatgtaagtgtggaggaataaatcacgatcttagtgccttactttacttgtatattctgtcccagtttccacaatcttctctggatcactttcactgtaaaaaaaagagaatgtacaatgagtttgaataagagaacagatccggtgcttatataacaataattaagaacttaaagagtgacccttgtttcttgttcttgacgcatttagtctgtttagtaaaagtctacttccaatgagaatagaggatgatgaaagaaaaacaaaacttaaatcatatttgaatagcattctgtggtggcattactggtatcatacacgagaaacatttctttcttgcaagatatactagtaagagtgtctatagctctttctattaccacacaagaagacacaagtctgttttgatcaatctctcttgtaattaattagcttaaaaaatcttgaatgattgcgagagaagggtcgagaacttacagctggatgagatgacaaaaaattcaagagaaagggacttgtgttaataatcttcattgtgaggtggtgtcgcctcgacaccttcgtcgtcgtcttcttcttcctcatttgcatccacccaattactaggatggtgctgggagaaactttggttctgtacccgtactgaggacaagtgacaaagaaatgactactttttaggataagtaacgagacaagagaagacaaggctgtagaaatgattttgcaggtacctcgggatccttcagcatgatctatctgtgtgggacgttggctgaaatagagtcaaagataacaaagcatatatagaaagaagtacagtcactggagatatgtgatttcgggttatggggcatgctgaaatggttagtcgttaaataggctaagaaatgcattttagaagcaaattgcaactacacaagcaggaatttctaatcaattatggactatgatttaatgctgaacagctaaacatgccaagaagtgtttagtgatagtgattgtgagagtgaaggatacgacttaggaggagctgcaggagcagtatctccaactggcccgccttttgatatttccatattcctaattctatggatatccaagtctggttgtccctgagcctgtggcctatcctcagtaccgttcacgctcttagtggcagttcctgctaccgagcattgatttcttaaggtgttagttaacaggaaatattgtgaatacaaatcataaccattagattagtaactacctgaaagttcagaccatactcgtgtgtgatcagatgggtgctcagaggcattttgcctagaccgttcttgaggccgtgatcctacttgctcggcagcatggccacctgtggagtttgctgcttcaggaggttctgccggaatcccttcctgaagttgagacacaagcattgtcgcaagaacgagtgttgcatcaaaactggagcttgacccatcacccaaaccgaattttggagccatcagtattggtctagcaacgaagtacatattatgacattcagtaacagataagatagtgactacaaaactagttgtcccggccaaaaaagaatttggtgtttaaatgagtggtttagctagcaaatttgataagcatgcacctttatagacaagaaccatagtttagaagtattggccagaatgaaattgcaatcgaatttaaaagatgtcaagagtacacaagaagatgcattttaataagcgaaattcaaagcatgaaaaacataggattcttactcgccagctttttcgaaaaaaagatgaatatcggcttcacagccctcgcagaatgcaagaaatgcctgaaattattgaagatatttagttgacacaaacagaggtggatgaaattcaaaccagacttccaaaggaggaatgttaaacctttagttccttcaaggaaaatgtgatgtcaactggatcacctgcgtgagtatactgcaaaaattcttctgatggatcaatccatagctgtgtatgtaacaaagagtcaccatctgcggattgaaaagagaattcttagcagccttcctcagggaacctggatattccagttttatcatgatttccgtgtcctaacctttggtaggatccacatagctccgaaactcaacagctttttcacctatttcacttgcagcatc

SEQ ID NO: 28906 - DNA, 1482 bp, Arabidopsis thaliana landsberg
ctaacggtggtacagtcggtgagccaccactacagtggtcctgctcaacataagctttacaagagcatcttgaacaatacgttcagattctgcgtccaaagcgcttgtagcttcatcaagaagcaatatttttgggtttttcaaaatcgccctcgcaatcgcaatcctctgcttttgcccaccggataattgcgtcccatgctctcctaccatcgtttccaaaccctggacaaaaaaagaacaagaattaagaatactaagcttgttttaccgaccaacttggttataactaaagtttgactacctgcggaagtttgtcgatgaagttactagcgttggcgagcttaagtgcggttctaatttcttgatcggacgcatcttttttgccgtaaacaatgttctccctaattgtggtcgcaaaaagtataggttcttggcttacgagaccaatcttacttctgatccatttcacttgaaatttctttaagtcaattccatctattaaaacttctcctgattccggatcgtagaacctctcaattaaactgatcacagttgattttccgctaccgctctgtcccaccaaagccacggtcatgccattcggtacagtcaacgaaaatccagcaaatatctgcacgtcagatctagccggatatcgaaagtacacgtctcttagctcaatgtcacctttaatttcttctaaaacctcaccactcatgtcataagcatcgatctttggttttcttttgatagtctcaaacattttgtaagctgcagctgttccggccgcaaaagagttaagagaaggcaatgtctgccccaacgccctacgaagtgaattgcatgtgtaaaaaattagggctatcagtatcacaagatttcttcaaggacaagtaatcgttttactcacattcctccagtcaagattgacgtaatcacgttcatgacttgacctccagtatatcctttctctattatcagcctagcaccgtaccaaatcgcaaaaccataagtacaatataccacaaccatcattatcccaatgcctagaccggagtatagcccttgtttaaccatagatttgtaggctatctcaagcttcttctcatattttcccattgattgtttctccccagtgaaagccacaacctaaataagaaaaagaacatcaaaatattgaaatgtaacatgaatctatgtagttctaaaagaccgcggaactaactgttctaattgacccaacggcttgttgtactacgtttccagcttctgtgtaagccagttgaacacgttgagccttttttgacatgatataggtcattgctccacctgtgcccacgatcagaggaacgcacggaagaagagccaatgtgagtttcattccaactataaaagcaaccgtgaatccaccaacgaatgacgaaacgagctgtgtgaatttcccaacctaaggaaatcaaagccgttaattaaaataga

SEQ ID NO: 28907 - DNA, 1492 bp, Arabidopsis thaliana landsberg
  unsure (1)..(1492): unsure at all n locations
gccactgttggtgataccattgaagtagcatgagcttcaccattctgctggatccctcttcttggtggttctatcctaaacccggtgccaccttcctcgtctgttttgaatttgtggcttatgcatgtgactttggactgtcctgcagccataaactctggtgtctgggctgttttaagatcctttggccgtcctcttgtcacagtttctccccctcttctcttgttaccttctgcccttagtctgcaaacaaaactttcatcagaaaacccccaagagaaagactagtgaatgaagatgtatgtagctttactttcttgcttcttcgttgcgaagcttggcatcaagttccttgcttggtggatatctaggtaagtttgatggattcgcagggagtggctccgtggtgaagaactgaagagaagaaagattgaaactcatcatgagaaatgtatctaataacttgtttaagaaacatggatttctggttagtatcgatctattacttcgctcctcaaggtagaagcagccgatccccgtttttcaggttctattgccagtagcttattgatgagcatcagagctgatgaagggaaatggttaaaggtttcagcaagaacaggcttgtaaggatgactgggtttaaagcttgttgctagtggcagtgttgctcttctccagtaatcttccgagggtgaaccacagagcttaaagatcttgtgcatctgctccacctgataaacaaaaaaaggataattatctcatcagctgtctataagaagtaagactctgagtctcagaatttgaatgatgcgtcgaattataaagcctgagctcaaaaactgttcttaacaaactaaagaggtgttagagagtttcattacttctgtgcgtcctggcataataggttttccggcgaagagctcagtgagaatgcagccggcgctccacaggtcaatggctggtccatactcagtggcaccgagcaacagctcaggtgctctgtaccataaggtcacaacacgactggtcagctgcagatctccatnnnnnnnnnnnnnnnnnnnnnnnnnnaaatcaccaatcttcaagacaccttcattattgattaagagatttgagcctttaatatcacggtgaagaattcctcgtctgtggcaatgttcaagcccacggaacaattgctgcatatagcacttgatctgaaaacgaagtaggactctttataaaacttgaattctccaatctttcaagtgcataggaaaacagaatatgtaatacctgaggttcagagaatttgattccaggagttgcagctagacctgcgagatcgtgttccatgtactcaaagacaaggtagaggctacctgagagtctagaggtaactagaccttctagcttcatncattggggtgatcaagcttacgaagaatgagaatctccctggccataaaccgaacactctctggatccatgttcacaaaccgaactt

SEQ ID NO: 28908 - DNA, 1569 bp, Arabidopsis thaliana landsberg
aggaacgcaccacttggagacttcaatttcactgtccccaaggtcatggaagatactgttccccctgatccgaagcttggctctccttttccaagcactactaccactacttcagagaagagcagtgtcaagcagagccataactaatatgttctcttctaccttctttctgctccctaaagcaatgcgttttgagtctttatagatttgatgttctctaaaactgttatgatattaacatctctaagcaaaaaaatatgatcttttgtctcttctttaaccggaactcaaatgttaaatattcttttaatttggattcttacaccaaagaaacacacttattccttacaagtcccctcgtaaaacattaagtagaggcaacaactccgggaattctctcatggcaaatcctcatgcaccttatagtgagcggttcctcttgaagaatactgcaagatgtctcacagacttcctcgttggacatgaagcatccggatatgcattttttataggcctctggttcggtgtaagacaggcattttctgttgcattttgtctgcaaaccctcattagcaacaccttctcctcctatgaccatcatctctggtttggacttggtgcgagggcaaacggccatgcaatgttgaaagagtccttcaaaggggttgcaaaatgcctcacagaagggattgtgttcttcttcttgtcgtccacttgtctctttctctatctccatcatcaacagttcattgcacttatcttcacactctttcttcttgttgtggatatcatgtttacagttgtgcttgcactgttccaccaccaaatcttctactgcacttgacactgttgcactttccaacaccagaatagcccaaatcagtgagatgactactacctttgcttttgttggtatcatgcctctagtcatgttttatagatgtaataggttattatgataatttttgtgttatactatatagaggggttggttagtgacatgcaagattctacaggtgttacgggtacgtgtaggtcaagattctcctatcatccacttggacatcatgctttagcctgtgcatagacgtgtccaaatccaacataaggaaactccaaaaaaataaaaagaagagaggagacaagttccaatgacttcaattgatccttgcattgaatttgagatggtttaaggcaggtgtctttttctcttcatttgtctaatgggttcattcacacacaaaatagtttcagtggttttgcaagctatatgtataatctcaaattaggcaaggaataaacttatcatgtcatggataatgtaatgagaggaataattttcctctcatatctgttataatttccttagcatgatttgattcccaatctgcttataaatcatggtaagtgcacaacgaacctatacatcactttacgtgtcttagctttgaaaagaggttcttgataatcacataaattttgatattatacaataaaaaaaatatatttcagaatacaaattatacattcatgtaacatgaagaatggaggaagtatgtgtatcgtaaa

SEQ ID NO: 28909 - DNA, 673 bp, Arabidopsis thaliana landsberg
aaccagacccatctaagggatctggaacaagcttcgtctctggttccactctgatcatcagagtattaaaaatggagtctttcttctccagatccacctccatcgtctccaaattgagtttcttggccttatggatcgtcttcttgatttcttcatcttcttttacttcgacaggttactttcttattcccattatcaccaattattctgcttcttggttctgtttctttgtctcagagctttttcaacttccaatcttgctccttgatcggtatttcacttttcagagttaagatcgtgaaattgttcatttttcttaaatttagactatgtttttgcatctgagtatcttcaattgtaactgatttgtttgttgaaattgataaagagaggtgataatatgaatcgtgtattgtgtggtgttggcagttcatgatccattttaaaaaaaaactcttttgtagatctttcctcaattagtgagatgataattgcttgctcactgttcaagtcttttttatagagttcagatcctaaaatcaatacgtcaatttccatattagtgcttcatatgtagatcagtggattttgcttatataaggaaacaccaaagtttcaagttttctgattaaaattagtaactttctgatattttctatagtagaaaacttga

SEQ ID NO: 28910 - DNA, 1620 bp, Arabidopsis thaliana landsberg
  unsure (1)..(1620): unsure at all n locations
gttaaaggtggtgatcttcctgactcatcagattcagtagatgtttactttgatggtatgatgatagcacagtgatctattttttctaattttgtctatgttgttgaggaggcttaacggactcaatacatttgtggttataaaaatttggaacttgtttaggcaaggagtttcatgaactccgttctcctcgcatagctacaagaaatactcatgggactggttgcactttggcttcctgtattgcagctgagcttgcaaaaggctcttccatgctctcagccgtcaaggtataatatatatatatgcttctttttcgaaaacatttcttcgcataatatgctatgcttcatggctctctatgatttatattagtctgtctgcattgactcttcgtcagtgaaattgattaagaggaaaactttcttttctataagttcaaatttcaacatagatacttggagattgataatcgggaaaaagtatttggggaggctgagatatctgtgtttgtattattaaaaaaatgtattaacaaaggctaataatctctactcccggacctttctgatgttggnnnnnnnnnnnnnnnnnnnnnnntaatgccctagattacagcaaagatattgtcattggcagtgggatgcaaggaccttttgaccatttttttggtcttaagaaggatcctcaaagttctcgatgcagcatattcaatccagatgacctgtttctatatgctgttacagattctagaatgaacaaaaaatggaaccgttccattgtggatgccttgaaagctgctatagagggaggggccaccatcatacaactgaggtttgatcatgtttgctataactggaagcttcaactcttttttgtatctctctcttatgaaagcccaaatgacatctcagtgcttttgcagggagaaagaagccgaaacacgggagtttcttgaagaagcaaaagcatgcattgatatatgccggtcccatggagttagtttgctgataaacgacaggatcgacattgcccttgcttgtgatgctgatggagtccatgttggtcaatccgacatgccggttgatctagttcggtctcttcttggcccggacaagatcataggggtctcatgtaagacaccagaacaagctcatcaagcatggaaagatggtgcggactacattgggtcaggaggagtttttccaacgaacactaaggccaacaatcgtaccataggacttgatgggctaaaagaagtatgtgaagcatcaaaattaccggttgttgcaatcggaggcatagggatctcaaatgctgggtctgttatgcagatcgatgcaccgaacctaaaaggtgtagcagttgtgtcagctttgttcgaccaagattgtgttttgactcaagctaagaagttgcataaaacgcttaaagagagcaaaaggggaatttgaaccaaaaggtgtttttagttttgttttaggtgcttacaaaatgttgtaaaccttttacttcttaacttgatgtatttttttttttttttgaaaaaaccagaaaagataaatagtaatgattgcaacaaacattttacttccgaaaacttccaacaatatcaaattc

SEQ ID NO: 28911 - DNA, 1403 bp, Arabidopsis thaliana landsberg
ttctctctctctttttttttttttttttttaattttatggtgacttaaaagaacaacatttcaaaaacaaaatcagtaaaataaaataaaaattgtcggattaacatcaatagacaatttgatttaagtaaaagaaaatgaaaatggctcggtgtaacatcaatataagccatatttaatcccgattttagatcaaggacacgtgaaaccagatgtccgaaaaaagaagaaatttgtctaaaagagaagagttgtttacgtgtttcgacttctcccatgaactccacctactactacctgacaaattccatgcattccagttttcgacaacacttcaataacaattcgaatcaaaagttaggtccatttatgttttccttgaaatgtcatcaaatgtgccttgagttgaggtttgttgtccaaattatttaaattatatccttgtttgtctcaatataatctattgataatttggtatgatacaccagtttttggataaatcttcatctcaattgttaaaattgatcactgattagcatatatgtactttaaaaaaaaaattatcatactgtctcgctaaaaattgcaagtccaaacaccggttatggaaagtgatggatttttttaatctttatttctatgcacaagtgatggattctcttttgaaaatgaactactaaatgtcggtaccaactgattaataatcatagctaaacaggaactcatgcgcacatacttgaataagtaattatgttttctacaacaaggaaaaggctgaagcaaaacgaaagcaaataaaaacattcgacggaaagaaaaagcctcatacaacccaacaacatgctcttcaagtaccatgctagtaactccaacgcaccattgcggcaatcgcagtcgcaatggcaaacgcaaggaaaacactctcaccatttccaagccttgaagcagcagacggccttggtggaggcggcggtggggtggtaggtgtctccggtggaaactctggcggaaaatgcggtggaggcagatcgggagacgatggtctgcctgtggtgttgcagttgttgtggccgtaccaagtgtttagttgagggacgctcttgctgaaatcgaatttaacggactttgaaccttctgagtagatctcaatggactccgggacccagccatcgggtccattccggttgatatagagagagcagatagggtcatttaaacattgacctctgacttggaatgtgttcgttgaacactttcccaaaccccctggtcctcttaccgaaccccctagtttcggtgcatacacctaaaacaaaaagatatatatttaacattttatttaaatcactaagaagttacttgtattgagcacacatgcatgcatgcaaggaatctaaaccact

SEQ ID NO: 28912 - DNA, 1079 bp, Arabidopsis thaliana landsberg
tagtattgaattatcagcttcacatttttttaaagccatgtctaatctcgttgtagttgttgtagttgggccattcaatcgcttgaggtttttcttgtcatagctttatcttcaaatgctactggggctggatattgtttaataccttacatgagttctttctctttttcctgtttcgtaaggtatttaacagttcaacctctttttaaatgcagaggctagttgaagggtatcttcttagagctacccaaagaagtgacatatttgcccacattctcatttggcatttgcaagtaagtttaacctactagatttgcaagatcttaattttgctttgaaacctttatatagattgttgatgttcacttctatcttttataatgccagggtgaggatgtgcaggaaactccgaaggatggttctatcgataaggtttgcccataattatcattttctgcttataatttattggtgttagctcctatgtagagtctacatcttactactcctaggttattatatgtggctagaaaagctttcattgccttagtttgaggaaaacagtatcctacagttgcaaaatatggcctcctgcagaatacatctgtgaattctttgtttatgttattcttcacatgtgatagaacgcagaaaatatccttgattcagcctgttgaccgctggttataagcacaaaattccgagatcttgaaaatgggttttatgactgcttattgttctgtatcatagcataattttgttcttggaaagtatagtttggacaaaagatgtcgtgagacagagagtaggtcgttaaactatagatagcggtagaaactttgttgtatatcttttgactgatctgcttaaaacatctgagctcatctctttgtttctgtaatatttcagaatgcggcattccaagaaattttgccacaggttcggcagcatatcattgatggtttcagccccaacgccttggacatgttcactagagagtttgccttctttgacaaggttacttatatatctggggtattattccctcttccaaaggaagaacgcagagccggtttagg

SEQ ID NO: 28913 - DNA, 1749 bp, Arabidopsis thaliana landsberg
tcaggatgtataacgtactgatttgactatggataaatatgatttgatattattattatctattaaattagccaacttttctacgtctaaattatacaaaaatgacattatatagctaagattacgagaaaagaaagtgactttttaataagaaagtcaatctgatagaaaaaaggttgagagtatcttacaacgacatgtcaatgaatttgaatttaaatgaaaaaattaaactttaaaacaggatatacacatggcatgtgtaggtattttcagatttgttgacgagaacgaagaaacaacattttgtgaatttgccaagcagggaaaatgagtttaacgacgtcacataatgtaaattttttataaaaaaaaaaaatcttttttgcataaaacggcttgacaacttttttaaaaaatttactttcaattttatgataattataacacaatacgtatatataaacaaaatttcagatttagtattatgagattaaaaatagatactatataatagaatatttatattttaaggtctcgttttgttgctgtaatagacagtatctgtttcagcgacaagtacggtaaagaataatcaacggtcacgtttaataaaagttaggcttagaaagtccacctaaatcccaaccaaattaagaaagtcaacaactatatatgttgaccgttgaaacagtacatatctatgtgaatacgcccaaaccaactaataatttggcatatataataaattatgtttttggcaacaaatataataatgaagagtgatgagatataatttgacgtggaatactgaaaaacgaaaaaattcccagccaatataaaatcgaaaaaaacaaaaataaaagccaagataagacgacagcgtttatagctgtgactgactgatgtatgtacagtgttgagagtgtggatcaagtagaagatggagtagtggtggtgggagtaatattacggtttctcatatacgtcaaaaattgtgttggcaattctgctagaagtgcttctaccactgagacctctccatctgcaacaacaacaacaacaaccacaatgatcagagaccaaaactctgcctgacaaatcaagaaacacgagactcacattgtatgtctcgtaatgcaacaaactggacgatatcgcgcgatgctattcgaccactggagctctctaatttctctcctttatctccatctagtacctatacaaacaaccaatacataaaccttgtaagaatctatttcaagaagtttttcaaatgaagttaagcataacgtttttgtttaagaacctccatttctttatagtcagctcctccgactccaacgatgaggattgataatgggagatccgatgcactgacaattgagtctctcgtttcttgaagatctgttattactccatcctacaaaaaaaccgacatggtattttcatatagataaaaacacaagaatcagaggaaaatcacacgtcttgttgtgtctaaactcactgtgattattaacaagacgtaatatttctttgcactttgagcgagtgaatcgctagcgattgttgcagcagcgttgattacaggaccaaatagagtaggtcctgcacaagagacattgcacagagcgcccttgccggcatccatgattacttgaattccgcctacctgagagacaatctaataacaaagattaattgcgaaattctgatacaaaagttagttcagtgtgagtaggattt

SEQ ID NO: 28914 - DNA, 1843 bp, Arabidopsis thaliana landsberg
  unsure (1)..(1843): unsure at all n locations
ctgcacgtcgactctagaggatcccctgattagaaagaaacaggaacttaaggaagcaccaaggacttcatgcaagggacgtataaaaatttatgtaaaatcttgtgttgcatgttgtaattcttccttattcttttccgcacaggtataggtgtttgctatagctcaagtccccaaattcaaaagctatttttgaaaaccaaaaatcactttaacattatttggttgaccatggttagggttgagaaacctagagtgttcttgctgaaaagcagctgaacttcttcaactgcagctgagctttccagctgaacttaacttcagctgtgttgagcttcttcagctgcagctgagcttttcagctgagctggacttcagctgagttgagctttctcaacttcagctgaactcaacttcagctgtgaacctctttgaccatacaccagctgaacttgctccgggcagttgagctgggttttctctcctaaactcagtggtcaagaccggttgaactggtcctgaggggcagttcagctggtctctgacccctctgacctctaatctgcagtctgccagtcagactggcaaacaggtcgccaggagctgtcantgacggttgaaccgccccccctgggcggttcaaccggtcttggtcaacttgaccagtctgcaggtcagtctgcgcgtcagtctgtcagtcagactggcagacaggctgccaggcctgccagggcaggttcanatcgccctagggggcggttcaaccggtctcaggcagaaaagtctgcccaaacggctagttttggagccccacctatatatactcactcctacctctctccccacagtagagcacgacttggactccatttctaacctgagaaacacctccctctctctctcacacacatctcttgcctctcccatttcaaatctttggagagaaatctttgagtgagattgaagagctgcgattttggtgcttcatctctaaatctctcttgctcttcttgattcgagctttggtactacatcgagttctttgtggattcattactcttggagcttctagctcctagacgactaggtgtctcttgtgagtctccaaatcttgtggaagaccacaagaaagtttgtattacccgctcgtttgagcaaagattattgtgtgggcttgacctttgtggtcggcaaagggaggattagggttgaaaaagacccggctctttgtgggcgcctcaacgaggaagtagggcaccttggtggtgtgaccgaacctcgggataaatcttgtgtctcttgtgttcttgctcactgtgtttgttcatgttctttgttctctcaccattccgtggaatatttgttcatatctttttggtgtgtggattttgagaagtgcccttctcagatctactactttgaaccctgtggatcatttagaacatctcatttccaaagttaactgggtggatttcgagatcaattcagttttacccagtttgcttctagtttttgttgaaacagttttaacttgcctattcaccccccccctctaggcaactttcaatnnnnnnnnnnnnnnnnnnnnnnnnnnnnnnnnnnaccgcgtgaggaaagatcatgtcggggggactaagaaacgaaagtgcttctaagcttgaaaaagctgaggttgcctcgacttcatcttttggtgcagatattgatcctagggcaatagaccttgccatgagaatcgccgaaaggatgttcctcaaaatgaaggaagatgaggcgaagaacattattgaagaagaagaaaatgatcgatggagaccaaacgacgaatccacctcttcacagt

SEQ ID NO: 28915 - DNA, 937 bp, Arabidopsis thaliana landsberg
tttttaaaaagagatctagtatacttcttttccaaaggatttttttttttatttagtcagtagatgaacccactgccatggagttgcatgtatcttttttacgtagtcctacattgtttacaccttttttcaaaacaatctatttggttttaccccagaaatattcaacccaaaattcaggattgcatagttgtcgaaaacctttgttaccattatttgtaaaaaatttccattatcatagcattccttttcatccgtacaccattgttactttttaaagggccatagtagaaagaagaaaaaaacatttcctattattgttttttgttgcttttagcaattagcacaacgttcagctcaccaaatcacatcacatcatatatataccacattgatcatcaagttacttgcactatcaaaaatctttcgtcaaaaaattaaactttcacacgttgatatattgagaacaaattttcttccactttctctttatcatcaaataccacctgctattttggtattcgttttcacaacatttattatcacttgcattactacctctcacccacatcttcttctttgatcgtacactatcacacgtctcttctgaaaacaaaaatcattacttgccaaaaaaacctctctccattttttccggaaataattacttcttttaggtaagaaaatctagtctcttgcctttgtgagatctctaacggaatcatggcggctgtcgattcaactgatcggcgggacttcatagtgaacatcaacggccaagagagtggagccgccggtgctacagggtcaagcagcaatgctgagggaggtaatatttggaaagagtcaagctatgacttttgggatggtgaaaagggtaagaatgataagaaaggagacgacgaatacgacgacggcggcagtttccatatcaggc

SEQ ID NO: 28916 - DNA, 1905 bp, Arabidopsis thaliana landsberg
tagcaagaatctggttgtggcgattcctagtatatagaagcctgatgattatgattataatgccagttaccacggtgattatacggtgaagtctgtccactgctgtttttgtatcgtttaaggtcaaagccagagctctcctttctctaaacgccttaacctgtgaaagaactcgcgagattagataactctgtttccatgtaaagattcttaattgatatattgaatttgagacttaccacccaattcttgaggcaagacttgctgatcttatcgctctctgaagctccttcaaagagagccatggctctttcagcctcctcttcacatagaaaacgcaagaagtcttccaaatatatgtacctaaattaaaccagaaaaatcctatcaagattttgagctgaaaccaaacaaatcaagaactttgagaaatatgatcaaattcaaggtatatacctagaacctggctcggtgacgttgtgaaaaatcttcctagctgcgcatttagcttcgtactcgcttcttatatgcgtagcgtcctcatcctcctgagtagtgtcctgcatattttgatccaaagtagaaatagcgccttttagtattatattcatcaatctcttcatgttccaagcagacacattctttgtgttcattctcttcaactgatcaatcctaatcccttcgccatcttctcctctcttagaaccaatccgattcagtcccggacttttcccgactttcataaaactcttgacggtcgcttttagagctggaggcagcttagctccggctaatttctctaagctcttaacatcttctgctacttgttgctcttcttcctccattctctgaatctccatcaaaggaggaccggagagagtttcaatcacgtattgagtgaacaacgactcctgaatccgatcaaagtaagtgctcatgtggaacgatgaagccaaaactttaaccagaattgttttaaccaaccaaatgataagagccacaagcaaacataccaacactctcgtcacataccgaagagcagtgctccgagtctctctttcgactttcttatcgaacaagaaatgccacgcgagcaacactagccctaaccacaagcagttttgaacagattttctcactccgtagacgaaatacaaaacccttttcctccaagtgaagtttttctcgaccaagaagacaatgattctcactatccaactcgagactaatctcccacatatcaacaccaaaacagtcacttcccatttccacaaatccagcttccaccatgtcttgcgttgcaagttatgtatggttaagctacagaccaaacttgtgactatcagaactagacttatccattcaaggaaaacccagaagctaagtttgtcccttttgaattcctccggtaaatcctcgtctagaaacggatcctcctcttcttcttcctcaaacccattccgacccggagtacccgctttagggcttttcccaagaaacccagatttaaaaatcccggatctccgaccagacttcatctctgtcttgtcaatcgctggatgtgtaggtgttggaggatcctgcaatcttgatttggtcttgttcctactcaacatcggtttcttcgaaccacacttcaaaacctctgcttcgtctctgtttcgaccttcctcgtcgctacttccacctagcgatgttctgttctgcctccgtcttactgcgtctgctttaactttagtcttaaccggagacgaagattcagaaatcgtcgttaagccacgtcgcggcgtgttgctagcagttgcaggacgtggcggcgtgttgctctgtcgctctgccatgttaagctcaacatctaaagagatctcatctcctgaagctctctgcttgtgaagaaactgacca

SEQ ID NO: 28917 - DNA, 2746 bp, Arabidopsis thaliana landsberg
tgtagaaacattgattctgcaagtcttatccttataatctttcactgtcttcagaggagcttaggggcatcttatagctgatcattactgcagactacaagaaaaaaaaccacaaaagaagcttaggagttgacatcgggataatacaggaagacgtttggagagttaaatttgacttaccccagctgcctctgactcaacaaagcaagaaaaccgcgtctcttcatgagaaggaacaggaaacactggtatctgtggaggctcgctacttgatcttttatcctcaaaatgtgtctttatcaaatcaactacagtctagaaacaaggattatcaacaaactctaacagtacaacataatcatagtcataaactaaaatagtagtacctttgtatctggaaaatctccaacagccacaactgccatattgcataaatgataccacttctggtaaaattgcttcacagttgcagcaggaacagatcgaatcactttctccaacccaatgggtaaacgttcagcatactgcagttaaatgaaagtcttttttaagaaaacattggcctctctcttaaactagacaactgattaacaaaagacctcacatacctttgaaccttccatcatcagctgccaatgtgaatcttgcatccttccagtagcattccgattccctcggtattcttccataacagcccctctttctttctctaaatcttcctttgagactcgaatctaaaaacaccgtgtaactaatttcttatggaaagaaaaaaataaagtaacaaaaaggaggagacagagtcacagagacattacctcggagctaaactctgctaaaatggaaatagcctgagataacaattcaggcttatcaacagggacaaacaattcataaatagtctcatccgctgtagtcattgcgttttgacagggcccaaactctgctccaatgctctctaagaacttgacaatatcatgatttgtatatctcgttgtagcactaaatgcaagatgctctactatatgagcaactccacgctgatcctcctcttccaaaactgaactgccaataaaccaaaaggtgtgtcagcatcatttatagcgcacaattctgtattatcgaatatatcaatgcatgtcacaaatctattcataaaagataacaagaagaatcattaatcaaatcaaagttggatcaacactgaagagtgaccaaataaatcaacattcgactcaatttccagtaatttcaattcataagttcaattcaattcaaattgaaaccaaatgtggccaaaataaaaaaagaagaagaagacatacccgactttaacggcgagagctagagcggctctcattcttggtttggagttccggcgaacatagtagatgagaccattatcgagtcttccataatcagccccgaatggctcaagctcgttaccgagttcttgttccatgtccacactcatcagtttcagcgacctgaaaccttgtttcctcaacaccttcgagctctctcccgctatcaaatccatctctcactctctctctctctctctctgcctcactctgtcaaaatcaaattcgtttatcaatagaacacgaaaacaaattcttctccctatagagacggcacaaaagtcccacccttcgagatttgttcttcttatgtttgtttttttgccttgactagtatctttctcggtttgcccggtatatttggttcaaccagcgtcggtttatatcaagtttttgctaaaattcaatcggaatattccaatttatggttctggatgtgacaacaaacatcataaccggaactacattagtttactcaacttccataacatagcgctacaaacagatttgtccttactccttacagaagatcaacaaagtttgagatttctagtttgatcattcaacaaaaaacttccgataaaagactcacaaagttttgattccaatcagacttttagcgtttgaccactcttggagactttctcagcaaccaacttgatctcacgaatcctttcctcaacaagttgcttcagctgatgctaatgatccggtttgttttcatcaacttgaacattggtattagcctcttctccgtttacagacttgaaaaccacaaacgatgcttctggctcgaaagagcttggaacatcaacgacttgtttctttggagtttctatatcttttcccagaatgtcggttctcacatggttcgtgatgactgatgtgtaatcttccatgtacttgtcaataggatcaagagcaaggtatatcaaaatctcccagcatttgaggaactgtttcttgttgatcttcagagattcgcggactttctcaatggcgttcagaggcggggtgaatcgaggtatctgagctttctttgatagctttccttttgtgagagtctgaacagctgaatcaatgtctggtttgattggatcgaaactgcgcaagcggtttatgtctatgcaagtgcggatgtgttggaacttttcagatggctcctcaactgtcaaatcgtaaacgttttctgttatggccacgttgtttactacctccataagatagcttccgagtccttttccttggaaggatggtaagaccaagatctgatatcaaaacaacgaatcagcaaaaacagtcagatcaaaaagattgtaagtaggattgagatctctgaggaatatatttaatacctggctgagtcgcatccgcagcaagtc

SEQ ID NO: 28918 - DNA, 814 bp, Arabidopsis thaliana landsberg
tgctccagtgcagaagagcgtgatagtattgttacgctaccggctgaacctaactcaataatagtatatccgaaagagctgtcaccgtaaatgattttagggccactcgctcggatcgaaattccaaagttatattctttctctatacctaatataaaagctacatgacatatcaatccgaatatatctatcaacatagtatatgcccttacatattgtttctgacttttctctatccgaatttctcgcttcatggtttttttttaacatattctcattaaattaccattactatcatataactaaaagatggaaatagaataagagtgtctttgagaatcgaacgtccatatcagtaagatcgtttgtgtgaaggcaaaatctaaaggatttaagttccaaaaacagaaaatggtctattacgctaaaatagaagaattggtatctattcaaaacagaaaaatatagtatacgacagacacgtgtgacgaagataccctacgctatagacacaggtctgttttctcttttctatgcctgaaggctctgttaacttcactgtctctggttcggataatcctatccttctcttcctataaatacctctccactcttgctctgcctccaccactacagccaccgtagcaaccaccagaaaaccctatgaaagaaatttcttttttttttttactttcttggtttgtcaaatatggtcagccatccaatggagaaagctgcaaatggtgcgtctgcgttggaaacgcacacgggtgagttagatcagcctgaacggcttcgtcagatcatatcgggg

SEQ ID NO: 28919 - DNA, 2280 bp, Arabidopsis thaliana landsberg
ataagcggagcaaaacctagtcaggcccgtgtaagatggagatttgttttaaagatttatcaaatcaatgactactaacctaagcaagtaagcgaagccgtggctctcacaaattagcccaaatcctcaattttcaccgaaagtcttcgaatttattctccagtatcagtttctctgggaaaaagttctacttttgcggactcttgaggaaatcttttttatctgtatatcattcatgggttaatccgattaaacccgtgttgctccgttagggtttaagagaattgctgtcttcaccggtcatggctgcaaaacttgtgtcctcctcgacttcttcttctttggttccatccattttctcaccgtttcaacctcggagttcttttcaggtgacagtttcttaatttctttctactcagcgttcagaatttcttctttgctgcatctgtgtttcatgctcccagtgtaatgtctcgacagatatttctcccaatgtggtttgagaggttgaacagggttcatttgatctagtaggagaatttacttgacacatttgagtatactaaaatcaatgtgtctgaagtggactttaagatatagtttttgcaattctaacttagatttgattgggacattgcagtcttgttctccatagatgatgtctagaaaaaactggaacttcatctgatcaataatgctttttattaggttatgataaaatgaaatcaagtgttggtttcatttgttgttgttgatgaggttattacctgctgtttcttggtcttgggaagcccatgtttatggatatttgctgatatttatcttctcgaaacttcagtttcgttcaccgagggttcagcctgctcaactccattgttacccttctctgcaccttcaaactgataaaagtaagttcctttcttactcttaattgttatcctttgggggtatgagtgacttgtgagtaagttttctgactgtatttgcattcgttatgaacagttggctctcttcacatttcctcaagaggccaaaaaccaagcgaagtctcccgaaagagaacttatttgcctcttgctacttcagaagaaaagttccactacactgaagatacaactaatgatccagacacagtaagtccccaaattggcaccgaagctacacctcgagatgatgattcaactatccaatacaatagaagtgacgggaaaccgggtttcatttcgttttacaatcctcggaataaaactgaggatatcattatcccccctgaaactcaaagtccatggggacgcctgctctggctcattggtcctgcagtcttagtctcctctttcattttacctccagtttatttacgaagaatagtctcagcagtttttgaagattctttgctcacaggttcgtcttgcttctcccttttccgatttactcgtcacgttttcttcgaaaattgcagagacaaagtcattgtatctttcttcctctattgcagacttccttatcctattcttcaccgaggctctcttctactgcggagtcgctgcatttcttctgataatagaccgctcaagaaaaacatccggaaaagttcctcagaaccgaatcaatcctcctcagttaggacaaagaatctcttctgtagcaacattagtcctgagtcttatgattccaatggtgacaatgggattcgtctggccatggactggacctgcagcatcagctactcttgcaccgtacctcgttggtatcgttgttcagtttgcattcgaacagtacgcaagatatcgtaactctccatcatctcctatcatccccatcatctttcaggtatgtgatcactcttcttcaattcacacctctcaaagatatttcactttaacacacttttgaaggaacctttttggttttgtaggtatacagacttcatcagctaaacagagcggcacaactagtaacagcattatcatttacggttaaaggagcagaggcaacagttaataatctggcaatcaagaaatcactgggcacacttttgaatgtgatacaggttttgggtgtgatttcaatctggtctatatctagcttcctcatgtggttatcatcacctttccaaaaccagtcttgatgtatgaaaacatctttcttattattattacagagaagagaataacacagatctgtctcgagttcttaagtcttaactgtaaaatcctttacctttttatagattttacttagggtccagttattctgaaacttaaaagattgaagtggaga

SEQ ID NO: 28920 - DNA, 1728 bp, Arabidopsis thaliana landsberg
atcgtcgaaagaaggacaacaagaaaaagcaacgttgaaaaaagttgagagagtttacattattttagctagagaaagcttgtgaagtatatatctatcttgttgcacactggagtagtgtatataaatgattacgattttttttttttgtgaatagtttttttttcttttctttttttgtaacgcttataactttgggccgagtttttgatgtgtttttcggggttacaagtgtttgcgtaactaaaaaagcaactctagttaatgaaagtgcttaagttactttgctttttcattctcgagtcgaaccttttttgacttcttattcataactgcaatataaatattattataatcattgcaaggaatctaggttttagttcaagtttctagattttgaatttttggttttcaaaaacaattttatctaactataattaaatttagtatgaatcgaatgatcaatgtcgtacgataagttaaaaacggatttgctctccgtctgcggcttttaatgaagtacatttcgtacattgataaaacgaatacaatacaaaataataaaactaaattataagtgtaagaacatctagacaaatcttatttcaacctcatctaatttaatctctttatcttaaactccaagataagatagtatgatacacagtattattttgttcgttcatggaagtgttatttttccgtatggtttcaaattcaatcgcaaattaccaataaaagtcaattatgaacaataatattcctaatgtcactctattctggagttgatctttttttgtttgtaaagtagtgctttaaacgttacatgtttttacatagaattgaacaatagttattagttctaaactggttctccaacctattgatcattcattccttttttcctccaaaaaaactttggaaatggctggccgaaaagctaaatattaaacactaacccataaaatttagtcataaacaaattattatttaataaaacagtctatttctaatttagatttcttataaactaattccctttctacatttttattttaaaactcatattttatttaaaaatttcttatctttattagacttaaaatgattggacatagttttaaaaaaagttagtggtccgaagttttatgagtccgaggatttagatacaaaaacttacattggatttgtcgtgtctgaattacttgtcggcgatgcaattattgtcttttgtcggcgatgtaatagcattggaatacaatttaagtcaacgattgatatcaaagattaactttatatattgtgtgttttcccttatgccgttattaagtccataaattagggatcgtttagaatctccttccatcctaatctgtctaaaaccgcggatccatagtgtatgtaatacgtgtgagaagtttaatcgttctcactcacatgttgtctaattgtgaattttctgccgttacaaaagtgcttggatggtctcgagtaatccatatcgatccaatcatctcatttggaccacactccaacgaaggcggtatccacttgaccctctgatgtattctccgtctacccatatgcggttaatttcattttatctaatcgttcattactttttaactttatcaggcgattctaaaatctgataattaaatattttatcttttctgaatactcattttacttttctagatcaattttttttttttgctaagactttat

SEQ ID NO: 28921 - DNA, 1578 bp, Arabidopsis thaliana landsberg
  unsure (1)..(1578): unsure at all n locations
gaatttctctaaataataagcttattgatttttgattatttttttcaaatagttataaaaatactatagagtagaagatattacatgagagaatggtaaataattcaatccagtcgtagtttaatttccattctctttaaatgctaaattttatttcaagcttaccgtatatttttggctcagataataaataactttcatctgccataaaacactaattttcatgtttatttatatgtttagttaggggcgacttaagctacttatagttataggtcatgttcaaaagtttaactatagatatcttaaataaggtccatatatatacacaagaactttttttggtaatcacgatccgtttaatctatgtatttaatttacacatactaaaacaattcaaggtatagtcgatcttatctgaacgttgtagtaagcataactggtcaccaaaaatatgttcttagttgaagtacacacttgaatccaacccaaaaaacctcgtcagtgtcgggatgatagacgaagtgaagcctatagttgaaatagaacactaggaagccattttgctaaaaaaaatcttaatgaatacttagtagatgataggtacagatagagatacattaaggcttgtgttaatttcaaattaccttaggcccataatatatgcataattgcatatcctaaaataaagtccttcaaaattaagatttcttgctagcgacttcatcgaagcggacctttcgggttttcatcaaatataccttattttcttaatatctcagctttttatttaaaattttcagaagagcgaaatcaatttaaccatattcaatcttaatacagtcttaaaaacggtttttaaaggagaagcttcaggtggcacgcatcgaactaggaagatcctctatatcaaggagaagtatcagaaggcactttactcaaacaccagagtctactgcttctacttggagttgtattcactgaacttgccttagcatctgcaaacaaaaaatctaaaccagtctctgtcccatcggctttgttcatatcatcggttaaagaatgccttacacgggacgaaagcagaggtctctcaggtgtcctataagggtcacgggagctagggaagcaactcggtggtgcaggagagttagggttgcttaaagaatcttctttcaagatttctcccattcttgaaagaatccggaaagctagattcgcaagtgttcgggaatatgcttcgagaaccgcatgacctatgtcctgaacacagagaagaaagatgtttcagaccattggactaagaaagatgtagttagttttgtttatttataccttgccatattggatctttgtagcatcaagaaacgagtgagggagattagggtgtttggatttgatctgagttctaagcgcttctgctcggttcaatagtgactcattgcgaccaatttcagacaacggatctttagcgaatgaccacgatgctcttacaggggatttaccattgctgncttgttctgtaatcctttctttccaagcaaacatagcagattctaacttgtaactgtctcgagt

SEQ ID NO: 28922 - DNA, 2516 bp, Arabidopsis thaliana landsberg
  unsure (1)..(2516): unsure at all n locations
cagaagagaatttttccctcttgagcattgcctttggaatgcggaaatatctaaaagcacgtttcgacaaggacccaaaaaaaaaaaatgagatttttattctctcatacacgaatcaagttcatattcgacgaatctcctacatatcgaaccaaaaaaaaactatcaaacgagacatgggaaataaacaaattgcgagaggaagatttgatatgataccagtttggaatcagtatcagaacgagaggtctcagccgtaagaccggaatcgagcgagttcgaaagagtcgactcgctctgagattcagccgacgcctccgaaacatcgcgatccttctccagagagacaatattcaccgtgcaatcattctccatcgttgcttctcctcctctccggtgctttagaaaagaactgcgtcgnctctcttaggaaataaaaatggttcttcttcgaaagagccaaaaggagagagctttaagagagagaggaatgagagaagaaggagatgaaaaggaaaaaaagagagagacaaaaggtccacatggcgtcgcttttacacgtgtcatagtattgccacgtcatctgggtcgctaataatatctccgacaaatatcagccagatatttttttttggagctcaaggagaagggaggttgtgttaaataaaaataaaaatgatcttttcttttgtcaacttctgatgatatatagataatggatgctcttttttattttggtagttttggtttcttgtcttttatgtcattatttcgttgttgtttttttacttgtagattttttataagttaaattaagatcagatttacacgaggcctctttagcaagtggtatgatcacatgaatatttttttgtttttttttttgtaaagaaagaccagaattcgtgtgagcctctctagggtttggtcttacattttctagaatatacatatatatggatgatggatcaaattggcttcatacggattttgtaacaaattttattaaagaatgatggatgcttacaaatttcagagttttaaggttaagtacatccttccttatcagtgaattattggagatgagacaacttcgtcagctcaaacataagagattctcgagaaaatgtatttaacattagttggtcaagcacgcaatatactcgtcacaaattatgtaggttaagttataaaatggatagaatgaagaagagtctgaagatgcggtctcaacatgatatagtttacttcacgtgtcatttttgtcacaattgccactatttaactaaaaagtacaagtaatatgaaaaatgaaaatgaaatgcaaacatgttaagctaatttttatggtcaaattatgagtttttttcctcattttcttccaatgcagatggtacaaaccatggtatctggataattttgtaacatctctaatattatttttgtcaactcgaattaaagagaaaaaaacaacaaaaaactattaataaaacagttacttaactttcattaaatatcatttgaatttggataatgagattagtccaagagaaattaagtatcattatctaaaatataaaatgttgataggataaatacgaataaacaactaattaaaaaattagccattggtttcgcaaatatccatttgcgctaagagacattttgctgacgtgggacagtggttgctnnnnnnnnnnnnnnnnnnnnttcgttacaaacgaaaatatctgcccttttctttttacaacctaaaacaaaatatctcgcggataataatagttttctaatgtagaccacttcttcatatcctaatgtagaccactttgctaatggttggatgaaatgtattatctttttataatcatatagactccatctttagagatatgtacaaatccatcgagattttctttttgagatcctcctttcttgaactctatataaatattgtacattcttatgaatgataatcataatataaaaatttacaagttctgtagtagaatcagagtctatatgaaaaagaaaagaaaaaaaactaaagatagatcgattttccaaagtttggaaataattatattgcctccaccgtcaccaaccgcggattctctcatttcggtgaacatgtcaaacatcaaccaattagcaataattaatcatctcatgtggagccacttaataaatatcaataatctcatgtggagccaattatgtttttctagattctctattttagtctttaggtataacatatatgtgtacatgtccatcgagatcattctccttaaagtcttcctatctccttaaagtcttcctatgtacattgttacgaataatatacaactctataagctcttgatagctattacaacatacgacattattgttataatacagccatattgatataattttttttattttttttgtaatcctatggggctatgtgcctatgcctaaatcctaatgcatatatctagttggggtagagtaaatgatgtatatgtatataa

SEQ ID NO: 28923 - DNA, 874 bp, Arabidopsis thaliana landsberg
  unsure (1)..(874): unsure at all n locations
tattgtgaacccggcttgtccacccctaaagttattgtctttccccatccctaaacaatgattgaacaaagaagttaaaatcctcgaacttatttgatgtgtttctatttcttattagttcttatttggtcttaattaggcagagatcaatgcaacattacctgtctacagcaagcataagcttcttgaaccaaagaactacttccaacacattcgaagcaatagtccgctcccccatcagtcatctcattgatcacctaaacacaaaaatatcaaaagttatttatatctctatttccgttgacgtatttatattatgtgccattacctcgctaacacggtttttctcacatgtcatagagtttacaaactcggtaactccaaatttctggcctgcaaaaagttgatgttcaaaacaattatataagtcatttttaatatatagaaaaatatatataaggtatggagatttaagcaaaaaaactatccaataaagaaaatcaccaaccaacttggaatttggtagggtttatatccacaccaatgattctagaggcaccacaaagtctcgcaccctctgcaacctagaaacattcaaaccctaatccatctcatcaactcataaccagacgactacttttattttacttttgaatgaatgtaaaaccttattcaaccaaacaaaccatgtttccattatatgcatccctgattcaaatgttgtttctaacagttaaaacatgggacagaaaaaccacacaaagcgtctagttatgtgagtctagttagattaagacgacttattattacangatcataattgannaatgtaattttaccgctaatccgatagaaccaagtcccgaaatcacaa

SEQ ID NO: 28924 - DNA, 1221 bp, Arabidopsis thaliana landsberg
acatatcataagtatttcgagccctaatttattctgtttatttatccacaaaaaaaaacaaaaaaaaacagaaggactctggtcaaataaggagagacggttgttgacccggaatataaacaggcgatatttgacgcggctccgaatcgcagccgcagcaacaggtccttctgccgaaaatggaatttattcacaccacaaaaatcatgacacctagcgttttacgtttttgcatactattttttttccaccacatgttgttttgtttttgtttctttcttttaattctcagttctcacagataacgatggatcagcttgcgacgtacttaattactttatcctcctccacttacaatggcctttgtttcactcactcaaaacttttactatgcggagtctcatgtaacaactgcgagatagatttagacatacaatacaaaaaaaaaaaatagtaataaagaaagattaactatccagccctttttccattacctaaactttgttgataaaacgatctacgtaagtagttacgttacacattaccaaatatataaggtatggctaaatcgccataattgaagacgagaatatttgttctaaagtttgaggacggctccatatagttcaacaagttttatcattagataacgataaggacaatttcatcgctagtacatcaatcatattttagttctaatagaggtcggttaaacggctgttaaaaaaagactggaagagaagaacaataacttttaggtttgaggaggagaagaacctgtactgaatactactgatactcttttatataggttcaagccgagaaacttaaggaaattctaatgataagttggccattaatcatgcattttacacattttcttacaaataagtgttgaatataggcagcgacaaaatttcggatttccactgatatcgccaattcgttgcttatttaagaggatttagcatcaattacgaaacattagttggctttatatccatgatttagatatacataaaatttgccacctacaatagaagctaatttaaaaatctaaagttacatgaattttcatctaaaaatatgacagagagtgacttaattgatatatctcttggtccgttatgggatattcttgggaaacaattataattattgaacatgtttttttttaatggcaaagttgaaattgtcctcttaatttatagaaatcatttt

SEQ ID NO: 28925 - DNA, 741 bp, Arabidopsis thaliana landsberg
  unsure (1)..(741): unsure at all n locations
aacgctcaagtatacacataatcttatataactggtgatcttgtaagggaacattttggattgtacgataagatatagttatactaaagaaaagtttcaacttggcatggaaagcgcaaggcaactctttaatttacgatttgaaagcacgagccaccaccatttccgttccatttttgcttacacagagtgacacaannnnnnnnnnnnnnnnntgtttttttaataagatcatgacacatttcttgtccgtgcgtctctttcgtttccatacctaaaaaagtatttgacatgtttatgaatgttaatttatcttcccttcaatataaatttactagaaaatgtctcacgcgttgcgtgagttatattaatatagtaatgtatacaatattatataactatatatatatatattacaataaaatttgatattttgatttttacattaaaaacatttatagtaaatatttattatttcttccaaacataaaatttacgcataatgtatataactcaatatggaaatttaaaaagcacaacgaaaaataataattttttaataaaaatgaaataatataataatatattgtgtgcatatttatttattataataaaaaatagattaaaaaaaaatatcatgtattttgcaaaaaaatataaaataaataaaatattactggtaataaaatatatatacttttactcaaaacttaaatctagaatgagatgttatttctggta

SEQ ID NO: 28926 - DNA, 1350 bp, Arabidopsis thaliana landsberg
aactatcaagagatcggttgttcttttggatttatacaagtaaagttcgacactgactttattcacaaattactcttatattatatgatatatatgttgatttggttgatgctttctaagcaaatttaacaaactattttactaatccttgactttttgtcggctaccattggtatattatatatatagataataaaataagagctagagaaaacatctttataaacgaattacaaatttggaaattagtcaaaagggttagctgtaaacaaaatttgtgtacacaaacttaattgagtacccataaaaccctaaccctcaagaaccatttaaccagtctgagaataccttcgccgtaaatatagaaagaactccttgcgtcacctgaattcttctaccaaaaggccccctctaaattgatcctattacttccaagacaagaaagaaataaaaattgagagtagagattaaaatagttactattcagacccattccttgtgccgcaagaaagagatccttgtttactcattccacatagtgaaaacaccaccagggtttgacccctgaacagactcactggtccaaccactataccctccggttccatcactggaaggcatatcgtaatctgttttaacggttggaaactcctcggtcgatccaacagtcgagctggacccaataccaataccgtggttcccaagaaatgctgcagtgttgtagctcccactagagcctccattgttattattgttgtcaacgatagaggtagagacaagtccatgaagcagagccggattgctatgaagatacgcattgtagagctgctgagagttctggctcgactgttgctgcaagtaattgttggtctgttggtggagatgaagttgtgtctggatatagctatggtgattaaaagaggaggaatcgtgagcattgttgttgttgtaatgagagatgtcattgttctgaagagatagaaaaggctctaatggttgttgaatgcttagagggtaaggttgaagctgaagtcttgatgaggtggagccagagcctgtgctcgagccaccaccgtactggaaacttgaaccaagggctatcatctccgcctcgcgtttccttgaagactcaagagcttgagcttctttgagccgtttagctgcgcctcctccgatgggaagagtgctactctctagaatggctttcacgtcgtaccggttgatctcgaagttggtcactgcattaagtcctctaaactttattgcagctatatcgtaagcttctgctgcttcttcctcagtgcctgaacaagataaaccatattgataacgtaagataatggtttgcag

SEQ ID NO: 28927 - DNA, 1997 bp, Arabidopsis thaliana landsberg
cttcttaatagagaattgtacattgactcgaatctcatattctccgggatgctctcaaagaacttctctgcttcttccaaatttaaaaccttcagtcagatgaaatctagctgagaagtcttccgggagattgtacatcttttgttcgaccatccagtctgatacctctagggcttggcgaggtcggttagaacttctgagcttctcgacgattcctcttaataacgaagggtttaactgcttcccctgttgttgttgttgctgtagccattgctcaagcaccgttgtgatttctgctttctgatgtgaagccgcttcgatccgactctgcagagtttggttcgtcgccggagacgatagtgttacgttggtgtaggagcagaaaaatcgaggcctgttactgtaagcgaggattcgctttgcgtgttgctgaagattaagcatcatgctcatgtttgcaaacttagggttttgcttaactttttcaatttaatcgatatatatatatacagtatatagatatattaatgaaccttatattaattgccattttaaatttggtaagatcataagattacgacgttaatttggtttaataggtgggtaagcttctggaaattatggcccaatatattttagttgggcaaataaaacctcaagttgaaacaaattcatcatcactgataattcaaatatacatggtaaagtttttgaatgataaaatgtgtcttattatgggaatgcagattaaatcaaaggaaagcaaatttggatgtggagaagaagaacaccgcattagaaagacaatatataagcaattaagttttcgagattccgaaatgatgaacctccaagcttaaggcattgttcaacagtttccttcatgggcataatcctcttgcggatctcttccccttccgagctcgtcattagtgttctaaccgcgttttcgatcactagtctctctaccttgttttccaaatgcaatccgatcttccaaacatcgttaatgtatctcgcgttcacatgctggtccgtgaaacatgacgtacatatcataggaacaccttcacatatgctctctagtgtcgagttccatccacaatgtgtccaaaacgctccaacggcaggatgcgccaatacctctaactgattcgcccatttcacgatttttcccttatctccaatgttttccataaaccctaaaggcaatgactcgagccactcggtccccctgacagaccccggcctaaccacccacaaaaacggtcgttcactgtttcttagaccccaagcaatctcgagaaactccttctcttctatagcttcaaggcttccgaaactcgcatagaccaccgactgtgggtcttgcttgtcgagccaatcggtatcttccttgttctctgtcttcggtgtaggatcttcgctatatttgtgaaacggtccgatcgggaaaaatggaacttgtaatttgctgctacaattcataagtgatagtctttcaagatcttcaaatgtgttccatatgactcctgaagaagacttggctccttccaccatgtcgttaactacccggtaaagttcctccggctcattcgtttccattaccggaagatccttcactttcaaaggtggaagctctgtcactggctcatctaatctagaatctggagaaaaataataatttttactcattacctcatctttaatattgcttagaaaataataagacatttttttaccaggaatcctataaccgatagcaaaactaatcctgtgtgcaataaaacttacgaattttcaaaattttaatacaataatatgaattcacgtcatcaataattagttaataagtacaattgggaaaaaaacaagttgactttataattatcttttagcaaatggcaacaattgttttagttcatttatatcaaaattcacccgcaaattaaatattatactaggaaaatattacacttatatggatcatattattt

SEQ ID NO: 28928 - DNA, 2199 bp, Arabidopsis thaliana landsberg
gcaggggggccgcgctgttagaagatcgctccttaagtaactctcgggtactggaatctacttcttgtagcttctgtacttcctcagaaggcttctcttcgatatttacaagctgagctctctcttctctagttttagacacatatgacatcaaacctttccgcaatttaataacttcctcatattcacaagcttcatccgctgaaacacgggcaagatcacgaagtttggctcctctctccttctcagatgtcatgaactcgtccacgtctgtcttcttccttgataaatcttcagtttccttgtcaacctcagtgagaccagcttgcacatcgtttaacattttatccatacttgtttgcaattccttgtagccagtcaccacattgttaattctttcctcaactgcctctatttgcgaatcgttctcgtcaatctccttctcctttgccttcaccaaagcaagcagctcctcaagttcatttgccaaatgttctttcttcttctgcagtatctccttctctttcatatcttgttcaacagatccctcaagagtaccattcaaccacaaccgaacgttatcaacaacaacagattctatatccaattcgacttttctaacctcaacatcttcagaatatgaatgccatttctccatttcatctgaataaaaagcttctgctttctccagaatcgatccagcatcattctcagcatccgtgccaaaactacgaagcagacaggcagattcttcttcagctgcaatctgagaaagaagaacctcttccattttcgactcaatagcatcgcaatcagattccgcttggcgaagcaatgccaacaatgctagcctatctctttccttagcagcgaggctttcgctaatcctctcagccgcatcgaaatcctctgtctcgatcgcttcctcaagctgcttctcgagctcttcgtgcgtcgtagaagctaatctgagattctcagatgcttgccttttcttcctaatcgcgttcttacgagcagaagtaaccgaagcagccaaatcacgagaacgatttagcttcgcttcgatctgagccttaactaactccaaccttgagctaccattaccaacaaccacagtaacaacaggagagtctaaagattgattaccggaatcaaacacttgcgcgacggaatcagatatttgactaactaaatctgatacttgactaacggaatcggattgttgactaacggcatcatcttcgtcttcgtcgagattgttggtttcgtgcctaccgtatccaattcttaatccagccgctctcttcttcctccgtgacacctgacgtccataattcttcgccggagattgatgagtagtgataactgcctccatcggctcaggttggtgttgaaccggagtcacaatcgttaagtctgaaaacagattctcgtccaaagcctccgaaatatctggctgagaagtagccgagatcagtgtcgcctccgccgccttggtttcttcagattgaggcggtgagcttaccttgctgtcaccggagaagtgagacgccggtgtaaaaagctccatcccttcgaacagggaatccatatcgtcgccaccatccatcgccgccgatctgatcaatcaccgatctgatctacatttgagtttgaaaccttttaataattcataaaaataaattcactagtttaatgggccttaaatgtttgacttgtcttgggcctattaacggcccatatttgataatgctgacgtcactctttcccgattgtgttagcgcctcttcatctccataaagataaaaatttcaacacttgtcggcgactcagagaatctaaccggaaacctaatctctttacctctgagtctatctacgccggatttttcaattttcaaattctcgattcgattgaagatggaaggaggtggaggaagtagcggcggaggagctggaggagtggttccggaatcagcgattgaagcggtgaatcaaacacttgcgtacctcaaggaactgaagccacagcttgagcagatgctgactttagctgagccagaggctctcgctgcaatgcaaccattacagcgagctaagactatgcacttgctagctgaagccaccactactctttacgaacgtaacactctttcttctttgtgaatctgcttcgattgaaggttgcttgtttgtg

SEQ ID NO: 28929 - DNA, 2352 bp, Arabidopsis thaliana landsberg
  unsure (1)..(2352): unsure at all n locations
ctagttgcttcacaaaatgaagcctccaacgattatagtacccgcatccattaaagatactgttgagagtttattcgaagttcacagaaaggtagattcttcagagctaaagcacaatcttgttggcttggacataggtggtaactcaacctctagcattcattgcagccaagatttggcttttttgttaaaccttggacacttcttcatgcaggggaggagtttattataaggaaagatctcaaagtcaaagcctttaagacataccatgtcatccaaagccaggtttattttagtaaactcgcatgagattttcgatatcttagcgttatgtgtcttcgttgaattcatgctttcgtttgatattttgcagggttatgtagtgtattcaactaaatataaactcaagaaggaatatattggcctatctggaaatgaaattaagaacttgaaggcttcaggtgttgaggtttgtctttgatttgcttaatattgcttgtcaattttttcttatgtttgtctatcacaaagtcaatagttttgcaatggtctttccaaagtatataagcctgtttaataagtttggattgtggattgtagattacagacagcataataactcctgaagttgcttttacgggagatacaacgtcggattttgtagttgatgaaactaatgctgatgctctcaaggcaaaggttctcgtcatggaggtgaatatctgctactgatatgaatttggacaatgtgcgtgatttataatgatatagttcttcccggtccaagtttcatggctttgtattaaaagggaagctgtctctatttcctcttgtgcagagcacatttcttgatgattcggtatcggtagagcatgcgagagattatggacatatccatatatctgaggtcaggatcctcctttctttgacacctcttgttactttctgtctcttgatggtcatagaagatttcatatatccttaaactgcagatagtaaatcatgctgaaaagtttgaaaacaaagcaatcctgctaatccacttttcggctcggtatacagtgaaggtgtgtcttctttatccaacctggttatgaagcagtaggaaatcagttactctcttaccttgtagtggtaattaatctttgcgagttttcacaggaaatcgaagatgcggtttctgcattgcctccacctttagagggacgtgtgtttgcactaacacaaggattctaaacattataacactcttataggttttacatacttttgtttttgtattccacatgtaaacattgtattctgttgttaattttaagatttcttctatctcgataaagaatgaagtgtggaagtagagaatacagacgagcacaccaatatcagataaattcagaggaaatctcatgggatcccaaatcttattatttccctgcaacaagattgttatgtaaatcattggttttgaaaatcaattttctgtgtaacaagaccatctcccaagattgctatgtaaattattgactgcagagatcaattttcttttataataataaaagaaattaatcatgaatacaggatattatattgttagaaaaataaagaagattgatttctgcagaagaatgatattcgttatagttttacaagcacgatcatattttaataattagatttagccagaacggacttggggttttcnnnnnnnnnnnnnnnnnnnnnnnnnnnnnnagaaagaagcaaatttgctttgtaaactcatacgtattactttttgtcgcatatgatatatgattgatcgccactccaaattatttttgtctgaattgcagcttctgccgcgtaaggtaagataatcaatctagcattgcctatttgttgtattttttattctgaccagtgtccagcgatcaaaagtatgggatttgggcaacttgtatagtagtttaattggacttatttcgcaagttgtcaaacaatgtctcgagttcaacccttgtagtcgatcctccttgtgatagaagtttattggtcttatgtcttaagttgtcaaataaatatggagtgtgaacatttgaattataggtttagtcgtagagtaattatattttaacctcattgtctaacttgtgtgtactttctgttaactcttgatttatgtgtttatcatttttttaagttttgtgttttccattatgctctgtttatctaaaaatagtagtagctgaataaccatttttgttttaaaaaaaaaatcaaagttggacttccaagtcccaactaaagattaaaacatgcatgcaaataatttttgcaaataggattttctttcttaggaactcagactccaga

SEQ ID NO: 28930 - DNA, 2870 bp, Arabidopsis thaliana landsberg
  unsure (1)..(2870): unsure at all n locations
tcccttcagaaatttccatttgcttttcttttccgtttgatatattcttttatgtactgaggtggtctctttttaaaatctcgattcattaggtacttgaataataactatttgagtggagggattcctgctcagctgtcaaatcttacaaacttagagattgtgtaagcagtctacactctccatctctctgcaataaactatatcactagatctctgatgtctgtttgattggttttgcagttacctgtcttacaacaaatttattggaaacattccttttgccattgctcatattcctaaactgacatacctgtaagtctttgtgctagatcgctgatctttctctttgtctttgatttgcttactatctaaaagaaaatatgcattctaatggcgatcatgatgttgatgaaaccaggtaccttgatcacaaccaatttaccgggagaatcccagacgcattctacaagcatccattcctcaaagaaatgtgagttctcacccaatttttgaagagttcatcaaagctttgactcagacaaaatagtaaacccatcgagtataagaatttgaacaatgtgaactgttttgtgtgaaatccatctggatgagtttatgatgactggtttttcagaaaagttgaatgttttctttcttcattctccactctgacgataaggagttctgtttctattttgcaggtacattgaaggcaacatgttcaagtcaggcgtgaacccaattggtacccacaaagttttagaagtttctgatgccgattttgccgtgtgaccggatagaagattccaggaaggttctcgagaaaacgtctcagaaccacctagagattgttccactttagccctcttcactattattattttttgtatggtctgtggatttgcaaatgaaagaaagcataagactacaagtttttatcttcatattgtatagttagacacattccactaatctatatttctccttaatcaaatgattatatatatttagattggaataaaccacttccagtatacaatagtatgtgttacatcgatcatatatacaattgccaagaaatttacagtagttcttcaatgtttgattttcaccagttaccatcctcttcaagaacaagcaggagcatcaaaggtaggcaacacaatgaaagagatcgacagcggattgatataaaccggagatttcacaccatgacggaccggctcaagctttgggatatctccggtggctgtcggtaccaaaggtttaccattcaagagcattattttgctacgcaagtcaccgtctttgggactcaagtgatactcttctctgttcaaatatccgtccgaagctttgtttccaacccaagaaaccttgctcttgattgtttccaagaacgatttcctcttcatcgattctgcttgcaaaaccaccttcacgccattgctgactgcgactgtaaacgtcgtgtgcttactcagattgatcagaagaatcgttatacccgcctaagatgatagatttcgcagttacaaaccgaaactagaggatagtttagcgacagaaagatagagatatatatacactcactcttcttttggagcaatgaacgtaagctcgtagatactccgaggcagtcgtctgaacgccgagaatgcctttacccatcaaacgatgccaaagaagtgcgctggtcagattgttcgagatcaataagtttatgttatgactcgcctacagtaatcatgctggtttaggatttacagattatactttatgaacttgcctgtagtaatctggatttggaacaaacgtttccttttcaagcagaccgtagaaacctccgaccaaagcttgtctgcagtaaactttggtgttatgcttcgacgaaataccgagctgatctaagtaccttaagagaagagttcattttgtcaataatagaaaccgagtaaagatagaatgtggaatttgattctgtcttaccagaaactgttaatgaatgtctcggaaacctgacggccaccactgttaaaggctccaccagcttctccaacccaagcagcagcccaaggtccatgttcttgaattgtttggttcacattcgcgaataattccgaaattccgctcaagtaatttggatctagtatcttattcactagcttaggatcattccctgcaacactaaattcaacattgtttaggaatgctacaaagagagtctcttattgatttatttttcatatgcagcacctggaccaagattgtatatatgatgagtcaggacatcaagaacaccaggcccagagagccgaagaagctccgagtaccattgttcttcaaagaatttttctggagctacaaccaaaggcttggttctagaattcttgtaaacgttcttgattacatttttcagtacaatcaagtctttcccataaagctctacactcacgcttgcccaaatcccgcttccactaagctcattacctagtcaagaacagagctcgtgttataaggaccaacactaatatataagaaacaacatgggccaataagaaacaacataagaaaagagagatctagttctatataccaaactcccacgagtctatagcataaccctttgagactnnnnnnnnnnnnnnnnnnnnnnnnnnnnnnnnnnnnnnatcacctccccacgcagttccgttgagtttatttctcccgtgcagcgcgttcaaaccgaaagtcacaatagctctgtagaattagagttaagtcaatgtgaattatgctctgcataaaaccatactaaggttttatacttaccccgttgcgttgaagaaatggttaacttcgtcccaacgtttcatatacaaaca

SEQ ID NO: 28931 - DNA, 2000 bp, Arabidopsis thaliana landsberg
tacgaggcatggcctctggatctatctaatctgaacacgttagggcacccaggtagaccacgaaacatctactaccggaaaccccacgccatctgtataccaaaggaaccagtatattagccatcaccccgtacctgctcctgccatcgtataccctcacatgccttcagcctcatacgctgagactttgcatcctgcttcatacagtcatatgggacaggttcaatcaaccggattcaggataaaccaatatcccggagaagattttgtacctgcagcaattctaagacaccgtgaattgcctcactttagagcaatgcccgcgaatgtactaacatctttagcacatttttcatcttatagtgtcagtttgttcaaaagagtgttcactattcaataatggcttttttactctttctgttaatatgtgtaggaaaatgcattttgggaagtaggagacttctacaatgctgttaattatgtcgatcatcatcaagacatgcgcttagacatagaagatatgtcatatgaggttagtcctagacgacaaatattctttactctttcaccatataggtaggtatttaatgagttcacattggtttgtcttatcttataacattcaaaacctgggtggcgcaggagcttcttgctttgagcgaccagattggaactgtgaagacaggcttgtcatcagaagatgttaaagaacttctgaaaagaagaacctcgaccagaattaacctggaagaaggtccatctactgatctagagactgattcttgcacgatatgccaggtaaagccagtaaaatcttgagactacatcctccaagcttatgtaaacattcactcactcatcttagtagtaaaaagtttttttttttttatataatggggatctgacaggaaaactacaagaacgaagataagatcgcaacgctggattgcatgcacaaataccatgcagaatgcttgaagaagtggttggttatcaagaacgtttgcccaatctgtaaatcagaggcattggtcatagagaagaagaagaagctaaggttaagtagtagatgagaagaggttgctgctacaacctaaaagaggttatcgctgatggtttttaagacgctttttatctattggttttataagagagaaacagagtcagggtatgtttcagcccccaaattctgtaaatttgtacttttgtgcacattaaagtgacagtctaaagctaagattggcttagtgactataaaaactgtataggctttttttggttccttgtacattctggttactcctagagttaaactttcttcatctaaaacatctcttttgttcatagattatcgcatacgaatgattgtgtaaaaaataatatttaaaacaggatctgagaaacttacaccaaaagaagcaactaaaggaaaaacacaagaaagaatcatctgcatgtcttccatagattaatcaaactatattcttgcctaagaaacagacaaaatggcttgatcaagatcaacttgagcagcatccaaccttcttaacctcagaaacatcatccttagacccaacattaatactttgtcctttaggaagagtagtgtgatcatcaccaatatccaacgccttcttgcttgcaacacggtatatttgagaaagcacttcagtgaaagcattctcaacgttcaaagcttcaagtgcagatgtctccataaagaatgtgttctctctctctgcaaaggctttagcatcttcagttgaaacagctcttaggtgacgtagatccgctttattcccaacaagcatgatcacaatgttggcctctgtgtggtctctaagctccttcaaccatctctcaacgttctcaaatgtcacatgccgtgtaacatcataaacaagcaaagccccaacagctcctcgatagtatgcgcttgtgattgctcggtatctgaagttccaacaaaaacaaaatcaatacatacacatgatcaaacc

SEQ ID NO: 28932 - DNA, 1470 bp, Arabidopsis thaliana landsberg
cataatattctttagtaaattagcaatgagaccacagatgtgtacttttaaaacatgccatagttagatcgagctattaataaatcacgtatgtatatcctatgatcgaacgtataaaagtacactccaaaaaccatgttatagcctaatccatcaaatgtataaaatatgcataatagttggtcaggcccctatgtgaaatacatgaggacgtttgttggaaaatgtcaaaattttaacacaaccaaaaggaaaagtaaagcacataaatatggaatccacgacgcatccactttctttctcttccttgctattatttcctcatctgcttataaactttacctacctacaattcctaattcctaattgcccaatttacaatctcgatatcgaaatttgttttttaatatggtgcagtaagttaataataatcgaaatgttttatgagattacaaatgcatctacgtggcttgatatgaaatacgtaagcaaaaaactcttaaacataacattttggagttattgcaaaacaatcccaataatttgtatcttcccaagatatcctcatttctttcgcataaaatatggaaaactacgaatgcgatcagtggtgcacatgtaataagtttaaaaattattatccttttaagaagcaaaacaaacaacatgtgtataaagaagagttcaacaactaaatacctctaccatctacaaatcaaacgaaggttaaaacaaaaacgataatcgaattaaattacatagttaaagttgttaaaatatcatgatattgatatccctaatcgagacatggtattgaattttgatattgacatcttgtgattaaaaatccgataatcttcagttcataacaaaaaaaaaatcctttgtcgaatcatagtaacatataaaaaacatattgaagtcgtctgttactttgttgattccgtctctattcgtccattagcaaattgagtaatgatgatgtttatgtacttttaatacctgacgtattagttccaaacttcacgtcgtgttaaataaaattagttggcaatccagtgagtcccactttcaatttgggccgagcacttggggggtcaaatgggccgggccatgtgtttatacgtaatccacataattaattacccacttcggaaatcaaaacctatagcaacattaggcggtttgggtttgtaatttctagcttttcaacaaagagtctaaaatcactaaggtcttaaggctaattgggtcttgaagactcaaagccgtaaataaacacacactgacacacaaaatctctactagtagagctatatgacacgaaacaccctacaatgctaatcacctcatccatagcacataggactgactgtttatttgtgtttacgttaaaagtttaaatcattctatacatagagataataatggttttgtaaaaaagtttgtaatactaatagatgaaataaa

SEQ ID NO: 28933 - DNA, 1323 bp, Arabidopsis thaliana landsberg
  unsure (1)..(1323): unsure at all n locations
aagtggagaaaaattggagctttaatccaacagaaaacataagcaaaccatccaaaactaaaattccgacaactagagacttaagataactgggtccaatatcgaattcaatatgagctaagaaatgaaaacccaaatttcaatttcagaagactagtataaaagagcagagaacagattcgttttgacccccaaaataaaaaaaaaacgaagagattcgtatttaccattcgcgacaaaatttcatagtactcatcttcgcagaatctttagataacgagcttttgaatgcttctttgatttcacaatcagtctcttcgtatctttggcgggatttgttcactcggacatgagagagaagaggtcaagctctagtaaagactaaagactgcgtagtggcaatcggatgtaatttcatgaactttctcgggcatttagacaataaatgcgtaaagcccatgggccggcccatatcagaatttaacttgtggggtagaaaaaaatacaaataaagaaatacgaagaggacaatacgaaataaatttgaccctttcttcattgaagactagtgtactttttcttacattaacaaccacatgcatatccccatgcacctttatatcattgtgaaaattattcgatattcattatataagttctgttctattaaaaatatgaaagaaattaagcacattatatactactaacttctgtcagattccaactgctgaattggtctgtcttttaactactcctgactctatagtgtataccgacacatctnnnnnnnnnnnnnnnnnnnnnnnnnnnnnnnnacaacatggtttatttgtgtgtttcctcttcattcattacaatatcattactactcttttgttcctttttattacaacttactaataatagccattagccagccaccttatgcaatcttatcccttatcacgtatatagtttagtccaaaacgttttgttttgctcaaataataattcatgcataaaaaacaacaaaaaacacacaattatacatgctgatcataaattgtattatgagaatttgttaatcatttggtatactaacattgcaattttacttgaatatttgccaatctacttcttttatatatacatacatttattgacgtacgtatgattaatttgacgagtacataatatgtaattgggttgttgaagtgcacatgcagtcatgcagtcacacatacatatatacgtgttatgtatgtgtatatcgctgaccctgtttctataaatatggacacaaaaacaaaaactttctaatatagtaccaactccattgaatgt

SEQ ID NO: 28934 - DNA, 2063 bp, Arabidopsis thaliana landsberg
gccattatatatgtgccaacggaagactttttttcttataacaaaaagactcttattcctaaaaagctacaattcagcgaaagactttaagtttgcttaaccttttctatattctttttgaattttcaaaactcataaaaccaatagtaattaaagtccatcggccgattgggtccagactattaaagttggatcggattaatttttaggcattaacaagaattatggtcataaaatgagttgtagtaaacacatctttgtgatcagaatgcaaatcccgtgagactttgtgcacgagagtacgtggtgctttatgacttgcacctttttcatattagctttaatacaaaattaattatatgacaagatttctactaaaataatatccaaaccgtcgattattgccacattttattagaaaacctctttttaaaaatgttttattaaacttttgtatatattgttgtcttcattatcctgcgcccatgctagcatgcaaattgcagagtctttctgataaaaatattctccttcacttttggattcagaaagctggagtatctaattatacataaactaattacaatctaatgatgaacataaacaataacttccaaaacaacacgtgacgaaggttcttgtaattgtgaaataacaatcatcatgttcgtaacgttccttgtagtattcttttcctgattcatactgatacatataataatatagtgtgaatattaaaaaataaaataagtatacgtatatatatgttgaacctcattgcgtgtcctctcacgaatctacttgctttgagatgcgtgcccatctcctaaaatacaatcggagctatgtctatcgttttcgatattccccggccgaaaccatcaaacgaatttttatcatcatcaaacaacttgataaaataagtgacacttgcgaaaattatttgatggagatcacgaatattagaccgtaaaatcaattaccaatatgcaagttacagattttttcttttatcaagttgaataaattaggcaagttggtcgcttataacacgttgatttctttacagatttatttcccacatctgaactattttagatgaatatttttaattcgatttaatactagttgaaaaaggaagtcaaaccttatccttgatttccaaaaaattaagttgaattatacataccattataccaactacgtagaggtagccgagctatagagtttttcaaacaaaaaaaacacgtaaaaattcacatataatatcttacaaatttacaaaattatcttacacattttcgtgtggggtctatcataattaaatggtatagtcatctttataaaccaccggttatgttaagagagaaaataaaaataaaaaaggggctcttcctaggaagatagatcttaaccatggttaacactcacggttcattattaaccatggttctaaaaatctaacctttaaaaaaccactttcgcttctcttcacattcgcatcattttgtatcatcccttgaaaacgttaaatgatcttctcctccgatcattagtctctttaatctttctcagcctcttcttgttcgtgatctctcttcctccggtaaaatttttaacgtcgatggtaattttaatatcagtacgagtgtaatcaacttcgtaactctgtcttttttttgtgttgtggttacaggaaaaagatgtcggccggtaacggaaatgctactaacggtgacggagggtttagtttccctaaaggaccggtgatgccgaagataacgaccggagcagcaaagagaggtagcggagtctgccacgacgatagtggtccgacggtgaatgccacaaccatcgatgagcttcattcgttacagaagaaacgttctgctcctaccacaccgatcaaccaaaacgccgtcgctgcttttgccgtcgtctccgaggaggagcgtcagaagattcagcttcaatctatcatgtccttataataacttcacatatacagattattcatacgttacttttgtttataacatagtttatatcgaattaaggaagat

SEQ ID NO: 28935 - DNA, 2491 bp, Arabidopsis thaliana landsberg
  unsure (1)..(2491): unsure at all n locations
tgactttacaagttcgtcttgtcacgatagttgaaaactaatctgcaacgaagaatatttcggttgccgtatcaaaatgcaacatgtatcgcgttaccaatagattacgctgttaatcttccttatgcgtaaagataaataattaactcgacacctaacttatattaattgagaactataaagactatgcaacatattttgtggtagataagaccataatattctctcagtttttttttttttgtagataaacgtataatttttggtttatagaaattagaatagtaatagaagatttatcctaactctaatatttttccttggtaattaagttccgaatgtaaatgctttattaattactatttatctaaaattagtaaatatataattttttagaatttttttcagccaaagtatcaaaaaatctctataaatctaatgaatattttatcttcttctaataataatatttttgccatgtgtattattagctttaaaagaaaatcttccaaatcagcaatcaaagaacttgtcaaacaactaaatcgccgttaccaagatttataaaaatcacccctttgttgctgagtgacctcgtccccgtcacgccttttttcttaaagaataatttaagaaaaagaaaacaatatctcgtcgtccttttcgactttctccgattgttcttaatattcctccaaactctctctcaatctccgtcaaaataatcactctctctttgttttttctcacaattctccgaacatgcgtttgctttctttattctctaataaacctagtaaactcttcttcttcgttactactatataatatagctgagagttttggaacctgagagaggttttacgtttttcttattttatttctctccatggggattctttgggagtcgtttctcttgttacttgtgtcaacgtttgctctgttcttagttaggatcctgttattcaaaactggattgatttacatggtcaagttatggcgtaggaagatcatcgactggtttcatgtttaccaattctacaaagtcccagaattcaacgacaacgttcaagagaatcatctctaccaaaaagtctacatgtatctaaattccttaagctcgatcgagaattctgatttcacgaacctcttcaccgggaaaaagtccaacgaaatcatcctccggttagatcggaaccaagtcgttggcgacgagtttctcggcgctagagtttgttggattaacggagaagacgaagatggagcgaggaatttcgttttgaagattcgtaaagctgacaaacggagaattctcggttcttatctccagcatatacatacagtatctgatgagcttgaacagaggaacacagagcttaagctttnnnnnnnnnnnnnnnnnnnnnnnnnnnnnnntaagaagaagaagaagaacggacggtggagatcgattccgtttgatcatccttgtaccttcgacaacatcgccatggaaacggatctgaagaacaaagtcaaatctgatctcgaatctttcctcaaaggtaaacagtattataatcgtctgggccgtgtttggaaacggagttatctcttatacggatcttccggtaccggaaaatcaagcttcgtcgcagcaatggcgaatttcttagattacgatgtttacgatatagatctctccaaagtagttgatgattcagatcttaagatgcttctgttacaaaccagaggcaaatcagtgatcgtgatcgaagatctagatcgacacctctcgacgaaatcaacggctgtgaatttatctgggattttgaatttcactgatagtattctcagctcttgcaccgccgatgaacggatcatggtgtttacgatgactgggaaagaacaaattgacccggctatgcttcgaccgggtcgggtcgacgtacacattcattttcccttatgtgatttcacggcgtttaaaacgctcgctaataactacttaggtgttaaagagcacaagcttttctctcaagttgaaggaatatttcaaaacggtgcgtctttgagtcccgccgagatcggagagttgatgatcgcgaatcgtaactcgccgactcgtgcattgaagcatgtcatcaatgctttgcagactgatggtgatcggagaggaactggacgacgtttgcttttagaaaatggttcgagaaagtcgacgtcggaggatgtttctgatgatatgagtggttcgctttgcggcggtggcggaggaagttcgccggcggtgaaggagtttaggaagttgtatgggttgttgagaattaaaagtagtagaaaatctggatcgttcgatgtggctcgagagatgagggacggctagtgattaaaaagtttttaaaagtcagcagccacgtgggttggttttattggttgagagagagtctggacaaaaagcgtagactagagaaagttgttactctgtttttattgtttttgggttttagtt

SEQ ID NO: 28936 - DNA, 751 bp, Arabidopsis thaliana landsberg
attttaaccaagtatcaatacaaggaagatgaaacgcgtggttacatttcggcaacaatctcaaactctcgttttcttcaaactcactcaaacaaacagagcaatctgaaccatcaacgaatccatctccacttttatacttataaacagtgattgatttaatcatggactcattgagtccatctccattcgtggagattctttgcgtggaggagaagaaaccctcaccgttatgatttaggttaagagtttctgaagaggaggtttggtggtggcgatgacagtattttgagatgagagtgtagtagctgacgaggatgagagcgctggttaagataccgatgagagcgatgaggagaggagagaaactggaggaggaggaggaagtgtcgacgcccaggaataaagaaggaggaggaggagggaagattaggtaacaccattgaggacagtatatgttgcaaattccttgagaacaatcattgtatgaatcgtatggtgaccatgggttagggtttgccgacattctgattggatgttaatggggtttttgtgttgcagaagcagataaagagaatgatgcacatgacaagggagagagaggagatggtgtgcagtaaccaaactttttcttgcttttcatagcattgatggcttagccaaagaagatatgagactttgaattagtatctatgacaacgcaacactacttaggctttacggatacgattgacgattaagtttatacact

SEQ ID NO: 28937 - DNA, 1178 bp, Arabidopsis thaliana landsberg
  unsure (1)..(1178): unsure at all n locations
acaaaacaaaaatgaaaaatcgtataacgtgaatgttatactactgtagttgaaatgaaatgaaaatattctttttccatgtaggtagtcggtaaattgtactgtatttctgaccacaactttaatagatacgtcgaggagtaaatttgtcatccacgtggcccatgttatagtattccaccttcgtcaacacttcaccaaccatttttttatgccttgaaatagactaaaccctctctctctttttatttcgtcaacactaaaacacttctaatgttacgttctcatttctcaaaataaaatcaaaaaaaaaaaaaatgaactccatttattttactaatgtattaatttatctttaaaaaaatggaagcataaagagaaagctaaagaataaaaatgaataaagcaaattctacacctttattcatactagaaataaaaatttgataaagtagaacattcactataaacatcattcaattagtattaacaccatcatgcaaaagctttcatgaacatatatatttattcattatctcctctaataataccaattaactcgaaataaaaaaatagacacttaccagacaaaagcagagcccaaagaaaaaggagagagacacttgacacctccatcttcttccttgctctctctctctatctttctccaacaatcaaataatgggttcaacaggaaaccctaatccatggggtacaacatacgattcatacagagactgttctcaaggagtatgcagtgtctattgccctcaatggtgttacgtcatcttccctcctcctccttccttctatctcgacgacgaagacgactcttcctcctctgatttctctcctctcctcatcgctctcatcggaatcctcgctagcgccttcatcctcgtcagctactacactctcatctccaaatactgccaccggcgtcgccacaactcctcctctacctccgccgcagctataaacagaatctcatcagactacacctggcaaggaaccaacaacaacaacaacggagctacgaatccgaatcaaacgattggtggtggtggtgatggactcnatgaatctctgattaaatcgataactgtttacaaatacagaaagatggatggatttgttgaatcttcagattgctctgtttgtttaagccagtttcaaga

SEQ ID NO: 28938 - DNA, 1157 bp, Arabidopsis thaliana landsberg
aataatttagcacatgattttttatttttgagattgttttttaccatatagggtagaaaatcattttttatcttctgtatcggagctaacagatccagatgcagaggtggtatctttgtcaccaagaacgttactagaatcagatcggtacgtgtgtgagatctgcaaccaagggtttcagagagatcagaatctacagatgcatagaagacgacataaagtgccatggaagcttctgaagagagacaagaaggatgaggaagtgaggaagagagtctacgtgtgtcctgagccaacatgtctccaccatgacccgtgccacgctcttggagatctggtcggaatcaaaaagcacttccgccgtaaacacagtgtccacaagcaatgggtttgcgagagatgctccaaaggctatgcagttcaatctgactacaaagcccatctcatgacctgcggttcacgcggtcactcctgcgactgtggccggttttctccaggtctgtctcatatatcatcatctctaactgtgtgtatatctataaaaaaaagttttgttaactttagtcgatgttttgtggaaaaccctagctattctatcggctctatactgaggattagtttctcttgggttctccaaatcttttaattttctttgaaattttatttatacaatttaactttctaggtaagattataattggaaatatggaatccttaaactaaaccaaagaatgttttataggatggtgtgtaatgttgttacattacaggtatattttatctataaggcatatagatttgtttttttttaatgtgcatatatagattttgacacagcctaccaatagaagctcagcttgactgttgccagattattttaatttacatatgaagtcacgttgatacccattatggatttccattaccaacactttgttctattttgttaatacacaaactaaaaagtcttataatcacataatacctttccaaagatatctaagtccataactcaattttctattattgctttttcatttgattacgtacgtacaccatcaaacactattgtgttttgttttcaattcttttggttatcaaaaactagctcattcttaattcttctcttgttcttttttcagggttgagagtttcat

SEQ ID NO: 28939 - DNA, 1475 bp, Arabidopsis thaliana landsberg
cgaaccaatcacacattacctgaattaacttcatcttcttgacatgtcgttgttggaacggcttattgttacattcactcccacacttgcaacttgaggaacagcttgagaatagcatcctaacacaaaagataaggttttttccagttcaatatacttaaacaagcagataattatggtcttatatcaatgaaatgctgaaatagatagatcaagaaaagtgaaataaaaacagaggcatacccacaatggcaattactcccacagacagttgaagaagaaccaggagacgaggaggagcaagaacagaagattccatcatcttcaaccctccttttgactttcttcgtcaagtatatatctttaacaagtcaaggccaaaacaaatcttgatcaagattaaatctgcaaaatgaaacaaaaccaaaattgcaattgcaataaggatactgcgcctgataaagatataaggagtaggttttcctttattcaaccactccggtaactcgaattcttcagattctccaatctgattcaatagcttgtcgaacacttgccctaagtgattccggtccgaaatctgagaaaaatatctggaaatttcagatatcaagaataaagttaaaatttccatgaagcggagattgtttttgaacagacctttttgctggctggcatgtcgaaagaatctaaaagaagctctaaaaaccagagaataagcaagatttgagcgtcgacctattgaggtaacaccaagttcgatgaaactaagaaaagaagatggctaaaactagtacgtctctctgttgtttcggaattcgaagtttctcaaccctaattattacttcttgttgttgttgaagaagaagaactgaagaagtaacaatggcggatctgagacagtaagaaagaagaaagagcggcagttgctttttttttaatctttttttctctttgataattacgcttcagaaataaatggcttcagggtaaaaccgtaacttgactcgatatgatatgttggcccagtgtcaatatgggcttttttatccgatccaatttttttaactagcccaaattagctgagcttaattaacccaaactaatattgttgctttatgtcgtttatatgtcatagccttttagccgtaatcactaatcacattaatagcaagcagcagcaacattttaattttgtgtactgttaacatgttgatggatgtgttaacaaaaaaattaggaacctggagaaaagtaaagtaaaatactatcaatgtcattgttaatataatattcgaacgttttatccgaagtaaacaggtaaatcggagagtatttatttttttccacgtaaaaaaatggtaaacaagtgtaatcataattcataaccctgattatgtgaagtttaattaataattaaacgatatagattgtcattagttgaaagcgaaagatttgaagaaggtaaaaagaag

SEQ ID NO: 28940 - DNA, 1066 bp, Arabidopsis thaliana landsberg
attctactctaatcccggtgagagaatcgctatatcggaagttgagattatcgacgtttttggtaatccctagcctacaccgccggattctagtattcctacaccgtatccggtttatccgtcggagtcagtgagcggcaatgactatgaatcgccgatcagtgaggttctttctcgaatggggattaaattgaagagggagtggtgggtatcttgtgtttcaggacttgaaacttcaattccacaattttcctacctcgatgttgcagctaaagctaagcattgcttcgagcagtttatgttttccgatatgaatttatgcggaggtggtgttcttcctccgaacgttgcgtctatgaatcgtatagaactcgctggtccgtttgttctgcaggttatttgattgtttggtttttacactgtatatataattgcgcaatgtgtgattttggctgaacatttttgcttaaatttttcaaatttaggttgatgagattgttaacattggctgcccactcaaagggaggtatgagaatgctaatgcagggcttaagaggtgccttaagctgtctatgacagatggtgttcaacgcgtttttggtatggaatacaggcctattaaagatcttcaagtcttggctcctgctggtttaaaggtgtgtgtttcttgttgaggattgtagttgtgaaaattgtatgaatatttgttctaaggccattgtacagcctttaagattatttatacatgtctgtgtttttagtacaagtactgacaagaacagctaaatgcagattgttgtatctagtgtacaagttcggcatgggcttttaatgctagtacctgagattgtagaagttttaggagggatggttgaagaactagaagaagcacgaaagcgtctggttgttgaagtaaacaaacctccaagaggaaaaaggttagatttattcaaagattggtttacattggtcaaaattcgatatttctccagcttttgcttgtccccctcacttcatattcgaaattcgtgtcatgatgtatgtctcttcagatgggaagattatt

SEQ ID NO: 28941 - DNA, 1947 bp, Arabidopsis thaliana landsberg
  unsure (1)..(1947): unsure at all n locations
agggcccaccgcacctccccactggtcgctctcagcctgagagctgcttccttcacctttctcgcggatcatctgctcatgtgttgtcggagaatcctcttgacataactcatcctcccgcttcctttttcccctctttattgccaacgcttcctgattgcgaacagtctgctccataatttcatcacttggatgaagtacatccgagtacctctggtaactttcattgtctggtatgtcgcccgtagcattctcaaaaatggggatgggattgaacaactcattagtatccatctctccacggtacatgctgtatgcaccccccacctcttgataatcagcataatcatccatggcgttgtgatcccgatcaatgtcactaagaacttcagcatcctctggtgcattcacgactggaataatttcctctgcatcactattcttctcttcagggcctatttcacgaatgaccatagcttggtttggaggaccctgctgtggcatgtcatcatcatcttcatcccccgagtcatgatcacctccaccattgaggattaggcaagcgcctgaatcatgagttagcatgccgcatacctcacagaagccccaaagcctttcataacggaaccttaacagagtattgacgccttcctgaaattggaagttgcgttgaaatcaaagaggattgtcaacattccaattgatctgaacccgcacaaattccactcttgctactgcctcaacatcgtaatccacatccatgacatcacctatcgcacgcccaatcgcttcaattacatcacgactgagaaattggtatggtatgcccctgatttggatccagaaaggaatggtgttgagcggaggagcatttgccattggagtccatcgttgtaagatcaacatacgatcattgaaagcccacgggcctcgacgaaccaccatctccaaggattcttcagaggggaagatgaattggaattgatttccaggaattaggcggccatgaacaagtctcgattgaccccatacacgaggcattgaggcaacaatggagcgcaagttttgtcttcttggcatcacaggcctgcccaacaaaatgaatcgattgtccaccgctgcctgagccaccatcgccgccggaatcgttactgatgcatcatcaacacccagattgatgtcttgaacagcccgtctcagattatcagccattttcagaagtgttaagtagaagcgaaaaggatatagaagagtaagagggattgtcgaaattgcgtgtggattgaatggatatccagattttccataatagagaaggaagggattcataaacgccaaaggagcatcgcgttgggatcgagggatcaacgtggagatacccgctaggatagtggctttctaacgacccacttcgccggcgaaatcgagaacaaccgtcacccaagtgacgagtaaccgcttaaaagcatttgtagtcgccattcttcacgtcttttgtttaatttattaatatatttttcctttttttcacctatttctaactttattcacatgaaaattcataaataaagaactactcctttttgttcaaaataaaataagataactactccttaaatttatctagatgtcatggaatttagtaatttacaaaagactgaaaagaacccacgcatagagctatcaagcgagccagaagtcttcgggctcagcccaaatagtaccatatcggagcaggattggacatcatttgttaggcctataaaatagcggaccttgcagacatgctcagacgagttgtaggttttaacgggttttgttaatggatttgcggaccggtctgcagactacaaatatttaataaaaataaatctaagatattaatacataaacacttttattatattnttaaaataaaaatataaaaaatgtgatagtggtatgaaa

SEQ ID NO: 28942 - DNA, 5426 bp, Arabidopsis thaliana landsberg
  unsure (1)..(5426): unsure at all n locations
atttatatcccagtaatctaccgttatctccagtgctaaactgagaattaaacgagactccattgccaaaaatggcgagcattgtgagggcaattcccagaacaaattcaagtttcggcaactcagatacaaaaaaaactccaaatctccatggaaatttgtcagcacaatcctcaattttgtaaggaaacacaaccactccccaaaacactcaccttgagaagatccagcgaatcggcggccatacgtcctttactaggaagaccaagacgaatctggtcacgctcaacgacaacagcggccggagcaggagctggagaggaaccgtatgttgcgacggagctttgaacggtggagacacaagaagtaaccaatctgagacatctccgactaggtacgatgacggagaaagcggaggaaggaggcggagataggataggtgttgaagatgggaaggaggaagaagaagggtcttgttgcaaatccgtaaggagatggagcgacatcgatgtgtggcttttggagagtgtaatggtgatttctaataccacatattgaattatttcatgactaacactcacctgtctttgattttgggagaggcagatactgactttaatataattgatgcgattataacacttagggcttatccatgcctatgtttaatttttttgggggctagatgcatattagtggaatcttgatgagcaaaaacggctatgaatatatatatgaatgtgaaatcctgaattggcgctaagatttatatatgtgttgcatgtattattgataagcttgtgtcctatagaactctctggtatccctcttgttgatgtacgaatcacacaagtatgttttgttcagttgaattgtttgactttactctctatattgtttcttcttgctcggaaatcatgaccaacgaaaacggtacaacaactactgtcgttgctatgcgtgtagaagactccacattctctatttcgcctaataatccaggaggcatgtgatctgtctgttcttttaacatgagaaaactagaaagaatgggtctgctcttcgagctaagaagaaaatggcaagaattcaaaactaacagctaaaatcacaaattcaaaatcatagacttgtgtggagtccatggttattggatggttacgtaggtctatcatacctcttggttgctccactgttctgtttctcatttatgcacacgagctggtgttgtccactactcataaggtaaaatattagacaaaccaaactaaaaatctataaaataaattgtaaaacaggacatcatctgataaaagaaaaacttttatttgcgctcaagctcgaatgccctatatctcttagagacgcgatcaacaccaacttaaatttatgtcaatggacgtcaaatttattaccttcacactgaaagatttaccattcgatcaatcctacgttggttaagcttatatcttcgatattgacagtaatatgaaaaagtgtggtgtcatgcgattggactgttcgatttacacatttgcataatttacaatttattttctttcatttgtggtggtaatttgaacgatacgttataattaaaaattttctcttcccatgtatttgtgaaccacatttgcaactgtaaacggtacaaaatcccgaagtatgactgtcaactgcttttcattttttttttaaaaagaaactatatgagtatcttttgaatgaattatataataggggttacgttacctattaaatattaatacgattctttctctaaccacacttatctccctcatatcgtccaatccacaaaccctacttgtctatcactttttttttttttaatattaattcattcttttgaatttttcacgttttcaaaaataatttcaagtattaaaaatttaatgaaagtcacaacaaaaaggataatgaagctcatggttcaggccttcaagaatctaataatcaaggctcctgctcacaaacaggaatttactctccatctgagttgacggtccacaccaaatcccaaaaatatgacggtccaaaatgttctccatatttgttttctgaaactttttgacagaattatatgaattggtttcatctacaaataaataccattctttctccaaatagaaactcatttcgagcatttataatgattggagaacagttttgtatcttcattctatttccgctgtactcaaatctacaccgttagtctcgtctgttccgcagtcgcattctgacaacacttgtaccattcgatccacaccgtccaattcattcttcaaatgttgcacaaatcctacacccacttccttttttctcaatttttaattctttctttcacgttttttctcataaagattccactaaaataagaaaagccaccacaaaaaaaaaaaaaaagcatggatcaggcctaagtgttaaaatggcatcaaaaatctaatagtcagaatctgcctctcccagagtgaaagtgtgttgtgtcttattccttatataattcattctcgggtctaaaagaaaccctttcactctcgaaaagccacacaacaatgtctctccttctccctacgaatttacaacaatacccttcttcttcctccttcccatcttcaacacctatcctatctccgcctccatccaccgctttctccgtcatcgtacctcgtcggagatgtctcagattggttacttcttgtgtctccaccgttcaaagctccgtcgcaacaacaggttcctctccagctcctgctccggccgctgttgtcgttgagcgggagcagattcgtcttggtcttcctagcaaaggacgcatggccgccgattcgctggatcttctaaggtcaaatatttgacattgcgattgttaatctcagatttaagtttttagctccacactcagcttgtatttagttcttagagactgagattattgatagagactgatttatgatttttatattagctctctctgattctgtgttcgtcattctctttcactatataatttgattccctgcccttttgaaaacttcaaatgggttctaaagaaaacttattttactatactttgttttgttgtgcttttagtgttaagttttggttaattagttggaacaagttgggatctttaactgatataaattggtttgatttgaatcctaggcatgtgaagtgttgtttgcgtttgatgatcgctttcttgaatagttgccaaagcttcatttgaactcttttactcactgacatgtttttttcccttacttttgagtgaattgttatctcatggcttgatttgacttttctcatttgtggtttcttttatgaaggactgtcaactgtttgttaaacaagtcaatcctaggcaatatgttgcacagattccccaggtatcgtttccaagcgaattcaaaaccatagtgtgttttgtggttttgtgtaccatgacttatgttggtatttttgtatgtccttcagttaccaaacactgaagtctggtttcaacggccaaaagatattgtcaggaagttactctcaggagatttggatctaggtatcgttggtcttgacacacttagtgaatatggtcaggtaagtgatgatcataaaaatattcttttgaagagctttgatatcatgttcaaaatgctggaattagcagtggtgatttttatcattatcattatgctggaaccagtttacttttattctctcatcattagtatgccatattgttgctttagcgtatagtgtttaaaatttaaagtttccctttgattgtctctgataagcccccttgcatcataatttagatgtttgaattttctttctaggaaaatgaagatcttatcattgtccatgaagctctcaactttggagactgtcacctgtctattgcggtatgctttaatctattgtggttgaggtcctcaggtcattaccgtggatggttttctgattgtatctcaaatggtcacagattccaaactatgggatatttgagaatataaattctctgaaggagctagcgcaaatgcctcaatggagtgaagagagacccttacgcttagctactggcttcacttatgtatgatgagttacagattcttctttggtgcgctgttgtcatctaatttctctcagagtccatttcgcttcaacataatatttgggaatgattcaactggtttttgcagctcggccccaaatttatgaaagaaaatggcataaagcatgtggtgttttcaactgcagacggagcactggaggcagctccagcggtgagattttcaacgaaaagcttaacatttggcattaagttgcttgtattcttttctaaaaacaagtgttaaactgatatgctctgtggaggataatgttgtcagcttgtagtgtcctgatttcatatcttactgtgccttaccagcataatctgttgacacatatgctcttgttaattagatggggatagctgatgccattttagaccttgtgagcagtgggacaacccttaaagagaacaacttaaaagaaattgaaggaggggttgtgctggaaagtcaggtatgacatgaagatctttggaattgattattttttcgcacttggcaaccggtgtaccaatttttttttctttttacgtactatcaggctgcactagtggcgagtagaagggcattgactgagagaaaaggagcactagaaacagtgcatgagattctcgagagattagaggctcatttgaaggcaaatggtcaattcactgtacgtgcatattaattgtgatgtttcaccttatttctacttttgctttctttcatccgatgttttcactccaggtggttgcaaacatgagaggaacggatgctgaagaagtggctgaacgtgtgaaaacccaaccatcactatcaggattgcaggtaaagtttgataacatttggatatctttcgatgtagttccactgagtttgtaggtgatcgttcagacgattgtgcttattttgtgatgtgcacggaccaacaataagtccagtttattgtaaacgagatggaaaagtaacaattgagtactatgccattgtgatatgtgtaccaaaaaaagcgctttatgagtccgtgcagcaactgagagcggttagtaatgatatccacctttgcttccacctcccccttttactctaagattgtcattatttaagggatttacaaatacatggcaaaccacattgtttttggtactgagatcagtcttttgtctcaaatctcggatgtgttcttaagtaatgtgtcacatgtgattgcaggtgggaggaagtggggtactagtttctcctgtaacatacatttntgatgaggagactcccagatggagtcagcttctgagtaaccttggnctttgatgc

SEQ ID NO: 28943 - DNA, 1129 bp, Arabidopsis thaliana landsberg
ctgagtttaacctctggagtgtgacggatagatctcaaaaatttagtgaagaatacacaccttaatttatttaatcattatatataatccatcttgcctaaaatatacaaataaaactattcatttaatttagtgcagaggtaactaacatattaattaaataaataaaaacaatgtaatgtcgaggatggtgacgactgacgagtgaggagaccaaagattccgcgtcggtgcgatcaattgacaaatccaaacttgtttttatttcacattcacaccctttattttcgtttattttatgtttcacaccccttattctttttcttcttttatgggctttgttacaacaggctgtttaatatatgggccatatgaaagcctaatctaattaaacgaaaaacggcacgctgttctgaattcaaaacatcaaattaaacagttcaacaaactccgtcgaatctgtaagaaactctggaatttctgcaacaatgcaagcacaagtttcactgagagaacaaagtagcacctcagggtctgtaaaataaaagtcattacaaaaaggttaccttgagagatctatccagatcatgcaaaactagcttaagagttgtcaataactaatgaagtaagaagcttagttataaatccatgattgatcttcaacgagaacaactatgaaagatggattaacttcacaaacacttcaagataagggttcaaagtttaacatgatttatttcacaaaacaaaaggaatatatacaacttaaacattatcacattcacgataagtgcttaccataaacaaagtggttcaaggatcttgcctctgaaaccatgtctattaacttgaagaatagatcacttcaaatattcaattaactatatctacccggcaacacgttccttgccaaaccagtatcgcccctttctgagctcttatgtctttcatactcaagatcatcagtaggcagctcataccgacaaaccgggcaagtattccttatccccaaccaaggtatgatacactctccatgatagaaatgactacaaggaagcctccttactttctcctccactaacatttcatctttgcataccgcacaaacattgttccctttgtctaactc

SEQ ID NO: 28944 - DNA, 1749 bp, Arabidopsis thaliana landsberg
aaatataatcgtgaatgacgtggttttagcaatgcaatatattgaaataattttggcaacataagtaggttatttttttaattttttttaatcaattttgatgtagttttgaagatgtccaaataaaaacattgagcacagtggagactttgagacataatttgtgcggcttatcataatttttataaacatgaattcatagaaactaactaaattaataaatatatatatatgaaatgtattaaaataaaaatcaaagatttgcggtattctaaatactagaattataaattttgttggcaaaaatactcactatttacaacaataaatctcaatagggaacctaaacaatatataaacaaaacaattgataaataaatacttttacatgattctgaaaaaaataattctgaaagatatgataatgtaacaaaatttaatgtattaattataagatttacaaaaagtaaatatgaattgttaactaaaatttaaagattaaccttatttttgaaatcaaattttaaatataaaaactaagcatgcagggtggctactaatctgatgggcttagcaagacgaaatctgacatatagaatgtacatgcactcctggtcagtctgtcgcaatctcacaaaaattagtgcctatcgcgggctggctaaagtggatgcgggctgaccagtttgacacctctaatattattattacgtacttttcgtatagtacttacagttttaatataaaaatctctgatattaaaatcgaaaattttctttttaacacggagtaatatattccaaagtaacttttgcaaatacataccatttttaaaatataatcacaagtttaaaatcacaccataaacactcattaaaaatttctccgcgctgtagcgcggatccgatcctagtttcgcattaaaaaaacagcatattattattaaagatactctcccaatattttagttatttttataaatacttaaaattttccctcacaataaaaaaaacattattaatcgtctagagagaaagccctagaatttcacaacaagctccatagagagaagggatcgatcatgttaaggcaaacaactaaaagagcctttttagggctcgcttctcaaaatcccacaccgttccctgtcgtgtctcgattataccatccaaatgtcatcgaccattatgacaatccccgtaacgttggatcatttgataagaatgatcctaacgttggtacgggattggtcggagctcctcaatgtggagatgttatgaagcttcaggttaagtttgatggttctggtcaaatcattgatgctaaattcaagacctttggttgtggttctgccatagcagcttcttccgtcggtatggtaccttcttatgtgatattgtgatcgatttgtttctctaatcctgaaatctttaaattaattgattcgcttacatggtttacgtaatcgcgttataaatcatataggtattagagaggtctctgactatttagcagcttttttttgtaaattagtgtatgatttggtgaaatcaattagaagctctccactcaaatgttagtttcataagttcatacgttttgcgatgtttgatataagcttgctaattattcttagctactgaatgggtcaagggaaaatccgtggaggaagtcttgaccataaagaactcgtaagtgccttctttttgtggtttcattatttcaataaaagtcttaacgatatgatga

SEQ ID NO: 28945 - DNA, 2064 bp, Arabidopsis thaliana landsberg
  unsure (1)..(2064): unsure at all n locations
ggtataaatccatcttctctctcaccaatgcagtgaaaatttcttaatgttatttatgactcaatagttactgtaaatcaaaccaaactttggattctgacacactgtttcttccatgggattgtagcacgattcttgcttgctgcgaggacgggactatatggcgctgggacgtgattaccaagtagcggtctgagtcttgtaggaattgatgaattaggagtgcgaagaaatgagatatccattcttttattgtaattctgatcatgttgctactccctgagaccttgagatgctctttgtagccttgttaacgtccacccttgtaccacagtgtataccctttctggagattttgtcttattctcttagttcaatacacaaggctgtatcctggagctttattgcaggaaccactctctttcataagctttctagtattcaaagcattgtcccatgctccattagctgcatacacactggccaaattgatgtaattgactggtttcctcggttccatactcagaagctgcgtggctgctactttactgagctgcacattcccatggcgcctgcatgcatcaagaaaagctccccatgttgatgagctaagacttacaataccctctttacttcttatcagtgcataagcttcttccaagtagccactgcgcgcaagcatatctatgatgcaagataagtgctcttctcgagcttcgattccgtgcttgttgatcattgtgtcgtaaatcttccagcctagttcggtttgtcctgtatgactacaagcagagaggagagaaagacatgtaacgtcattccgttggatcctttcatgctccattctgggatgagatcaattgctttctcaaaattcccatgtcttccatatcctgcaatcaaagaggtccatgatctcacatctttctctttcatctcttcgaaagccaggactgcatcctcgatttccccagactttgcatacatatctatcagcgaattccccaaagcaacatcgaatctgatttgggaagattttaaggcaaaaccatggatctgtcttccaatggttacagatgcaatggtggtgcatattttaagcatcgaggatactacaacttcgtccatctttgttttcatccgtatcatatctttgaagatatcaaaggcatcacttgtgcagttgttctgctgtgaaaaacctgtaattagagcagtgcaagatagtaagtctcttttctttgtgccctcgtgcagtttccaagcattggcaaggctaccacacttcacatatgcattaaccagagacctaattagtgcacttgatctcccaaaacccagcttgatcgctaatccatgtaattcactgactatttcaagacacttaacgacaatagaagctctcaagaggcttccaaaggtgaagcagtctggcttcttccctaacacataacaacacaagaagctatataaccaaactgagtcacataagttttgaaatatgtacgaagaattgtattaagtagttcaccttccgtgagcatcaactgaaacagactaaacgaagtatctgcacaagcattggcggtgtatccatcgatcatagcattccaagaaaccaaatccctttctttcattgaatcaaactgaagacgagcttcctccatctttccacacctggcataaagagaaagcaatgcacttctcacaattaagttccctgcacaattccctttctccacactaccatgtatctgcatcccttctttcagacaccccaaatctttacacgacttcaaaacactcccataagtgaactgattagccttaacatcttcccggtgcatctctttaaacaacaacaacgcgtccgggtgatatccacatcgagaaacctncgagatcatagctgtccaagaaaccacatctctcttagaaattctatcgaacagtttacgtgcatgtttcacatctccctgttttaagtacaaatctatcaacatgtccttcactggagattggagcagaaccccatttgtatcgaatcccatggatcaacaatag

SEQ ID NO: 28946 - DNA, 1613 bp, Arabidopsis thaliana landsberg
  unsure (1)..(1613): unsure at all n locations
gagaaaacagttgacacaacaatcaaaccatctaaagaggtttgaaattacctaacatgcagttttatcataaattccagcgtggcaaatgtctgcatttttaccatagatgttggaggttgagaaagcaaaactctttctacataaaatccctaacaatgtgccatctgaagagcttgagcaagttctttctggaaagtttacacttgatgtgaaggttgagaaatcaaaaccatgtactttctctaagtctctcgaacatagaacctttctctgacctcagctatttttcttttggcagcaagcaaaaacacagggacgttactattgtgcatttgctcttttccatagttcagaagacgcagatcaagcatttgaacacattgatggaatcgaaatgacggtataattttagtatctctgcttttggatccgcaactatcttgatcgatagtgaaataagtttgtgtgttatgtttttttttttaggattcattgggtttgccacaaaaagtggtcatcattaagctgagttcaggatcaagagctagtatatatgtccgtaaaatggttcaagatgaatgatgcaacctaggattagattaactattcaatgaattgttttttcagatatttgaacaatcaatggcaaaattcaatgactagtttttttttttataatttgcaattgtttcttttataatgggaaacagagacaatatacttgtgtgtgtatgataagtgtgataaaatctgagtcttcatgatcagtcgctttcatagtcttcttcctcatctccaaaggagaagaccgatgcatctgcagcaatagctttgatatcactaactgctaatgagttgtttggtattggattataatgacccgaggacgatgaacttgtgacacttctgtttgcggaagggtcatctctctttggtggctcattgatctgatgaggtttactagttgtgtgcattgagcttgcggttttctcgttagttgaataagactgagagtttccttcctcttccccatcactgtcagagaatacatcgtcgtctttctcattagacttaagtttgctggaatcagcactggagctgctttgagattgttgttgggtggaatcagatttggactttgttggttgtgaattgtcgggttctatcattacgatctcgacatggaaacccggtgcaggcagttttctctgcaaaaaccgccagggatgaagcaaccaggtttgtttcttagatcttataaggctatgaaaatttcttttaccttgtcaaagccatcaaagtcactgcctttcagcattgttctgttatcagtcagtgtagtatttagccaactgcgtgcagaaaacagtaaaagttagtgaatttgtcgatttggaagatgtctgtgaaggaagaagagagtttaccagtagaaatctccatcgctatcttgaaagtnnnnnnnnnnnnnnnnnnnnaattctgttagaccagcttcaccaggtattgcaaagacaaccactccctttttgggtgcctttatccaaaaatcttcaggctataacccacaaacacaagtttatacgtcaagacgagttgcggttataaca

SEQ ID NO: 28947 - DNA, 1995 bp, Arabidopsis thaliana landsberg
tatgtaacatttagtcgctgaaaccggtcttaactagaatcaactccctgagatggagaaaacaagtgaattcaagattgcaactgagagaggtgattaacatttgattatttatctcttattagccaaaaacttacaaacttaaccatccaccttaaagaccaaaccaggccaagaactatgcctagagaaaaaacagaggacataaacagagtcttgattgtaaagttaatcacagagacgctctatcggttcattgcttttcgctgctaacatcatctccctgtctttctgaacttgttccctctgcagcttcagtctatctttcctttcttgccatccttcctctaataacctcaggaacttatccttaatagcaagcaaaggatctctatcaaccagctcctcgtctttataagcttctctcaacactgcagtcttgatccctccttttaacgacaagtagaatatacctgaatgacgagtgaaaacactcgagaacgcgtttgaaaaccggaactcatcgcagaacttgccaagtgtaggcacagggactcttttcaacagtgacagagaaagcaattcgtgcacaacaccaacagttcgtttctccatttccttagaagcttggtctaaatgagacacatcctcatatggtgatatgtagtcttgctctaaccaatccctagtccactctctcatctccttccttaggaaaaaaccagacggcaatttcacattgtaattgggtcgaatccggacaccggttttaagggtctcgtcttctgctctcagctcaatcttcgatttggcgaaatcagggttccaagagactagctcaagaaaggacttaccttcttcaggtaaaccggttagcctgaagtaattagggtatttctgaaccaatttcatcagaaaatcgttcggaaatccgaaatctctcttcacatgaaccagtttatctgcactgataaccttatctttagccatcatcagcaatttgcagagcttggaaacaagtaaaggctcattctcagagtaaatcctctgctcttcgtcgaggaaagctctgagacgaggcgtggggcggaggaattggacgggatcggacttgggtttgatccgatcgtagtagatctcgaacagggaagggttcatttcaacaaagctcttagctttgaaagtgagacgtagcctctcgcgccgtttttcgaggtatctgagaggaatgacttgacctggctcgttcaggacttctttcacaacccgagcacagagcttgtaacgcttgtcctgctcgatggcttcgtctagcctcgtgtctttcttccataccactttcaggctcgagatccatcggatttgaatccctaaactatgttctttggcatgtttcagagatttgatgatttcgtaagaaatggttaagtttctgagcaccattcctgatttgatcttagcagaaattagggtttttcgccggagcgtgagaaagaaatatgcctttaaaccctgaaagaccagaactacaagatcaccacgcgtgttaagagcaagtttaaaccacgcgcctcgtttttgaactttttgtttattaaggcaaatgtttttagcaccaatcaagaagacaacaccatattgtggtcttttttgttcttattagtatctctatttacaaaacagaacttccgattgatgaccaaatgacagtaggtatcgatattttcgatgattacaattaaaatttacattatggtatatacgtttaattaaatagctagttaattagtttggaactgaactaatacataaccaagaagaaaggaatttggtgattgattatatcatatgtatatggatcaatcatgggaggagagaagaaagacagcacatttccagacgatgtaaagacgagccctttgctcctttatctgcttcgaacatcttttccatgtcctaaccttggttacactagtgcagcatctcaatactact

SEQ ID NO: 28948 - DNA, 2590 bp, Arabidopsis thaliana landsberg
tgttattcctgaaatgggattagtaccttttgccaattcagatatgtgcaacatgggccatgactatgtctaatggatgatactgtgttgctaggacaacatttgcattatggaggcacatttttggtccaacatagctgtgccacaatatctatgctgaattgcgctgtctagataagacgttgtcgattcgatcttctccggagatttactgcaaaaaacttagggggagatttaactttaagaggatagaagcaaaatacctaagaaaacatggtaacgtggatttgcgataagaacgaatcgaagtttgacaatgatgttaaaacgatatggattttgtttgacgaaaaaaaaataaaaccttaataacgatttttttaccctttttatataaaaaataaaacaaatttaaattcttcgaataaacttaaattagttttacaaattttattactttctttcaacgataaaaaaaaatacaaaaaaggaaagtcccaactttgaagtaaatcccagaaacagattacaaaacgcaaaaagccgagaaaacgtgaagcccataagactatcgttgtcgtcttcctcaaaacccaactttctacttctggttactgccttcattaaacaactaccaccatctttctttctctctctctttctcgtttttttattttattaataatctttttttttttttttacttttgatctcttatcctttggacgattctcttcaatcggatttataagaatcaaccccattttgttcttcttccactttacttcttttttcctcattacacagtcttagtcacatcggtgaaaatatcaattaatattccccagaaagttgccaagatttacaagtagtagtacttgatatatcttaagcccactgttctgttttagcgaggaaaatgttaccggcgaagccgaccctgttcttgatatgtgtgtgttgtttgtcttttatccaaattaagcttttttcttcttttattttattccattataaaatatacaaatcgcccatactccgagacatgggcatacgtattcggggtggtcccattcatcgtcgtcgtctgtgttagggagcacaaataatagagaggcgtagcacaagagagaaggtggtgatcgaggccaagatttagaatttaactataacaaaaagcctctgacgagtgtgactagtcacaagatctgatcatggcttcttgaaacttcttcttcttctttcttctctttaaaggtacctactttccttttcccaaagtttcctcctttttttttctttttttaactatatatattgaagcttgcttcgattgatttctgctgggagcttaccagctagctactggtctcactcttcttactgaaattgattctaactttgaagttaatttcttaaagctatcctctgttgtcatcaataccctcttgttttctgcgatataaaggttttgtaggtctctttcgatctggcttgatgtgtgtttgttttactcaactttttatagtgtgtgatcatttatgagaagaagcatccaattaattaatctcatccttttatcgcttttaactcctacgattgctttccctgtggggactttattgttccttttgaaaggtatagctagctataaagactcttaagagtttattattgagtctactttatgtatgtagctgtgtttgaatcttgagaggctgatattagctcagatcctcgttttgttagtatttgtgtagtggatttaccctgttaactatcaactattatttgtgcgacttgttcatagtcaagatgttgttgattttggattgtaggatgacttataaaggaagtgttcatggaatctgactggttcagttactttgaaaatgataaatcattgaaccttggaatatgacacgatgattcctgcatctgttgcgtcctgtttctgggtttagctatgtattctcgatggagttagtcaagttcataactctttttactgtgtgtttgaaattctgaattggttcttagtgtttcaagtttatgcttatgcattcgcttgtatgactggtgatgaatgtttttgtgttcatatgattatggcatgaatgttttattccctcttttatcagagttttgcacttattttttgttgtcttgtctctgtgtcaggaaaaaaatgtcaggctctaggccgactcagtcctctgagggctcaaggcgatcaaggcacagcgctaggatcattgcgcagaccactgtagatgcgaaactccatgctgattttgaggagtcaggcagctcctttgattactcaacctcagtgcgtgtcactggcccggttgtggagaatcagccaccaaggtctgacaaagttaccacgacttatcttcatcatatacagaagggaaagctgattcagcccttcggttggttacttgccttggatgagaagaccttcaaagttattgcatacagcgagaatgcatctgagctgttgacaatggccagtcatgcagttcctagtgttggcgaacaccctgttctaggcattgggacagatataaggagtcttttcact

SEQ ID NO: 28949 - DNA, 2478 bp, Arabidopsis thaliana landsberg
  unsure (1)..(2478): unsure at all n locations
ctaaacacacaatcctttcgtctgtggaccttaccgagtccctttcctcctcaacaaacctggatcgggctatcacgttaccggcgagctttacgcggtttctcctcgcggtctctctcgtctcgacgagctcgaaggaatcagtcgcggtcattacatccggcaaccgatacgtctcgcggcggcggaggaagaagaagaagaagaaggagatctggaaacagaggcgccgtcgacgtgcgtggtggaggcgtattacgctcataagagttatgaggaagagctgtggaggaggaatagaggaagatcattcggcgcgtacacggaaaacgaagcgcgtggatatgtgaaacgcaatgataggcctcagcatcttagcttcttggatcatatccgtattttcgtatcttctccatgtgattgatttttatttctttcgtggtctctctccctctcgtcgcttttctatgtttgtttgtttttttctcgggacaaaagaaacaacaaaacacacaaacacaaactagttttacaacttgtaagggtcccaccagtccgtccgtccgtcgtctccgtatcgatttgattagagagattgttgggtgtaaaacttatgattcccatcttaaataagtttatggttaattttccagttgatttataggccatggtctttagattcaggagaattatgcttttaaatctcgtatcacagaatctaattaacctttgtatctagcaaaaattagtctgaacaaaattacaatatcatataagtaacaaatatcgacaacaatcttatatgatcaaagatcggtagtcaaactaatcaatcactaaacaaatacatcacaaaactgaaaatacaacattagtatctttctaacaaaacataggtgtaagtgtaacgtctcaaggagattcaggacgctacagaactaccctcgtaactactagtatattatttttagtatctcaactatttgccttcattattttttactttttaaatcgacaatttgcatattcatatgtattaaaaacatcacatattcattttcacatcgacaagaaataacctgccatggtaatgtcactaatgcagaaacggaaaaccaaaacctttttgtttgacaattttttatcttaaaaattaaagaattttaagcagagtaagcaaagttcatgttgtaactttacggtacttagattcgtccaaattaaaaataaaataaaatgtctctggtaaaattcaacggcacagcccaatattcagattggaccgggacttanaattcgggccgaccctaattgacacttaccagtagaacgaacctggcaaatataacaaaggaaatcaaatgacggaaatgaattttaaaattccgaaagccataggaaagctttcgagtttagtttaaatccaaaagccaaatgattttgataaatggtttattaattaacccatgtttgcagttcttagatagatgttgtgttttcgcttcggtagaaaaataatcactctaaaaagaataaaattctctcaaaaccatataacaaaggaaatcaagtgacgaaaatgattttgaacttttgagtttagttccctttaaaaaaaaatccaaaagccataagaaagatttttagtcttaaaactacatattgtcctaccttagggcctatacaaaagacttttgaacatgagaggaggattgatatgtgttgacatataaatcaattttcatcaagcgttagcagtcgatttgaagcatgtctcgtccaaagtcgagtatatgcaaccatcgtttgagagctgttctaacgcttccctgccacacagacaaagccgttcttgtcaagaaaatttctttgtttatattgtaactttatcaaatagtgataggagggagatagagatagagagtaagaatgagaggagatttacttgacttgaagcagcggaatcctgagttcacgggcaattatatcacagtgaactccagcttcagatacactgatgtagatccaacatatacaacaccaaatatcaaactcaagttatgcttttagatgagcgagagagaaggagaatccaatgaaagaagttgaattcatatggcaatacacttatcactgacacaagaacatcaatctgctgcaataacataatctcaaacatcggccacaaggctgatatagttgaatgatttttacataaaatttagtcaaggttggctcatagagactttagaggttgatttgcttatttcatgaactgcagtttgatcattagtattcaaagctgtatgaaatgaatgaaatatatgacgagttaattgggttcttttggggatattagatgaacttacatgtgcataggttgattcaggtaattcaagaccgtctgctttacaccatgcattgaatcattgaatgggttcggaactgaaaaagattctgtgagtaacttaagaggac

SEQ ID NO: 28950 - DNA, 2265 bp, Arabidopsis thaliana landsberg
  unsure (1)..(2265): unsure at all n locations
ggatctttgtagcaaatttcactgcagtctcctacacctatagagagtacactactattacaccaattcattaacttggaaacttaaacctgaaaagcagaagatactcttcatgaacatgtaatttcgttatgtaggagacaagcttggtttttatgatgttccatagtgaggacaaatctaaccgctcatcatttcatcaacagtttcgttacagattacaaagaattaaaaagaaatgcttacaatcttcccatgagtcactatcggcatcacatccctttttgcagaatactctccctacacagattcaggaattacattagtgctatggaaaaaatgtcnnnnnnnnnnnnnnnnnnnnnnnnnnnnnnnnnnnnnnnnnnnaaaaaacagattgctatggaaaaaatgtcataccaagcataagttcagctagcttttgtgcccatgaatgaaattcagagatcagagaatgaaaagctttcatcagaaagacagaaacagccaaaccaagccctttaactagcttaagcatacatatatgtcaatagttcatagaagcaacatggatacagaagcatctttgataccgttactttgactctctccctttaaatttctttcagttcataaactacaacttattatcttccactttctcctactaatttaaccattttcttaattacatgatagaaaagctctaagaactctgcataatctcccttacttgtaatcaatataaatgttgccgattcttcaatctacattattcaattacgagtcaagatggatgttcttaaatacttgcaactacaagttgtctctggaccaatctaaccaaagaagcgattcttgaccaaaatgtttagtataatcgtaatgaagtagagtgcaccaacaaataattagggtttatgaatcaagaaatcaatcaacaatccaatttacagatcccaatttcaattccaaacaacaacaaaaagaagaaacactcggaagactaaattgacttttgaatcaagaaatcaatcaccaatccaaatcagaacccaatctatcagctccaacaacagattcttatcatcatcatcgaaaactaaaccatcaaaaaacaacggaccacgaacatcaaaactcaaaaacgaatccgattcacacaaattaagagtccagatattacatacatggaagctgcgtaaatgctgagtacttattcgtgcatttgctcccacacggcggcgtccattgctgcggtatcatctctctctcccttcctccgccttcactctccgtctctctctctcttcttccgaaaatatcgctgacgccacaaaaatgtagccggagacttttctttatatagtaagggtgtttccgtcatttaacaatccaagctctctaacaaccaaaccaatcctttttataatcccatttaatcaaaccggttattgatacaaaccggttatttccataaacttaagccgacttctctctctcgagcctttataaactcacaatctcacaaagccgtctcattctctgcgtcctgtctcactctttgtctccgagagctcgagtagtgaagtttgctgtgctctaatcttcagagagtgagaataaatggagtacaacgaatacgaacctgaacctcaatatgtagaagacgatgacgatgaggagattacccaggaggacgcgtgggctgttatatctgcttatttcgaagagaaaggtctcgttcgtcaacagctggattcgtttgatgagtttattcaaaatactatgcaagaaatcgttgatgagtctgctgatatcgagatccgacctgaatctcagcataatcctggccatcagtccgattttgcggaggttgtttcctcgtttttgttttttttctagggtttctatgggaattcgaaattatgtgcgggtttatcgtgtttgtggcggttttaaagtgtttcgatttgagcttctaccgtttgggtgcgattagggtttacctgaatcttattgatgtcccgagattgtcttgttattcaatgcttgagctatatgctgttcaagagtcaaaaaatgattttgactattaatgtccggatattgactttgagctggtaatattattaatgtcccgagattctccttgagttaatgcttgagctcatctctttcgagaaggctctatacccttggttgaaactcaaatcagttttgaacactataaaaatgagtttggtatctttttctgctgtccct

SEQ ID NO: 28951 - DNA, 3656 bp, Arabidopsis thaliana landsberg
atataccattatcctcaagtttctgttttatatcggttgaaccaaacacaatgccgggtgtgtagactcctcctttaactaggctttcgcgctggcccaagactatcaaaccgcattgaacaagtgttatcggggtggttatatatccaatctcaggtcctgaaattcttgtaatgatttccaagtcaggctttgtttctccttgtgaagctagactctcttcgctgtacccacgacctatgaaccacatcttaaacgtagcgctttctacctcttcttcacttggacctttcttctggaaccaaccaaggctgaaaactgaagggaatttcaaaagaagccatcttccgaaggagaacttggaaagtaaaccaagtgacactccaagtgtaacatatcggaatatcccaaagagagatttggacgttatctttacaccaaaatgagcaggcttgatcgatgaccagaatgcttctctcttttgtatctgctcaggactttcattaatcccaggaagcccatgtggtttctctgttagagttgtgagagttctacgaacaactactgcatcagctgaaggtagctttaaagcccaaagaccaatcgtcttctggttttctaatgttggtcctttagcaggaggaccacaaatctgcaaatacattccaaactttaatattagccaaagcctactaaccaagaatgtacaatatcaacactatctcattctcaagcagaattgtctcaatgtcacattacgttaaaatgcattacttaccgctggtcttggccttcttggtcttgaacgtcttaattctttaagcttttctgcattagcaacacctaaaaccgcagactcataagtcccaaagttcccagcaatttttttgtcagactccaagctaaggtacgcttcaatctggttaggaaccgatggagatacccattgtttagcattaaagagaagacccaattcagcaggaattgaatcaaaaccacaagcagaaacgattaaagagccagtctcttctgctctttcatggtagttagcttccattctctccataaactcaggttcaccacttatatccaaataatcacacctacaaaaaccatgtcccaaaagcaaacaaaacttaataagactacactttttcatcaagctacaacttttgtccctagatacacctataaccatgtagcaatcaaatgaaacttcaaaagatcacactttttcatcaagtttctaactttttctaagctacaaattttaaccattcttataagctaccattagtcaagaactaaataaaaatttgatctttataagtatcactgaaacaaagctcaaatgttaacaatcacaagtcctcaaacttcaaaaaaggtatcaactttttccagtttttttagttcacactataattaaagcacaattgagaaaacagaggaaaagatccacactttaccctgaatcagcacaagcagagacaacagggtcaccatggatacgaaaaggtccaacacaattgaggatgagtttggtttgagtacagagacgacgaagtgaatcagggtcagatgtatcagcagtgaggatagcgacagaggaaggaggtgggttcgggcgggcggcccattcgagagattgggttaaacgggtcgggttacgacccgctaaagctagagactttaacggagaagaaggtgtttgaaggaacttgagagcttctctgacgacgtacttaccggtaaatccggatgctccgagtatgacgatatcgtaacccgggtcgggtttttgggttgggttcatcgtgattcgttatcggaatctaagacagcgaaactttttgttgttcgacgaagatagatatttcgaagataattaatacagtaatagtctttatggagctttgtgtccaccgacaacgtcaacgttacacgtcattgtgagtgaaattttattttaaggaataaatcatttttgtaccaatcacataataatttgatttgatttagattgggcatatcatatgtgacgcaattcattcaatagtaacacttgacttcacaccatttgcactcatattacgagaactacacgctgtctcaaatttgaaatagacaaagaaacagcacgtagtgtaactaagatgtaactaccttaggaaaatgttaaacttgtttaaccaagttctttctttttaattggaagtttgctcggaaaagctgtaagcaccacttgattcgagatactgaggactagcctcggatccgatgacttatttgtgttttcttccgtcaaaagttgatttttttcgttgatttcatttttatttgtggttttttttgtatttttgtttatttcgtagatttcggtcttctgtatctcttcgttttacatttgtatagaatacaaaaatagtataaaatatgttaccaaaaaacaatctctcactagatgctccaagcgtttgttttccctccattaattgtttctttgatcacttgctcgtttccttgctttcaactgttccacaaaccaatttctcgaacaatattgaactttttagtgcctatgtgtgggatacgggccttgcccttcatgcccagtacggtccaagcacaaaatgaataagtcaaaacggcccatcagaagaacggcccatcagatcgtccggctcggcccaaatgagagctgctcggcccaacaacatcaagtcggcccagatgaaagctgctcggcccagcccgacaaacttgagagggtaaaaacgtaaaatcgcaggggagaccctaggtcagctcctagcctataaatagcagaagacactattgggaacaaggaccaggagttattacctagagaatttaagagagaatagttgccaagctctgttatctcttgctttcccgttttccgttctgtattttctggttttccgacttgtactttcggttctccgttctgtacttacggttctccgttctgtacttacggttctccgttctgttaaattaccgtcttttccgttcgtcattaataaagaaactactccgttctccccaaaccccttaataattattgttacaacctcggtacaaacactatggattccgtgttgactaacacatttagaagatgtattggttcatttcgtgtttgagaaaccctaacttcgactatggatgtatatatttcttataaatcaatcagttatgttaggacgttaggtgtgacatttttttaattctttgggcaaagttgttgagaatttatgcttctgtttttctattgcagatatttggcggtaatgggactttgtagcatatgatgatcgatatgagaatttgttgagattatttaactgctgaaatgttagagacgtcgttaacgcaaaagattaaatccagaaaagtatcaacaaggttggtctaacaaaccattatgtgaaaagacattacaaccatgagaacgcataaagcttcaatcaagtatgtttttgtactgtcagaaatgtttgtgtggtgggtaactctatattgatatgattcatggatataaagctattaactatcaaatggtttctcttctataaggtatatatgtgaaatttacttatgtgttaaaaacttaaaactaacaaaacaat

SEQ ID NO: 28952 - DNA, 1780 bp, Arabidopsis thaliana landsberg
tacgtatacttatatataattaatgtagtcaaagtcatcgagagccatgtagatggatggatctaaatacatatcttaagtttccttagaaaaaaaaatgagtgaaagaactttgattatatatagttggtttgatggaaacaagtattttattttgtttactttagttaatgtacattaattatgacgactgtccaagtgtgaaatcgagtttttcttcatgactagaaaaaaaaatagtcctcctttcatttattcttttcattatcatgtacacctctcaacaggaaacatacatgtgtatggtcaagaactatcataaaaaaagagtcatttgttgtaaagattctcttgaaatgaggtccaaatgacaactttataatatgtacttttattttattaaggaacattcgtatattggaattgcatggaaatatagtagtaagtatatatgagtacttaggcagctcatttcaagtatgaattcgattgttgcttcggaggacacggaatacctcatgattgattcattctttaagctctattcaatttctttgggatcacattgtgattatacttatcattgttgttcaatatatatggtattatactattttgctccgtggcacataatagaagaaataaaataatattttaaacatcgttaatgttttttggtagaaaaatgcaggaatcccgactattccacatatgagtgagcgactcttctatcacataaatccacacgaataacatttgaagtgtatgcctaaaacgttttcagatgaaaagatcatgtatttgtttttcacccaagtatttgcgttaaaacgacaaatctcattttgtttaaacataaatttttaaagaatgagattaacattgggactaaatactaataggtgttaaagaaaaaaaattgggactaaatatggatgggcttccgttattaacctgtgtttagaacctccctaacaagattaatttaagacccattttagtttcaaaggccataaagctcccaatgcggcccaaaactactctttgaaaactcgattctttaatttccagtttccaaaacgaacgtaaagaattcaactgtggcctgtggggcaggcacgtggaggtttaacgacgtcgtgtgctatgtgcaaaaaagacacaacacaaagctcacatcacttgatgttttataagtaaattaaatttacaagttgaagttggaaggtaatgtattatgcattattctacgcttatgttataagtcctccctcgcttcacattttgtatatttttattttgttccacaatttgttataattaacttttttttttttttttttaccttataatttcctttgctttacattcgagtgttgatgatattttaccgttgaatctaagttaatttacagaattacaggttaatattgtgctgtcattccatgagtggactaattaagttcaagacgacaccatatattataaacatatatataacatctccatgactccatacttatttactcgttctacttttagaagaaaatcttacaaattttaacgcgttctttaaaatgcgtacttagtaaaaaatatttttttcgtctttgtataaataacatatagtcaagttgcaggtcttattataggcaatggttataagtaatagtaacattctacatttacttttatgaaaatataatggtttcccttattttttctccaaagatgaaacaaattcggttttttgccaacacctttagtctgaaaaatttaa

SEQ ID NO: 28953 - DNA, 2117 bp, Arabidopsis thaliana landsberg
  unsure (1)..(2117): unsure at all n locations
gtttaaaagaaacaaaaaaacttgttaactattgaatttgagaagttttgtacatttcgtaaactacatgattataaaaaaccaaaacacccaatatccatatatttttaatttagacaaactagctgaatctaacaacggagaactcaaatttgatactatatatgtttttcgaggaccaaaaactgtctttaattatgttaattattcatgtgacctcttgagtatttacgcgttttttagtatatgatatatcatatggatgaactagataaagtgttaaagttatttattacaatgatattttgatattattatatgttatcttcttaggaaatgaatttaaagcatcacataatttggaggttatatatatagctataagatcgccacgcttctgcatattttatattatgtaatttggattgaaactaagcaatgttgattaaattagaaagaaattgtattgtattacgtataaaagtaaaacaaacccttaacattaaaaccaaaaaaaaaaaaagtataacaaaaataatatttgattgactgagaagattacttacctataaactattttaaacatttggcaattagttaaccccgtaactattgtaatggcagaaaatgaggataggtcttagtcagacatcgtcagttaaattgttcatctatgtcacgatgtgtcatctgatatatatgaaaaatacaaaaactcacaactcacaatccgagccacaacacttaaatttgtttcattcttcgtgttttatttttctttaagattttttttttttattgggttataatatcgcgaatattaattggaaaacagaagtaaaacaattatccaaaaacaaaaatggttgtatttaagaacatattttatgttttaaaacattatctttggtttctctttatgttttgccttttctttataaaaaacacttcaaattgttggagctacaaaaatatcaaaagttatatattacaattatgtataaacctaaagttcacctaatcgtaactagttggcaaagaacgactacagtttagaccgttaaaccaaaaaagatcaaccgtaacaccctaagatctgacgacgaaaagactttaacagatttgtttttttggcaaaagctcaaaacacaaagcaaaactcatatagtgagattcttaacaaaaaaaacaagagttgcatgtatatagtgctaattacaatctcaagtcaaaaccaatatgccaacaacaaacgtgcacatcaataatacgtacgtacgcaaaacattccaaaaaactgcctagtctacaacttatctctaataactaatcgtataatatatgtatatgtgatcacgtatatgaaacgtacgtatataggattcaagttttaaaccgaaagaccggcgatttgtggtcacgtttggcctttatcaaaccgctccagaccttaacatatcgacccaccatacctttgaatttcaaaccaccttgcttctctttcttcaccaccaattgcatcgtcggcttgatcccctcgccatcctcgaaatgttgatctagagagctcttgttgttaacatcagcttctccattcaatttctcatcgcatctcatcagattgttcaaactcttacgatcaatctctttgtcttcgatttgctcttgttctttgtctggttttggttgtgagctttgggtgcatattgcatggtgatgcatatcgctgatgagactagaccatggttttcgagttcttttcgacatgcttagatcaaaccgtggcttggtcgggtttactacttcacttgccatggttattaatcaatcaaaagaggatctaaactctttctatctttttcaaagaagacaactatatagaggaattaggagtagctatatgtccattttcacttttgaattgataacgttgaaggacggtgcctgtgagtgtttggtctactcgttacttaattaataaataaagaaatgattccaatcgtgtctcagatgtctattttgtaactaatcttaatttatcttgatactttgggtaacttgtagggtncggtgggttattaaaacaaaccnngccntttctaggcttgggttgatta

SEQ ID NO: 28954 - DNA, 3963 bp, Arabidopsis thaliana landsberg
taccgagtgttcattgttagtggaatgggaggcatcaaaaagaggataaaataagggtcagttccagggtgtccaaaatcaatggccttacccgtaaacattgaccgaaaaccatggatgtattattgatgaaattactctcaaccaacctttctccctgcaaaacaatttgaacgggcaaacagggaccaagtttaagtttacagatgaagacatcttcacagttatatcaaatcctattttgatgctaagaacaagtactggacaatattttacagtcatgagtcacctataatctgtaattaagctaggaatcaattctcctaactattacactgaatctgtatttataagacaaatactttcagacatgacatatatttgtggttttgcatatcaaagagtccatatacaaagtgacaacaagatagattaaaacctgatttcctgttcttttctctctttctgctcccgccaggtccactattgtcagcatagcatcactagactgcaatttcgtttcgttggaaaagccattgcatgatgctcgtatgttgatgatgcattgtgagcgactgttagtaattccaaaattagtatagaacatgaagacatctagttaaacattattgaaaaaggctctaacttccatgtgaaagggcttctaattcagttgagttatcaaataaacaaagggcacaagggtgtgttagcaaaagttaaaatcaagttggtgtgctgagaaagattaaaagcttttgctgccaagtaccttgattggctgttggagtttgttgtagccgttgcacgtttcagcattgcctgtccaattaaagactctgcttcttccagattctggattggaacctacttaacacaaatgattgagaaaaataacgaagagttacaatcacaaactgagtgttgtggtcacccaagaaacaccacacacaaaaaaaaatctcaaacctctttcaaacccctgatggttgattgctgaacagacaattcagagctttcaccacctagcaaatcatatgctttctcccctttccctcgttcagaacatatttcaaatatcgacaagttaaatgacctgaatagaagtaacgagatgttatatatagaacaagatataaagctgtgtgtagtccaaacaaattcattgtttcatacagtttggatttcctcctattgatacatccatggtgtatcatgatactacataacactataacagtacctcaaagatccagaagaactctcatcgttctttttgaaaatttgacggagtgtaattgacacaattccaggatccttcaaacttccaaagaccgtatgagtcttccctgagccgctaggtcacaatgccaacaacactccactgtcccctttcatgaggtcccccatcaaaggttgatccattttatcatacacatcattctacaaacagcaaaatcaaactcatcaactctgatctcatctcaaattcaaccaaaaaggaagtaaaatcgatgcgaaatttcatcgaacctgagaacaatccgccgggaaaacatgagaaaacccttcgtatacctcagtcttacttcgtttcagctcttgcaacgattgaggcggagttaacgtaactgaataagaatcgttgagagtaatacaagcttcttcgtccttcttcttaaccttcttcgtaatctccggattcctattctctttcgcggtgttcttcttcgaaggattctgtggccacacatttctaggtctgctcttcgtagtggtcgtaaccttggtgaaggttttcaaaggtttgattctcaggaaaatcttcaaactctctgcaatcgcttgttttggttcggattgtgggatttggatagagagaatctcgtcgatcggaaaagtaggaacgtcgtggggtttcgcggaggctaaagaggagagaggtggcttagttgtggttgtatacggcgttgctctagctctcctcggaggattccgtcgcactgttacagtggaaggacacggcggaggactgagacttttctgtttctcctccattgtctctttctctctatggcggaaaaaggagcgtttcaattttcaattttcaactgaaaatgtaaaatcaaaaatatcatcaccaattttggttggtacgaaaataatttaaataaatactttcggtacacatttgaagcccattatattgggcttttgatttaagcccaataaatatttctttcttcgtcctctgtctccgcctccgctcttaatcgtcgcggccgccggagactttaagcacaaaccgttggaccctataccctttaatgtctctttttctcactacttgtaaatttcttctctctgctcataaattcagtgtttaagtaaggtctcgccacaggttctgtttgagatattttgctatatttttcttctttttgtgttttctgattctatgtaatgtgggttgttgttaactatctctactgtgctggtcattctattaacttgtgtttgtgtttatgttggctcttggaaactagtgtctctgtttcagaaattttcttactatcacataaattttagagttcgtgcttaaatatggttcctagctgttctcctgtagaatcctttgatgtttggagttttgttcccattaatgttgtcttgtgtaagcaaatgaaacaattatgttgcttctttggcgtttttgttgttgtttaaggttctctaatggagaaatctcgtgaaagtgatatcttgttctgtaatttgtgtgggacaatgctggtcttgaaatcaaccaagtatgcagaatgtccactatgcgaaacaacgcgaaatggcaaaggtatccatgaaattctgttggatttttttaatcgaatcgaacagtttttggttcttgatttggttaatcttattgttgttttaaacttcattgttttcagaaatcattgacaagaatttagcttacacagttactactgaggtatgtgttttcctttactcagcattgtggattcttatctttcgctgcatccatatgtgtgtaaatcaatcaaatttggtttctttttcacggagttgcaaagatctcagctcttgatttattttggtccattattatcacttaataggcagtgaacacacacagagacccgtgcatgctatgtaatcagtttcaaaacttaaaatggagactgcttttgtaatgttctttggtgtttgtggaaggtatccacaatgcagagttagtatacaactcatgatctttggcgttttgcaggatatcagaagagaactaggaatatcagagtgaaaaaacacaggaagacgctgagctaccaaaggtttttaagaaaatcagactcaaaaaatcatgttacaacactctgtcttaattcttgcgttgtggttttgaatgttctttccagatcaaaaaggcgtgcgagaaatgccagcatccggagcttgtatacacaaccagacaggtaagtccaagctttcaacttcttcgtttttccttcttgtttcgtttcaaagaatgtgttcatcagagttttctgatttacagactagatcagcagacgaaggacaaacaacatattacacttgccccaattgtggacacagattcacagaaggctgagatcattatcatcttcagaatgttgctcgattcacagagaagaccagttttgtttctcacactgattgttacaaacttagtatttataacattttgtattgtttcttacaagctccatattcgatctaccattagaaactttttttcttattaaggaacataaaattgaaattctattacagccaggctattttgtgcctaggaagcccttttgaaaagttatggctttagcaatcacaccaagtagagaagagttttatcaattttaaaaacaagacagaccccaagccccattaagtattaaaagc

SEQ ID NO: 28955 - DNA, 1944 bp, Arabidopsis thaliana landsberg
gaatcttgggtttccatcgtcttcaatcttaggcataggaggaggtgtacgttgatactgacgtgccgccatacctttctttcccttagcttccaccacaaaaaccatccgccgctgctgtaccgccgtctctcggcatgccgttcttgagctaaacagagagtgtctcgctaaaccaacctcttcgaatcttcctgtgttcttcagaggaagccgagttaacgcattcaaagacatactcacttccattactcaccagagaagattcactcaccactagtttgtttagaaacgagagattatttggtttggggaagatgatgatttcgtggattcgtaccttatctacttgtacctgccacgtgttcaaaccagtttaaaccgaaccagaaccgtacttcataaggtaatctgaaactcttttcttttacgtatgtctgaaactagttacctttaaggcctgagacaatcctatttccaaactaaaccaaaaagacaatactattcttgtcttaataagagaagaaaaccataatattagaatctgtcttgtaaattgatcgagataagtctccttatcttcaacaccgtacatgctcaatgatgatcactatgttatataactcttcgtaatttgagattgcgatgcagagaaaggtaagaaactaagaatgaatgattacagtttccacctaaaccgctaggtcctctcaacacattaacaaacattaatgaacgatgtctctaacaaccaaagaaatgtttattttcaccagctaccagattcactggaagatcctaatgttaggtgcaagatactacaaactatagtttgtccggctagcaatgaaagcttgtgttgatggttcccttccaagaaaattggtgagaagttccattggttctttgcctcctcctggggccaacacctaataagagagtagttgttacttgtttagtccttttacactcacacactactaaatcaaaggaaagacaaacaaatacgcttctcactttgtctctgaactgcaagccggcatatagattcggatgcccatctccaaattttgaagcaaatatatcagcagcatacacctgtggaaataggtggattctcagactaaagtcatggaaggtacggatcaccatagtgcaaatcaatcatacctcactccataaacgactgtaacatgttgcttcagagccaattacagcacgtgggaaacatgaagcagggttggttccttccaccactggtagccctatcattacctatatatagaaagacactactataagaaaatttctttgccgtaaacagaccagattgctttgagagtttatgcttttacctttggatgaagactcctgattagctggagtaagtcagcatcatcgtccgaatatattatttgatcaaatagacctgatcatccatatttcaagcatcattaggcaataccacattttacccgcaagtagacttcttagttaactactgcttcctctaaagcataataagaaccacaatctactcgtcttactaacaaaccatttgtcctaacgattgtgaggaattgatatttcagtttaaaaactacaataaagtcgaaatgaaaaggtatataagcatcattaaaagtcaattaatatctcacagtataatatctcctgaagcgactttagtgcagagaaagaatatcgccaacgtttgagtgttttgcagacttcatccacaagtggcttggtgatatcctgcaggaataaatcccaggttgaaacaaactattatgactagtctacgacaagaacaattggcaacaatttagtcgtgagaagcgctcacctgacgaaaacctgatattaacttcaacgtgaaactttcgtaccacctagagatacacgaattattttccgtctattaggatttagcgcttatac

SEQ ID NO: 28956 - DNA, 2162 bp, Arabidopsis thaliana landsberg
  unsure (1)..(2162): unsure at all n locations
tctgtacctcctggagctacctttcagcaaaactggcctgcagctggtaccactcttgtgaattctgcacaaggaggttagttttctatctactctttcctgaatagtgaatgctttttaacttgtgactgaagatgtgtatgaaactaagaccacccttcctcagtctcaggaactcctccatgtgtgcccataccagctccgggccagcctgcagtgcctgctacaccgacatctcaaatccctccatctccgtttgttcaacaacccatttaccctcctccaaacagctcttgggatacaagatccctaatctctccaagcggtgatgctgtagcaacatcatctcagatgcaaggacctccagcgcaacaggtttcaggtcccttcatgccgcctcctgtgcatccagtctctcagccacaaggacctcaagttcagcaatttgatcaattgtacccacctccgcctttaggacattcattaccttctgtactccagccaccactacaacctcaatcccagccaccggaaccaccgcctgaaatgatgccgcctccgcctcaagctctaccacctcctttgcctcactcacacccacctctggttcctcctcctcctttttctccactgttgtccccacgcttacctccaatggtcacccagttgtgtggatcagaggcttccaaacagaacatagggcaccaatggcagggtgctttgtcaaaagtggagttcattactccaccatcattgcacagagattggaatcagacatttgcaaatatatcattggatctcccgagcctgtgcggtgagtgacaacacctcactctaatttgttgggttgggtctttctttataatgaagtgatgtgctatgagatgaatattgtttcctggatttttactacttgcagatggccagcaaaactggatatgactaaacgcacggatatgaagaacgtaaaatcttctgttgcgaatacacaaccacacaaagtaagtgtccaccttcattgcgaagtaaaatttatcgcctgtgcaagcttttttggtacacgatttaaggaatgctgttttgcagagggaggtttgtcagttaattcctgctgctttcagcgatcgcaaaggggtatgtgtcacattttcaaaccctgaatcatcataacaccattttgtcttcctacgtaaatataataactctatcaaaactctctttctggtggcagctccaagatttcataacatacttgaagcagagagattgtgcaggagtaataaagatccctgcatcaagtcccatgtgggcaaggcatctcttcattcttccacactcgcaagagacatgttccttgctttctgtttccccatcttcctcggaatgcttgatcggtttggttttgccaaaggatacaaatgctgaggcctcatgacacaatagactggtgtaccaccccgggacaaggtagaataaatgaagacttatgtgtttaagatagtagttctaaatcacattgtaaatgaacttactagaatctcactctttcttctcccttttgagggttgtcaattgtagatttgtttcaacgatttaactgtcttcctctacataaaagagtcaatagtctggttaaggttttgtcagtatgcgcgtttttttacttttaaaaactggaccggaccggaccggcggattagaacacaaaatttagaccattaatggtcaaacgcaatttttagcaatggcaaacgcaaacgctgttcaaggaatctcaatcgtttagcaatcacagacattgacgagtacgtatatcagtggctgcgccttttgctcctcctccctcccgccctcttcgtctgaattacaggtttcctccggcgagtcatcatctcttctcttccatcgctgatcttctcacagaaacaaccatgtctaacagacgctcgaatcggcaagatgagaacacaagatatgtccccaagggccatcagcagcagaagtttgtacccaaacccatgaatccaactcctacctctaattcaacccctttccctgtttctctctcttcttcgcttaggcaatcagattcctncggtgcgagttccagagtcttcgctttcggtggtagtaggggtaggatgggggatcanggacagttg

SEQ ID NO: 28957 - DNA, 2130 bp, Arabidopsis thaliana landsberg
aatccccctgactaactgtgtcgaagtgttcgctgcttcttcgtggcgtcgtttgtttttctccctccaaattgtatgaaccgtggcgtggggaacgtacctgattaagaagccttctactcgattgaaggacttgtcggatatgtggtctagaatctgtggccatctcgtcgtgaaactagacttccatagctttttagctaccgcagtacagattaccgagatggaatcacaagagaagaaaagatggttgggagactctatagtgtttgtgcagaacgcacaataacttgagacgcctctgttccattgcagcatacgttcccccgttaataatctatcctgaaccgcaagccaagatacactatttaagatacactagcatagatgtcatgcattaagatacaagctaccattaagcgctaaggaaatgaaaccagatgtagttggcagaagctctgattaacatttttgatcagattaccaaaacagacgaatgaagagattctttgacattgaatcagaaacacaagttcatagctaaaacgagcaagtttatgaaaatcacagaaacacacatgcaaaaactatacgatcgtgaaaatcaaatcccacaagagaaatgcaattccgtcgccggtgctctctctttctctacaacaagaaggtcgcgaatgtcctacagtgggcctctcatagattgtatttacaataaaggcccattacgatttttttttgggtaaaatccaaaccgaccggttcgcaatttttaatttctggttaaaattacaaatcaggcggttcccagaaaaaaccctaaagttcgtcttcttcgttagtgttaaaccctacaaaaacaaacaaacgcaaaaacgagctcccaactctctcgcgtccgccattgaagatatggttgtaccgcagaagaaatttgctaatggaaaacgtaatgattctacaaagtcctttaaaccaatgaagaaaccgtttaagaagaccaaggacgatgtagctgctaggtctgaagccatggctcttcagctcgaagatgttcccgactttcctcgaggtttgattttccccctcataatttctattgttatacaataaactattcaattctgcttccttttgttattactcggtgtcacgaatcccaaacatttgattaggtagctaaaaatgaagttgctagcttcattttctctccttcagttacttatcgttaatatgatttaattgattttcaggtggaggtacttctttgagtaaaaaagagcgtgagaaactttatgaagaagtcgatgctgagtttgacgctgatgagcgtggttctaagaagagtaaagggggtaagtctaaaaagagaatccctagcgatttagacgacttgggtttgctatttggcggcggccttcatggaaaacggccaagatatgccaataagattaccactaaggtatattactcgcaaccgtcttagtcagaattggctaagagacttatccttgtaacattttacattccacatcgttcacttttgttactttcattgggttttagtgatttaaatcagattcatttcttttcttcatcctggaacaaattatttgtgtacattctactaaacttcagaatttatagcttgatcaacgttattggaaaacaaccttaacctagattgatcaaggtccatagattacattgactagatttctgaatgaatgtcctctgacgctttatctacatagatagttcttacatcagttgctgatgcctgctttacaatttttaaacacttgtgcattcttcagatgatgccataacctatgccattttagctttctattgacatccatctatactcataaccatggttgcgtggttttactgtcctagaagatttcttaatcatattatacctgtacttttcatgtgctgacttttatgtgaatatatgttcagaatatttccccaggaatgaaacttttgggagttgttactgaagtaaaccagaaggatattgtaattagtcttccagggggcttacgaggattagctcgtgcaagcgaggtatcagattttacagataaaaggattgaggtaactgctgtaggctataattggctg

SEQ ID NO: 28958 - DNA, 1974 bp, Arabidopsis thaliana landsberg
ttgaaatcattgtgtgttcatcactttattatatcaacaagggaaaagaattggagatgggtgtctttgaagcttcccagctgaaaagttgagctttttcatcttttcttcacaccatagaagttgctctttactgattttcgacatcctcaaaacccgtgttgcgagtttgatgtcaatggctgcaaacaagagttgaacaccttcccatgtttgaggccatgatttctttctcagcccttttgtcttctttgaaagctcctttgctttcacccttttctgcaaaagttcctctcttatgagacaccaaagaagcatacgatagtaataacatttgagtacagagaaatcgtaccttatcaatggatgactgaaccagtagtaaaggagttgtagaattcacatggttgttgttgtggttcccaaacaagtgaatacccccatttggtttcttcttatccattttcaagaagacgttgaaagtaaggatcgagctctctatgactttgatgagatcatcagcgaggaccatgaagcctgtatctttctccatctcctttttatctgaccctgatatgttttgaacataaccaacttcaagtgttactactacacataaggttttaagtcgcgcaatgtatgagagctgttaaatcaccttgaatcttaggagcttgaagtagcttaggcattgcatttctagcacgagcataaagttccgatcttgagccttgctcaaacggttcattctctatatacctctgcaacaagactaggaattgctgaaacagttgggcagtatggttgtagcaagtcggggtttcgggttggcatgagattaagtggctcagctgcgtgtattgacagtgaagtgcctcccaagtgaggcagagttgagcaacataggccgtctctagatcttgataagggtcgtcaacttctgtcggctgcaaatgctcgatatcttcctccggaacatcaaactttttgagagaaagacatcggaaaggcgatgacagcttcttagatgcagatcttggcgatggagttgaaggacttggagcaattccaatgcctaagagattgaaaagtaaccaacaaatccatgatcagtccaatctatcacaatgaaaaacagttcaaagcaagaagcttttaccagtttccttgagctgctgagagcttaaacgatcaaagaagagcatacgctcgcaatacttttcatagacagcatcaaaacctccccaccattgaagtccttcagcaaccacatctctccactcacttgaacacttgtcttctccgtcatcatcatcttcatctagatacgattcctcttcttcttcttcttcttcctcaggtatcaacaccatgaaactgtttctcctcaactccttgagcctttttttaacctcattggtaatgaaatcatcatcgtcatcttcgatctcatctcctttccccgaatctatcacaccagcttcagtgttctcactccttgcctgttcttgctgagccaatatcttgtcttctttctccttttcaaggtttggcttccgagactttcgaaattttctaactttcaagaaatccattgcctcctcaaacacacttaggagagtgagtgttttttgttaaatcataagatctaaactgagactagtctctttgcatgagtaaaagcgtttctcttctgccacaacgaacttaatcaaagaatcaaccaaaccagagaatgaggaaaatgcatgaatctagtaagatctcagagaatcatgagcaaaccctagagaattaggaacaccgacagaagattaagaatgcataagtagatcagtagcaacaacagcatttgtctgaaactttagattcgattcactaatctctagctgataagaacactagcattccctgataaatcaacactccactgaaactactactacactgagcagagagtgtgagaaaaaacca

SEQ ID NO: 28959 - DNA, 1450 bp, Arabidopsis thaliana landsberg
attaaacattattttctctgctcaggaatatgaagaagatggtattgtttggactaaggtcgaatttgtagacaatcaagagtgcttagatctaattgagaaggtaattaatggcctgccacagtttgtattcgttgtcttataaggaccttctgacattattttaaagtaatatcttgcatatgtttgcttgtgcagaaaccaattggtttgttgtctctactagacgaggaatcaaattttccaaaagcaactgatttgacctttgccaacaagctcaagcaacatttgaagaccaactcttgcttcaaaggagagagaggtcgagccttcagagttaatcattatgctggagaggtcagttgattcctttagctcaaaagccagactctgcatactgattaggttttatacggaactgattttgtgcaacttttcgtgtacttatggcggttttgttggaatggtgattttgtttacaggttctctatgatacaaatggctttttggagaagaacagggatccgttacctgctgatcttatcaatcttttatcatcatgcgactgccagttgctgaaattgttttcaactaaaatgcgtggcaaatcgcaaaagccacttatgttatcggactccacgaaccaaactgttggaacaaagttcaaggtaaagaagcttgaatcctgctgttttgaataagttgcaatcttccgcgtgtcatattgcatatctcatgttaaactatctctacagggtcaacttttcaaattgatgaacaagttagagaacacaagtcctcacttcattcgatgcataaagccgaattcaaagcagcttcccagagtttatgaagaggatcttgtcttacaacagcttagatgttgtggcgtgttggaagttgttagaatatcaagatctggatatcctactcgtttgacacatcaagagtttgcaggaagatatggtttcttattgtcagacaaaaaggtcgctcaggatcctctgagcgtatcaattgctgttctgaaacaatatgacgttcatcctgaaatgtatcaagtgggttacacaaaattgtacctccgaactggacaagtaagcgattctttaagcagagatttagaggctttttcctgatgttgtcgatacaattcttatgtactcttcttcaaattttcatagattgggatctttgaggatcggaggaaaaaggtttttcaaggcatagtgggcttacaaaagcatttccgtggtcacttgtctcgtgcatacttccaaaatatgcggaaagtaacattggttcttcagtcatatatacgaggtgaaaatgcccgaagattgtttgacactgaagcaaaaatccatgcggattctgtttctgaagcaagcacagatgagttgagtgcagtcatacacttgcaatctggtaagccgcactatcttctttg

SEQ ID NO: 28960 - DNA, 2036 bp, Arabidopsis thaliana landsberg
  unsure (1)..(2036): unsure at all n locations
cttttgctacccaagtccaaaccgcgttttctctcgtcagactcactcgtgtatttatcttcctaaattttgtaatcttaccaaaaaattaaaaaaaaaatcatactatatcgaaaatatgatccaaatttataattacatcgttttctccacatacaacttgtgttattaaaattatatatatacatatatacacaatttgtctttgagtcattctattttagaatatagaaaatcaaataaagctcaatttaactcgttttgtcgagttaggatttcgaattctaataaattttgtcttacgtaactttaatatataccaacataatttatacgaacatatgctaaagattgatataaagtataaacaattgaaaaagggggaaaatataaaaataaataaataaagcatataaaactttaggacacgcaacgagcacatgatcgtatgtaagaaaagatgggagatgacatgttctttgtggacagccttgactttctcacaaagcttaagattaatcatgggatatggtactttaatttgttgtcttcgtctttagatttcacactttggtcttaagcaaaactctccaagatgtcagttcgataaagagagcgagaaagaatatgggcggattttgtcagctttccagccaaaacatgcgtttgcatgacgagaagaagcatctcgatcgtggcttctttcaattttaacttttgagttttaacacgtagcttatttcatatttgacacttactcgaatgtaatctcctcttttgaattttgaaaatacactaaactagaaatgcatcaattttataggcttttatgactaattgatgtcgagtggattgaccatgttcattatattttacgataggttttaggattgtcaagatgtttcacttacacatgaatagacatattcagacatgcaagcctaaagtaaaggctaaggcaagtaaacatacattgctgtacaaacatatttgctttaacaaacaaacaaacaaacaaaaattaaaacaaaatggatctttcttgataaatggaaaatccaataaactgtatgtattaattggtggtaccgtactctctccgtaccagttcccaacaaatgactcaacaatatcaccacgatacaatctcaacctcaatagtttcaacatttattattggtgtactatttatcgtaacaaatttggaggattacaatattacagcgcatggcaaggaaatttcgaggaagatgaaatagtatacgttgaatgttttttgtttttcatttttttttcattaaagatgtacgttgaaggttcaaccatgtataatggatccagtgaactaggttcaaccaccaaatccttttcttttgtatatctcacagatctatgatttagtcggttttgaaaatgttaaaaatgatgtggggacataaaatatgatagaccccatacatatttgttttggtttgtaaattcatatataatttattttccgtttacataattcacaatatttttatgaattagatttatatatgactatgagacgaaaaatgactaagctataaaccccgatcacatatttgttcactctagcagaaatatatatatacatcttctctttgcatgttctcgaagtatttaacaaaattctctgtaaatagttagttatacaaacaggagggagcagaagaaacaagtaaagatctatcaaaaggaaaacaaaaaagaaaagaagtaaaggtaacaattccttatgggaagatgacaaataacaagcccaaagattatatatcatcagccatataaatactcgttggcccatttgaaagtcattttgtaatggaggcccatttatttcaatacgaaatattttaattccttcttttgttttatgtttgcatttacaaaaatcagcaaatattaattcatctattaatatgccacaaaaatgttatataanagttgtagactaacttagtataacacaaaaatgtgttttatgaaatgatttatctaatagcagggta

SEQ ID NO: 28961 - DNA, 1997 bp, Arabidopsis thaliana landsberg
atatagtattttaggtctcttcttacttcatatatgaaaagtacttaaatggtggcagatgttgtgagtcccaactagggttgttcaaagaagtggctgtaaatggtataatgggacttgcaatagccgacatagcggttccaaacatgttggttaaagccggtgtggcgtcagactctttctcaatgtgttttggtcctaatgggaaaggaacaatcagtttcggagacaaaggtagctcagaccagcttgagactccattgagtggcaccatctcaccgtaaaccctccttacacctttttcttttatttgtcccaataagtatattcatatgtaacgaacatgcatgatctaaacacaggatgttttacgatgtgagcatcaccaaattcaaggtaggaaaagttacggtggatacagaattcaccgcgacatttgactctggaaccgcggttacatggctgatcgagccttactacactgctctaacaacaaacgtgcgctttacgtacttttgcatttagttcattccattacctaaaacctcgaggcatgtaacattacaaaccgacccgtctgtgtgttgtgttatgcagtttcatctctctgtaccagacagacgactttcgaaaagtgtggatagcccttttgagttttgctacattatcacatcaacgttcgtaggcttatctttagatatacatatgataaatgtttgtagttaaaaaattgttgatgcatgtgtgtgtagctgtttgcagttcagatgaagataagcttccttcagttagctttgagatgaaaggaggagctgcttatgatgttttcagccccatacttgtcttcgacacttccgatgtatacacatatcttctcatatcatcattttatcatatttactatatctaaatatattaatctccattgcattaacagggtagttttcaagtctattgtttggctgtcttaaagcaagttaatgctgacttcagcatcatcggacgttcgtttttgttctttttttcccacaatcaacacaatttcttcttgtacattttaaccaattcctaaatcagatgaaattttttctttatgttagaaaatttcatgaccaactacagaatcgtccacgatcgtgagagaaggatcttaggatggaaaaaatctaattgtacgtcctacttgaactaaactcttctccaaaaacaaaaattactcatgttaataactaatttcttgtggacattttcaggtaatgatactaacggtttcacaggacctaccgctttagcaaaaccgccatcgctggcaccaacgtcgtctccaagaaccatcaacctttccagtcgtttgaaccctctggctgcggcttcttcacttttcatcatttgcttcatttcttttgtatctttgtgatagtgactaatttaattacatctaatgtgcaaagagctaatcttattctcgtttctaccctctgagtttcacatattattctatccaccccatcattctttgtttctcatcttcttgccatgttcgtcccattcatccaagtgggacatttttaaatacaatatcttaccttatataggagcacgcatgggtcaaaaagtttgggtcgtctcccaaaatttaaaatatccaaaaataaatcgatggaatgacttaacctatataatattgtataagccaagactttaaacaaaatggagaaaaggaaactaattcaacttgtctatctttgatttataaagttataatgcataatgccctcctcgtctgttgatttctctgaaggaacttctatttttctaaattttttgtatacaagtcgaattttagtatgataataaaaagctcgtataaccttttaatataagattaggtatacatgtactattgatactctattgcggcatgattagaaggtcaactgtaagagaaaacatcaacaatgttgtctattatgagtaactagggaataatatgatat

SEQ ID NO: 28962 - DNA, 2050 bp, Arabidopsis thaliana landsberg
  unsure (1)..(2050): unsure at all n locations
tgcacaaaagatgcaactgttaatgtgaattgatcatagtagtgttcatctccttgtataccaatgattactcgtgtgcatcttcagttgatctaattcattgcgtggttttatctctttgcagcggttagatgaatcccatgttaacaataaccccgagccagaagatcttggacagcagttccatcaaggtgagtatcttgagacaaaacctttgtgagtatacgacatgttaataacttacatttatccgcttgtcaatttctgtaacattctcagctgatgccgagaatatcacactctttgagtatcatggttcattccagaccaacaatgaaacatatgatcgttttgaaaggtgagctttcaatcccactatctatcttcagtctttaattcccagattttaaaccttctcgaataactgttgaaggtagaagttgtagcgtttcactatttctgtattttctttcatccacctttcagcaaaaagctggtgatgatttgttctattctattctgctttttaatggcatctcagatttgacatcgaaggagatgatgaaacacagatgaactccaatccaagagaaggcgctgaaatacctacaactctcatcccatcaccacctcgtcatcatgacattcccgaaggtagatagttatgtcactcttcccttctataatcgtgacatctggttattgtatggggatatgaatttttgagtcaaagatgaaattgttttcaatttttaaatagtgttaagtttatgaagccaataacaatgacttgggcgagtctcttgtataataatcatgtatgtgacctgggaatgtatttttgttgaagcttctgaatgatatgaacactgagcttcgtgaacagagcagaacaaatttactaatctttagccatctgcaggagtcaaccccacaagccctcagcgccaggagcaacaggagaatcgtagggacggatttgctgagcagatggaggaacaaaacataccggacaaagaggtattttcacttactaggaataccctcatctagtagaaaatacattgaattgggttttgttctgcannnnnnnnnnnnnnnnnnnnnaaccagcaaaaaagagagcaagaaagacagctacttcagcgatggattatgagcaaactattatcgctggtcatgtttaccagtcatggctccaggatacttctgacattctctgtaggggggaaaagagaaaggttcaaatttttgaactcattggcctttattgtattaactggtgctcatgttggccttacatctgacatctttttgtaggttcgaggaactatccggccagacatggaaagtttcaaacgtgcgaatatgccacctacacaactctttgaaaaggacagttcttacccgcctcagctttaccagctttggtcaaagaatactcaagttcttcaaacctcatcatctggtctctctctatccataactgttggttttttgttttctccttgttgaaacgaatctgacatttggaaatgtcgatacagaatctcgacatcctgatctccgtgcggaacaatctccagggtttgttcaggagagaatgcataaccaccatcaaacagaccatgtaagtcgcggaagcatattctttcctgaaagtttagtatcaataagagaaaggcacatttcatattctctctaacagaatgtggatttatgcagcatgagcgcagtgacacaagctcccaaaatcttgatagtcccgcagaaatactccggacagttcgtactgggaaaggtgcttcagtagaaagcatgatggctggatctcgagcaagccctgaaactattaaccgccaggctgctgatattaatgtcacgccattctattctggttaaaagcttctctattttatccagtcttcagatcatagcttggtattgtggaatatttagcgttagttatttgattttcatgggaattacaagagatgatgtgagatccatgcctagtacaccatccgcacgtggagcagcttcaattaac

SEQ ID NO: 28963 - DNA, 2592 bp, Arabidopsis thaliana landsberg
taaatgaaatgaaatcaaacctttctctcttcaaatgaaaaagaaaaaaaagagaagttggtttttgattactgaagacactaaaatttctcgttgtttcagctaaaaacagagtaacgacgagtggtgttagactcgaaagaccaggtaaccatgaagaaacagaatttcaagtgcaacagtggtttgccttatctatttttagaagggtttcttatagagagagagaccagtattagaaattttctagtcgtagagttgttttgtgtttatcccctaaacttggaaacgtgtcgggaaaaagaaagaataaaaaacagaggaagacatattcggacgaggacaaagtatgttgagggtctcaaggaagcttctctataacgttttccttttttatatatatgggaaatgcagaaattgttcgtttaagacaattaaaaataactttttgaaagattttattgatggaatttattaacggctcaaataaagatcatttaactttattggttagtagttatagctcctaattatacgattaataattaatgaagatgaaggcgtgaccgtggagggtcctaaagcagcggagagtccaaaggagccgttgggtgaattagccgttggtaagtagggacctttggcctttgcaccttagctttctaattagctttaaaagatttttctggtgattgaaattattagtctgtttttcttattctttcttgagaaagaaaattatattggtttgatactgtttttagttttacgaagaagaaaataccaaagtaaaaaaaccaaaataccaaagtagtatatgatttcctttccatgagttatataatccattactctagcacttactctatttgatgatcctgcatggtcgcacatgttggacaacgtgacacgactgcaaccatgtctttatttaattttctgttgagttcgtttgaccaaaacattgaagtgccgcaaaacatggttgcgatcaacaatcttcttggtttcctcctcactaaatgagtgacatgagaggtgagtcaaaccagaccaattaattaaataataatctaactaattaaaatttagaattattcttacaaaacgatcgatattgcatatgtacaattgtgattgtttgtgtggaatattgttttcccaaactgttgatgggaaatgcaatatcgatgatgttcttaagtcgtttgttggttatggttgacctttcagaaaagtactttgacaaaaaaaaatatcatggaatatcagtgtagtatttttattctttttctctcgtgtagtattttctttagaaggttatgaagctcatgtcaaaatataatcatacaactggttaaaataacaatcttggatgagttatttagcatttttctggtgtaaattaatcccttgttttagggatttatgtagatactgatgcattcaatttgttcatgagcgagaaactcatccttaaaagtaaatttcaatgaacaaaaagatacatatcagtacagatatatggacatctactacaactactagcgctatatggtcatcactactcattttatagatgagaactactagttgcataaaaaacggtaggtgtttgtccaatatcagatcatgaaggggatagagttgcagaatgcttgtttcattggggtatatataagagaaaaggttttaccataagtcttgataatgttgatagcttgcgcacatatggatttgattgttaatgagtgcttacgaaagatgggtgatcgtgtacttagcattagatgatattagcggaagaaaagttgtatgatgctaggtaaatggtctcaatgaaagaaaaaaatttggtccacctttaagctattatacataacaaatggcaaaacttttgaaaaaatagaattgattaaacttcagtaatttgaaaatagatgaacagatttcaatgtgagtttgatgaagaaatttaagattcttaaaaataatatactacgtatgacattttctcatggttaacttcaatatcttatagttcttcttctaatgcttttaaattaatttgcgtttaagtatcgcaggacacatatttgtcttagttaaatgtcataggtgacatcctgactatgatcaaccgatatgtctcggtcttcttcgtcatatcgtactagatcgaccacttactgcatatggtcatatgttgggttacggcgacacactatagtaaaaatgccaaaaagttctcactagccacggtgatgtacatgttattgcatagtttgaaatattgcaacaaaattttttgttaacaattcaatagattataaattggtcaaagttaatatatagtttttgcagatacacaaaatttattgattttcctggtaaaatattccgaacaaattttagttcaatttttttaattcgtgtccaaactaaccgtgaactattaccactattgtcaatttgtcattcggtaaaagttaagataagatatgaacaatgataagttgtaaaatgattttatcctagctactactactcctcagtcctaatttaggagagtatatcgaaaaaaccaaaaaa

SEQ ID NO: 28964 - DNA, 1821 bp, Arabidopsis thaliana landsberg
actgtgtgtcttattagactattagtgattttctggaacgaagtactaagttgaccgaaaaacttgtaggtgtttttgttccaaaaggctgctctttacaagtgtaacatggctggaaagcctgccgttcttactcgtgttgtagacagtatgacagacaatctgcggccaactcgtgcagaggcaactgatgttgctaatgctgttttagatggtatacttagtttctgaaatatgtattttgtactgcttataatttataggagggaatacatatttgtggatcatagttttggtcataactttaagagggtttctttcctttcgcttcctgcaggaagtgatgcaattcttcttggtgctgagactcttcgtggattgtaccctgttgaaaccatatcaactgttggtagaatctgttgtgaggtaggctttatcgtactgttctaaagtattattatttccatcaccttcttagtatctcaatcatcttagccatggtttgtcatctgatttctcttatgcattgattacttgtttataggcagaaaaggttttcaatcaagatttgtactttaagaagactgtcaagtatgttggagaaccaatgactcacttggaatcgattgcttcttctgctgtgagcctctcttttgtgttacctatgtaacttaaaagctgacaagttgcctttcaagttttctaacttaatggcttaaattctgcttgatatcaggtacgggcagcaatcaaggttaaggcatccgtaattatatgcttcacctcgtctggcagagcagcaaggttcacaccattccttccaacttaaactgttcgtacatttaaattctaatgtagctgtctaataaatgttttatccatatcgtgaaaggttgattgccaaataccgtccaactatgcccgttctctctgttgtcattccccgacttacgacaaatcagctgaagtggagctttagcggagcctttgaggtaaactttcatcctgattgtgtgaattttgaaaaagaattgggattttctaatgccacttgtcaagattcaatgattatggttgttacttgcttatgactgcatatactatttggcaattgtccccatgatgcaaaggaataacaactcttaaatgtgctttataattgaagataaaaaagaaagttaccctttggaataatgtcacctcttatagatttctatgtatgactagaaaagcttttgtcatatctgaattgcatatatggactttcttttgattattgctcaaacttaacatcgtgtttgtgcctattgttgtctcaggcaaggcagtcacttattgtcagaggtcttttccccatgcttgctgatcctcgtcaccctgtaagtctctattgcatagaatttgattcattgcaaaaagattcttgcttgcaaatttagtgctatagttgcaattgtaactttagtggggtttgaaaccgtattttctctaatgtattgtgaatcctcttgttcaggcggaatcaacaagtgcaacaaatgagtcggttcttaaagtggctctagaccatgggaagcaagccggagtgatcaagtcacatgacagagttgtggtctgtcagaaagtgggagatgcgtccgtggtcaaaatcatcgagctagaggattagaagaagcagagtgagtcgttgtctcggtcctttttgttctgctactaatcaattttatttccttcactaaaactattggtgccgaccaagaaaaatacctgcaatcataggttctcgccggctatatgctagataccggagtgaaaatatat

SEQ ID NO: 28965 - DNA, 1683 bp, Arabidopsis thaliana landsberg
atcctttaactggtgagagcaagcaaagatcattcattgttcagatcatcttacaagtctaagaggacatcatgaagttttgtttacttagtaaatattttcaaagccatatttgagttttaggtatatccttatggaagccatgtataaaaataatagctacaaatcaccagctaattacacaagcctggtcttatgaaggaaatatgaagcttaaagatgctttagcatagccttctgtgcaacaaaagtagaactgttacctgtaaagtgaacaaaataggaaataatagcaatagttgcccatctactccagccgtttctccccatacgacgtccatccttttagcctgaaaatgaccaccacacacatttttacagcaatttcatagtggtggatatgatttggagagagaaaaatgtaaatagtatggcacctttccaagtgcaatgcgagtgtataatctttggcgctgatatctattttgcagaagcatcgcgacaccttgcatcatagcccattggaggaaaagacgcactcctttctgcaatagatttagaataatctataacatttgttggatagattttactctgcatgtatgataataagttaatacccaatacctgcttctgaacgcagtttggttgacctttgatttcccaagtgagactgacaagggacatagccattgcaaaataatgatgataaagccacctgcaaaagcatatcaatgaagaggttttagtcatcttcgattgagaggatatatacattaagataacttcagatccaaatcatcaacccactaaggcctttatggacggccaaaaagtttctcattattctctacatgatataaagatctaatttctaactgacaacaaaaataagctacctctcctctgtaacagcactcccatagttgtattcgataccaaacaagagacattttataggaaagtcactttgcgcaaccttctgcattacattgcctatagaaattcctatcatccactaaattcggatgcccgtcattcagcagtgcaatcagtataggctttaacaggtgccaaaaacagagcaaaacacaacgggtagcaaaacattgaccagtgaggcagcgacaattgatttgatgaatttcttgtagtcaaactaacaacctaaagtaaatagtaatttttcacagccacaggcagtcataaaagagcgaataaggagagttagcggcacacatgatctaactataggaaagagagatgatccaaaagaaaatgaaccatgcattcaaagttaggattaacctaatgaatttagagcctaaaatcagtgtagcctaacacaacctaacgatccactctaccaaactttatatcatgtgactttcagcaatagcataacaactgcatcaacctagcatacttcaaatttaaaacactgcataacaatagccaaccacaacttaagagatcaatacaactataatcaactcaggaggaatatgataagagtaccatgatcggatatcactcccattagctcttaaaatgttctctcgcataaccaaaccagcataaagaaacagtagccaagcctgatcaaaggaagttcacatattaatacaaaacacataacaaaacttaagtaactcaaatcaacacaacttcaaacgtattatg

SEQ ID NO: 28966 - DNA, 1933 bp, Arabidopsis thaliana landsberg
ccttctcttcagggagaactctcctcctgggtcgacgccccgtttgacatcttctgagtttgatagccctgtgtttcctgaggaacttgcaactagcagggcggattccaaggcttctccactgtaccagagattgctatcagccttgatatctgaggactcaatgggtgtaaatgaagatttacaagttgatcttgacgatgactcagaattcagtgttctgaataatatggagttcaatgggtttaggaacaatgaaaggctggaacttgatgaatcagaagatgatgggtctgcaattttgttcaagggtgttgataagtcagcccaccactgcaatggcaaatttccagataattcacccattgacttcgtagatattcaatatgataaattggggatagatgaaaagatttatctggaagcccagtctcttggaatatccatagacctaatggcatacgctctagtatcttagttattgtgaaacctatttatgctatgtacttttgggtcttactgaagtttgttattcttcttgtgttttcttacagcctagtatctcaaacgtggaggatgaaggtattgctgacgaaattaaaaagttggaggaggctatctgcaacgaggtcattatttcatcaaatattatatttgttgtttcattatggttttcttgtctccattgcgagttattaagtaatttagggggattctgatgtttcttaagaaatccttgtaaaaggaccaaagtaatatttttgtgtcccatgtttactttctctagagaaaaacaccctttgattgtctctatgttatttttttcagggttctaagaagaaagagattgtggataggctactaaagcctgccatcgagatgaaagaacttcaggagaagtacgaattttcccttactctgctttttgggcactccattgtggatctgaattatgatctgacggtttttcatctttgttttttttttctttccatagggagcttgatcaacttggttatgaaaagctcatcgagatggcatatgaaaaaagcaaggtaaattgactgtaaagttggctcattttcgattttgttttgcttctctggcactgccaatttatacgtagttatttgttaataactttgtttccttcttttacaggcaagtcggcgtcatcacaacgctggtggaaagaattccaataacaagatttcaaagcaggctgcattggcttttgttagaaggacgcttgaacgatgccatcaattcgaaaagacgggcaaaagctgctttagtgagcctgaaattaaggatatgttcattgcggggttggcaacagctgaagatactctcatggacaaggagtataatacgtcaacttcaagtatgttctattgcctacataaaattacggaagctcttttaaatccatatcctcttcactaatttgtatctctctttctttcccttacagcgcccatgggctcacagccaagctcttcgctggcactcattgggcagaactcggagaactatgccaaatcttctgatgttctaccatctgaaaatgctttactagaacaaacgacggggaaagaagatacagcatggtccaatagggtcaagaagagagagttgctgctcgatgatgttggtattgggacacaactctcaagtaatacaaaggggaagagaagcgacagggacagagatgggaaagggcaggcttcatctagaggcggaactaataagatcggccggccttccctgtccaatgctaagggtgaaagaaaaacaaaagcaaaaccgaagcagaaaacaactcagatatctccatctgttagggttccggaacaacacccaccctcgttaccaaaaccgaatgaagcaaacagaaagtataataacttggaggcactggaggagacagagc

SEQ ID NO: 28967 - DNA, 1703 bp, Arabidopsis thaliana landsberg
  unsure (1)..(1703): unsure at all n locations
ttatctcgtggtagctggaatttccgaaaaccaatcgaattgcctgaaaaatcagacccacgcatttgttttacatggtctaacatcccttgttagtgcaccatcagaagaactcttcaccttcatgaatcatcgaccttgggcggggagaaggagatgtccttgttagattacaagcgatgctcttggagtcatcaagttctcgtttttttctttggataagaactattaggactacaaccatcacaagagcaaaaactgtgacagcaatcccaatagtcggaaccattgtcaagtgatatggatggtgactttttaatggagacaaaacaagattatcgctgcttggactatcagctaacactggaggagaagcttctggactcagcgatgatggagacgaacctgagtagatgtgtcaagaaagtcagaaaagaaaagaaagtccaatcttgatctgatactaagaagattatacaggacacactagtaatatatacaggatctgtcaagcatctttcccaatatagaaacaatgataagattctacactccatgaatggtatgttgacagagaaaacagtatatacctggagtggggctaagctcaggcacattaaagaagcagctagctagttcaagagccgatgaattgtcaacccggcttgctaacacagcataagttgcatcacgacaagtactcagtttgatgctattatcagcaccaacgaggctcctaaggtagctgatactggaattcaaacaattcctgcattgatcacccggaggaagcgggagtttgcagtttctggaaacatctccaaaacttgtggaatgaagcattggcggtacagtagtcagaccctcacaatcatagttaacaagaatcttggtccctaatccacagaagatggtagcatttcttgggattccataaagctccatggttctagagatagnnnnnnnnnnnnnnnnnnnnnnnnnnnnngtaactccaagatcagctgtgtagtttgcatagcgggcgacagatattgcaacgaaagcattcatgtagcggcagcatttagctctctcggtgttgttcgagcatacggaagccactagagtgaagttagatgaagtaaagtccaatggacaacctgtaaacacaatatatcacataactttgcttcaattttgcaatagtttctttctctcaatgaaaatctcatcaaagactacgactttaagcaacgaattcaccacaaattagaacaaaggaacacacaaaacactttaatgcacatcgaaattcgcacaaagcttaaacctttcagaaaaagcaagattaacaacagctcgctttctcttctttatctaggtacgaatcaaacccatggaagaagattgtcaaggaagattctcaaaagactgatgtggcgagagacaaaacctgcttcggtgagtaaaggaaagttctggaattcaagcaatgcgaagaatgcgagcaagagagccttgattattaaaccaacaccatggccaaagaacagagagagtcgctaggagaggtcaatgagaagtcgcctgacgagaatatgacagcggaagaagggcagtgcctctgagatggggagagaaagagagagccccccacttttttttattcttgaagaaacccattaaaccccctgaaaaatcctcaaatttggcattctctt

SEQ ID NO: 28968 - DNA, 2347 bp, Arabidopsis thaliana landsberg
atagaagatgcgtagtaagaaaagaatagctagtctaggataaaatgattatatcatttaacgtttcattattgcttcaacctgattcatgactatacaggaaataataatgtaaggtggtttattcttctttcaaatatttggtctgcataccagagtttaaagcaaatgaactctacttcttcctgcaggttttaaataagattgaccttccaggcgctgagccagagaaagttctcagggagattgaggaggttggtgattatgttcattgtgttacccattttatgatgttcgtattcaatagcaatcatacaatgcaaccagtaataatttgaacagtattcctttttgggtgtctgcaaaaactcttcagtcttttatttttctgttgtcaatatgttatcttgacattttacaaggttctagcttctagtattagatattatgttgattattgcggtacattcttttatgctttaaacattttctttgtgatattatgatccagtctcatgttcctcgaatggggtaattgtctcattgctgcaatttcagagacatcagcctttatgtgaacactgattgataattcatattgtttgtaggttattgggttagattgtagcaaagcgatattctgttcggcaaaggttagattttaaaattgttttgctattctgctacccaaaaattaagacgtgtggctttctatccattcaattacaatttttggggaataatatatacacgcaggagggaattggtattaccgagattttggatgcaattgttcaaaggatacctgcacctctcgatactgcaggaaagcccttaagagctttaatttttgacaggtttgcacttgttgtttttattcataacgatttttgccttttctagagaaaacagtatgaaattgagtcttggagtcgaagttgtattcgtatataatgattggactgatcattggcatgtcaagtcagtaccagttaatcactggtgaactaaaaatgagtgtgaaatactcgtgtttgttttgcttgattagtctacaagtgtgcagtttttatatgtgaactactttatatttttcgtccaaaattcattttgctgcagttattatgatccatatcgtggtgtcattgtatactttcgagttatcgatgggaaagtgaagaaaggcgacagaatttttttcatggcaagcggaaaggtttatctcttttactctactgtactgtctttctatttaatcgagatagctttccatttgccaataatgaattgaatgtaatttgtgcatgagataggttttcgcggtctatttgaataaagcgatgtgaagtgttattctataattctttcaggaaaaatttgagaatgtttaagcttttaagaacgcttacttgtgtttcactagtatccttcatgttctcagttttgcatcaattgcaggattattttgcggatgaagtcggagttctatctccaaatcaaattcaagtggatgaattatatgcgggtgaggtagtgtactcttttgaacataatattttgtttgttttgtttactttcctgtgcatccatgtcccattttcttgttgaatttttttctttcagcagaaaccttggtattatgaaatgaaaatgtcagtattcttttgcagtttccgccgttctattccaacacatgttaataggaaaactaaaagcgtttgtaaatggaaggattttcttagcatttccttgtagcagctttggcagaagatagagttgtggttaataacaatttgaatgcaatgaaacaaatatgttttcacttttcttggttggctatatttgagaagaaatggttagttgcatcttcccttgctcaagttctaatagctagaaagatgtttttagcactgattgatgctgctggtgtatatcagatatgcctgaatatcatgccacatttcttgcacatattttaaaggttactgtccttaaatacaggtaggatatattgcggcttctgtaagatctgttgcagatgccagggtaggagatacaataacacattatagcagaaaggcagaaagctctttacctggttacgaggaagctacccctatggtgttctgtggtctttttccagttgacgctgaccagtactgagtttttgtttttcattgttgactttttgctttttcattttgtatttttttttttcacacctggtctatgatggcaggtttcccgatcttcgcgatgcattggaaaaactgcaactcaatgatgctgcattgaacgtatagctgaataaaatgacagaaacaacatttttctttcatctgttacc

SEQ ID NO: 28969 - DNA, 1201 bp, Arabidopsis thaliana landsberg
  unsure (1)..(1201): unsure at all n locations
cagagaacttgacgccttcatcatctgctgatgttcccttgaacaatgcaagcttgcccttgttctctagaagctttaaggccctcattagaatcgtccgatcgatcccttgaagttctgaaacatcaaagagaacatttggttaccatttcacattgtgtgacacaaacaaaatcatattagaaaaactagaattagagttaaatacctgttccaagtgattctgtccctgaacgtatttcttcaacagtcataacactgtcctctaatccattatctctcacctgatacatgacatcgattagagaaaccgatttttttgaaagtttctttgattaattcacatgtgactcacaaactgaagaacaatgtctgcccaatcttgaatccggtgccacagaataagacatttcctatgccctttatctaaccactccgcacgccctgacaatagataaaaaatgacacattcaaatgaaactatgagactaagaaacctcattctaccaccggaaaatgaactcataaaaccaaaaaaacgtaaagacacaagccgcttgaacgactcagaatctaaccttcaccaacaatggctgaannnnnnnnnnnnnnnnnnnnnnnnnnnnnnnntcctacaaacgaaatgaaactaatgctttaaaacacttcccttgaaaacatagaaaaccacaagattaacagcgaaacgataagacagaaggatcatactatcaatggcagagtttgagaagagagggaaatcttcttcaacaccaatcaagaaaatcttttgggatttgcagtaatccaaaataagctctttccagagctgtatctgtttctcacgagtgtccctcacaggctgcaaactgaaaagagaaacatttcttcaatctataatctttaagagaaaaaaaaaaagagaaactttgaagaagagtttgatacgtgaagtatggaggataattgaagaattgaggaagcttgaaatcagccaatttctgcatctttggacctcaatatctattcacaaataaaaacagagctcattggattattctgcaaatatgctaattcgaattaacgcaaagagattcccaaaatagctctaaccgattcaattttcgatttcgaagcattattgagaaatcgaatcaccaaaaccccaacattagaaatctaaaacccagaaacaacaatc

SEQ ID NO: 28970 - DNA, 3449 bp, Arabidopsis thaliana landsberg
ttgtgattaattggattttgattattacagttataaagttgaaaacttggaagtgtagatgattacatttttctgtggtttggttcctgttatgttcattgttctatgatcttaattatatgttttgttattgcttctcttctggagtgtgtttatttgtatattttggtcaaatctgtgctctgtttagtatctcttggatatcttttgatacttaggttgttgagaggagctataaatcgtttctgttgtctattttgtaggaatcatgaagcctgtcttttgcggaaactttgagtatgatgctcgtgagagtgatcttgagcggcttttcagaaagtacggcaaggttgagagggttgatatgaaagctggtaagtcttggttcttgtttttctttatactttctcttagtttttctgtttggttgaattgaaatggataaagaagtctcgtaaaccactaccaatccgatgaacaacaagcgaaattcagtcaaatgcattgttcttaaaatccacttacgtgcgttcattccatgagactctctggaggactgtcctttcaaagtgtgctctctagcctctgcatcccacattccgtattccctcggttcgctaccatctgattccaacatctgccaaggaacttgaagcaccccgcatgaagttcatagcatacctcagaagagaaaagatcgagtaattttagggtaaaaccgccatactcaacatttgattttggcgcaggatttgtttcgatcttgggatgcccattctcccacacagcccattgatggacaatatggaaaatccatttcctgcccaaaagagtcaacctcatccacgcaatggcactacgttcccataaccccgactttagttgcatttcattcctcttgacttttctcctcttcgagatgcacatgcctctttggtagacttataccaacctctcacagcagaggcagcaaatcaaatggagtttgcgccaccgcgtttctgttcacaattccgtctcatctcctcctcattttcagttcttcttctttgacatattaattccataatgcaaggtctgtaaaactacttatagtttgtagagattttaggttcaaaacttatttgtcacagtaagtagtaaaggctgttttgatactgccgtggaagggagagtcttcatattagaattcctcttggaggaggttctttttcttggtttacttgataagattgttctcatgttctgacttttcccttttggttctctccccagggtttgcttttgtctatatggaagatgaaagggatgctgaagatgcaattcgagcgcttgatcgctttgaatatggtcgcacaggacgcagactccgtgttgagtggacaaaggtagaatcttgaatatcattttaaaagttattatcaggacggatttagtgatggaatgcaaattctaatactgggtatagaatgaccgtggaggtgctggaagatcaggtggttcgaggagatcatcttctggcttgagaccttccaagactctgtttgtgatcaacttcgatgcacaaaacactaggactcgggacttggagaggcactttgagccgtatggtaaaattgttaatgttagaatcagaaggaattttgcattcatccaatatgaggcacaagaggatgccaccagagcattggatgcttcaaataacaggtttgttctgtccattttagtatctaatcactttcctttcttagactcacgtttcatctgtgttttcattcagtaagctgatggataaggtgatctcggtggagtatgctgtgaaggatgatgatgctagaggaaatggacacagtcctgaaagacgccgtgataggtcacctgaaaggagaaggcgatcacctagtccttacaaaagagaaagaggaagccctgattatggccgaggagctagtcctgttgctgcctacagaaaggaaaggaccagtcctgactatggtcgaagacgtagcccaagtccttacaagaaatcaagacgtggcagtcccgagtatggtcgtgaccgcagaggcaatgatagccctcgcaggagggagagagtcgcaagccctactaagtacagccgcagtcccaacaacaagagagagaggatgagccctaatcacagcccgttcaagaaggagagtccgagaaatggggttggtgaagttgaaagtcccattgaaaggagagagagatcgaggtctagccccgagaatggccaagttgaaagccctgggtcaataggaagaagagacagtgatggtgggtatgatggtgcagagagcccaatgcagaagaggttagattctgaaataggtcgatacttgtttatatattattgatgacatgaatcgtaaaccatttctcttgttgttgcagccggtctcctcgttcgccaccagctgacgagtgataagagtggatccacaatctctatcaaagtaggatgttgtaactgtttgtagtcaacaacgctatgtcgtcgtgattagtttttgtcgtttggtttttgatagattcgaactcggatcacttttattgtcggattgaaaaacttatgtcaagttactacatttccggtttttttatcacctctcagtttgaaccccaatcatgtaatgctttcccgtgacaataagatgcgaacctcaaaacatcttgcatcgaaacaccttgagagtgacaaaatcgaacgcatcgttaagtaacttaaatggtacgccgaaattatggaaggcaagaacggtcctattgacttaattgggtctaaaaactactctaaacgcctcttgtcaacgtacgaactagtccctaacctttgactcaaatataaatattggctacaaatagacttatagttctgcctacattggtcgtctgctttagtatatttgttaccaagtaaaatgctgctgtagagtttaatgatctctttgtctactgggtttctccaattttctgatcgttgggattcgtgcaagtcgagagagtctacttggttgaaactttctgggttttgatttgagttgcccattggatttgaagttttagtcttttgttggtaagttttaccctttgagatatgctcgtctgatagtatagggctttcgagtgttatgaaaaattcgccttttcgtcttctgatttggttttcatttccttcagctaaatcttcgtaatacttggatcctgaatgattaatcatagctagaatccgtttggctttgttatttgggtcagagattctgagaggacgctttaaagagtcaagcttttcattcctctgaatccgtccttgtattggacgtcttgatctctgtatgctctcctggagctatcgaaacgagttaatcattgactgatgctcttggttcggaagctgtatatatgcacaggagcagtggcatcaa

SEQ ID NO: 28971 - DNA, 1069 bp, Arabidopsis thaliana landsberg
tgttgttttccatgagcaaaacaaatgtggtcttaatcttccaaagaaaaactgtagacatattttattaggaaaaatatcgtgaaaaaacataagctttaaaattttgaacgaaagagcatttttcaaactgttatttaaattttaaaatggtggttgatttttagtaaaatatttaaatttcgttgatttggtcgaattaagtgaattaagtatgaggttaagttaccggttaaaaaaagtattatggagttaactttcagttaacagacgcaattatccaactgtcgtccgtcactatcttcaagtgcatcgatggagatatcaagaacatcatcacctctagaagaatcagacgcaattatcgaaagttaatggcgttatggctacaatgatatctaccaagatctctcccaaaacttttttgatctccttgttttaaattttttttcccgaggaatcatatgtaagggtttaacattgttgtaaaacctaacttttcacataaatgatatttacatgagtagcaaaaaaaaaacttcgagttaacagtctacatctagccaaaacaacaacatctttctttatgtggtcatttaatttagtgaaggaatcaaaatccctagatcgaaatacaattttcaaaaaaaaaaaacacaattcttaatcctagcaaaaagcctcaaatacttttaaacttttcttgatttttcatgatagcaaagacgtatggaaaacgaaagaggtagttataatgaaaaaagataattacttaggaggccgaatatggtctttggctaaacattttggcgattatttatttttcttcccaccgactttcaattcgatgcaaaaaataaagttattataatatcagcaataaactcatctgaaatattagaataagcaaatttactacgtaaatttcaacaaaaattaactaatctagcttaaccagattaactttacgacatgcctaatccatacaaatcaataaaatttaactattttactaaaagatcaaacaaaactttgggatataaatgatattttgaaagtttatgttttt

SEQ ID NO: 28972 - DNA, 1484 bp, Arabidopsis thaliana landsberg
  unsure (1)..(1484): unsure at all n locations
aagatgatgttcctataagacgacttaaatggggaactgcaagcctcatcgcccgttccccagttaccccaatcgttttgccaataattcaccgtggttttgaggaggtaactcgtccagttcccttctaagtctgcttaactcaataatcgtttaaacttcggtagctaaatgtctgcgggaaagagaaaaagccatgaattatgtatccattttccaaacttcgaatttctgcttgatagtattattatgtcttcattcgaaggtcacttacccacattgttgtaacggcttagatgatgccggagaactacaataatggacgaagnnnnnnnnnnnnnnnnnnnnacaaacaccttaaagttgtggttggtgaaccaattgagtttgatgttccaatgatggttgagactgctgtcttggactcccgccatgtaacccctcctcttcaagaagtgaaatggcctgtcctcacttctgctggccaagtgctagacgaaactgctcagagacacctctacatagctctgtccgagaagattcaatcctccttggaaacattgagactcttagccaagcggttgtgacttccgccgggaaacttcatatcaaaatccggttcacaacttttaaagttccggtttagattcgccatggtaatcaaatattatctttattcaatttcctgaagctgagaaaaaattatataactatgaaaatttaataactcgcattttaaattattttatcgactaggatatatagcaacccgcaataatgtatgttgttgaaatgttatatcttatcaatatcttatgattatagcaagatttcagtgaaaaaccttaacaaaaaaaagatttcagtgaaaacttttttttgtttttcagtgaaaacttaaaaagcgacaataatcgaatataagcatcaacaaaatataatacaagaccgttatttgtgtgatgtctgtaacgctgatgatctggccagttctgtctttctgctgatgatgttggacagaaacagcattaaacgaccagtttgaacagagagagaaggttctttctgataagagagacaacgtgggtggcaaacagacgcggcggccacgtgagcctattgagccaccggtgcggcgagtggtgcttacgcgaatgcaaaaaaatcagttaatgggccctacagggtcacgccggggacgcactatcacgtgaaaaggaaacttcccaaggtcagccaaaacggtttcgtggcattttggtaaatcagatcacgttttaggggtaaacgctagctcttgcacgtggtaatggtgctcgatgtatggcaaattggtaaattatggctgaatcgcggggtaatggtgtatgctcccacgtgctaggtccggaggacatgcgtgacctcatgtagtggcaatttaataaatatagggtcaaatctcgggtataaaggtagtttcaataatttgttgtattttggct

SEQ ID NO: 28973 - DNA, 1667 bp, Arabidopsis thaliana landsberg
ccgtattccttgatcttatttaataatcttaggatatcagctatgagatcattatttttgtcaatgcatatgctgtagctgtcagatcattattttactcactgtgtttttagagcctcataatctgtcaacgtgtctttcttacagtatccaaaccctggtttttctgatacatgatgctaaaaatgacaggttataaagccacagcagaaaatggagtctgcagctactccagtagagagggagaaacaagcagtaaatgttgcaccagcatcagatcctccaaaggtggattttgctactgatctgtttaacatgctatcaatggatgattcgactacaaatacctcagaggcaactcctggcgatactcctgccgatgataactcatgggctggctttcagtgtatgtatctatctagcatgtgataatctaacatcgtggcacatttttcctatccttgttaactttatgtcaattgttcttcttttgaaaatgctttggagtaatagattaatttctgaatcctaaaactgtagctgctggaagtggtcaaacggcagagaaaattgtcacagccaagcctgctgagagcagttctcctccagcttcatcttctgactttgaggatttgtttaaagacacacctaatttaacaactcaacaagcaccaaaagatgtgaaaggcgatatcatgagcctgtttgagaaggtaaattattagttaattatatacgcttctcagatttcactgctttgttgatattcagctttccaagtttcgtttttgtatcattatttaacttacatttacaaatatagcgaatgatatgatttgtgttttgttatcacttactatgatttcttcaacacgggacatttggaacaccagagcagattcaagtgatataactctgtgtgttctatttgattacagacgaatatagtatcgccttttgccatgcatcagcaacaggttgctatgctcgctcagcagcaagccctttacatggctgcagcgaaagctgctggaggcactccaaacggcgtgaatcaacaagctattgctaatgctcttaacgtagcttctgcaaattggtcaaacaccggcggctaccagatccccggaatgactaaccccgtaggtggtcaagctgatctccagaaacttatgcaagtaagatctcccctttactttttttaagcaagatcaatattaccattgaccaaagttcttgcaaaattctcactaattcttgctctctgttacatcgccataattttagaacatgaatatgaacgcaaacatgaacacgagacccgcacaaccgcaagagaacactctacaatacccatcatccaggtatgcacacaaaactgcatcttgtttgtttcttctgaaaacatcataacgttatcaaaagtgcttaacctaactaactctcatatgatctttggttgttattaataatgcaggttctacacaatgggtcaagctaatcaagtgaacggtatgaccccaaactcaaccggtaaacctcagtcatcatccgcaacccaaccaacaagcaccacaccatcttcacaatcaggcaaagactttgatttctcttccttgatggatggaatgttcacaaaacattgatcaagagagagagactttttt

SEQ ID NO: 28974 - DNA, 1062 bp, Arabidopsis thaliana landsberg
tatgacccaaagtatcatgaagaatggataagaagcaatgctaatgcaactaatgaaaacagacgccctcgcaggcctcgcaactcggatggaggcaggaacgatagggaaaaccaagacacgggttacagacgtcctccaccaaaccaaggtatgggaggtgctccacctccaccgcctcacataggcaacaacccaaacatgcctcctcatatacaaccacctaacatgaaccagaactacagaggtcctcctccaccaccaaacatgaaccagaactatcagggacctccaccaccaaacatgaaccagaactatcagggacccccaccatcaaacatcggtcagaactaccagagaccaccaccgccaaacatgaaccagagctatcagggacctccaccgtcgaacatgggccagaactacaggggaccttcaccgccgccaccaaacatgagtcagaattaccagggaccaccaccaccgaacatgaatggaggatggtctggaaactaccagcagaacggtggataccaacaacaaggtcagggtggtggaatgcagcaacagccttacccacccaataggaaccagagttaaaccgtcttgggttttcatgtataggagcggataccattttgtggtcagtgttcttcagtttgtcactctgctttgtgagagagagactgagagttttagtctaataagttctgcatgagttattgtagccagcactcgtcaatctatttatttattatatcctcaagtcaatcttgtttatttatttagtggcacaagaaaaaaaaagagaaagctctataaactaggagtagaaaagagttaatcaaaatccattgatttcatggcaaaaagaccaaatctcgataaaacatcacttcctcgttggttcttagcagcttggatctgatcagcaagtgagatatctcctcttgttcgctctttccttatcaaatccaaatccagtttctccagttatacatgcaactgaaacaaccctatccgttccaattgcgattttaccaagacttgttttcttcttgt

SEQ ID NO: 28975 - DNA, 652 bp, Arabidopsis thaliana landsberg
  unsure (1)..(652): unsure at all n locations
aactcatctttgtattgacccttttgcagcagcataacgttacacaatataatcacatcatcattatcttgagtagtttgattataaagtgataaaatgtttcatgttatacctttccagtgacttgaaatgtacaatgtttaagaagatcagaaatagagctcaaggagttatttgacaatgaagcccataacgtgtcctttgaagaaccctgcaggaacatgaacacaatcaatgacattcacgtaagattgagaggatttacaatatagaaaagctatgaaagaaggttttgtcagaacctcgcggtctagaatgtatctccagaatctattgacaagaccaaattgaggaggataggaattggacactttgtgcttctgcattaaacaatgctcaaacttttcaacaaacgagacaagaaacaaagagaacaaaaagagtaaaagtatgaaatgttgttactgaaaactgcagcttgtgctctttgagtacagatttagcagtttcgatgttaatatncggcatgaagtcgaccataggatgccctgcagccaaattgaatatgttctaaagtcagcgagttaacaggaacaaaaattctctcgttagaaatgaaagatacagacctaaaaacttagaactaaaaaaa

SEQ ID NO: 28976 - DNA, 1781 bp, Arabidopsis thaliana landsberg
aacttccagttgtcaaaaatcatgtagtcgatagtttagtaagtggtaaccatgatttttgattagtgtcaaaaatacagagatcgttcaagtatcatagatctctgcgattgttacaatgataactgtacaaagctaaggcctaaggctaagctgagaaagaacaaaacaatatgggacctaaaacgggacagtatatggtaatgaaaaaattccaacttcagacaataacatagctctaggcaaagaggaacaatctcttgacgtctgcaagctcatgatcgtgtcttcatcagtcttataagaagacttggcagaagaaacattttctttccgacttgttccaaaaagccagtcatcgctgctgctatcatcttcctccaaggaaatacagggaggaactaattcatcaaacaatgaattgtaccgggattctttgctaggcttatgtttctttctcttctttgattcggaaataattgctaccttgccactctcaagagaagttgagggtacagccacatcatgatcacagatacttggaagagagacagaacttggtaattcgctaggtctctgagtccctgaagtggaacaaacaggatcctcttgaggtacagcttcagcttctttcggtttcttgaaaacaatacgaatccgtagtggtttaccagctacaggtgtagctgcaaatgattaaacgtctctgtttcagtatatgtattcaaacacaataaagatattcatctaatccgggaagaaacaaagcacaaacctttgatttgactctcaacaacagcaggagaagtttcccttcttctcttcttactgttctggctaccatcagacaaatatccaacctgaggttgctcatattcttctgttaaacaagatttctcaagctgttcggattcatatgagactgtcttggttgtggaatacttctgttcaagggatttcttctctttctttaatttcttttctttctttttctccttcttctctttccgatgcagctttttagaatcaactattggtctttcgatctttataatccaatcagaataaaggatttagactagaggaaggatttatcaggcaaacaaccagatacccatatacgtgggtaacatcattcaaccacaaacacacataatgttaattactcaaaacatatatctacaacgcgtctttatggttgactttataattggagaccaaaccaaactaacatacatgtctacacgacatcgttaagaacgaaattcattatgctaaaacatgtatagtgtagattcaattcatagatctatgctgaagatattttcctacaatttaaccaatcaataacttatatgcaacctagagatctggctacaaagaggatattataaggaaatttaactctgaccgaacacagaaacccatgttcagacaagaggacaccgtagcgaatcaatcacaagaattgagtgctcgacgaaccttagtccattcgaccaagttttgaccgttcgcccagttcctcgcatacacaggcggtggggatgtgaaatatcgtgacatcgttttttcttcttctctttctttctttctcagatcgaatcgactaacggacaagacaacggacagtaattcggacagaactaaatcgaacctaggtttcagattcgcgcctaatgaaacttcttctttgtggcgcgaaatcaaaacgaaatcgataacgagagacggaagagagaagaaccctaattttttttttcgattcgattttgttaatc

SEQ ID NO: 28977 - DNA, 2760 bp, Arabidopsis thaliana landsberg
  unsure (1)..(2760): unsure at all n locations
tcacaatgtgttagttctctcggttttcatggattgatctgtctttgtttgctacttgttataggtcgtctatgcgattgaggaacgtgcagaccagattgattatgttcttgtggacactcctggtcagattcagttcttgacatggtctgcttctggggctataatcactgaagctttcgcttcaaccttccccactgttgtcacctatgtggttgatactccccgttcctcaagcccaatcacttttatgagcaacatgctttacgcttgtagtattctctacaagactcggttgcctcttgtcttggctttcaacaaaactgatgtcgcagatcacaagtttgctttagaggttaactttctttaattgcctactttattattgttgtgttggaatatcttctctttaatcctttggtactgatttggttttatgcagtggatggaagatttcgaggtctttcaagcagcgattcagtctgataactcgtacacggcgaccttagctaacagtctctccctttcactctacgagttctaccgtaacataagatccgttggtgtttctgcaatctctggtgctggaatggatggcttctttaaagccattgaagcaagtgctgaggaatacatggaaacttacaagtaatgatgcattcttctcttcaattcaccctcttttgtctgcaagttctacgctcatgatttgtgttttacttcagggctgatcttgacatgagaaaggcggacaaggagcggttggaagaagaaagaaagaaacatgaaatggaaaaactaagaaaggatatggagagttctcagggaggcactgtggttttaaacactggtttgaaagacagagatgcaacagagaagatgatgctagaggaggatgatgaggactttcaggttgaagatgaagaagacagtgatgatgccatagatgaggatgatgaagacgacgagacgaagcattactacctatgaattaaactcaaagaccagacttatcaagacgcttttactggttttgtttgcgtccttcccttgttgtcccagttgtgtagttaaaacataagaattgattctctttgtgagacattgtctaatgatctaatgacgaaactataaactagcacttttgaagactttgtacacaatttgagttcatatgcacaaggaggaaaaacatttgtatcggacaagaaaagcagacagaaaactagggaaaaaaatcagagccaacactatctcacttccacattatccacaactataaaggtcaagagtcaataacattatctgagtacacttgaactgtgcgttgtggctggtgttttgtggaggatcaagattcagtcttggtggatttcatcaaaaggcgcatgagcaaatctcacatcttctggccttgcaatcacgactggctcatcagcaaatagggccttgaggaaagatggagttttcaagggacgtcgatccgtcattcggggatacacaaatgccaagaagtagtatgcgtggcccgctatcattccctataaatttggataaaggttacggataaggatgatgatgcacagaaagggaagaagatatatgtgaaagcgaattaggagagatagcgtaccagaaaatccccccatgcacttgcaccaacaaggatagagaatccaagaagtacctgtaatttcagaatttggtaaaagaggcgatttaaagcatcgaactagttagggaacttccgtgaagagaatgcaaaagtccaactaacccatggtaaataagctgctgtgaaagtgaagaggccaaggaaactcatgtggatgtaaggattttgtttactccatacatagacctacagaacataggaaaagtgttatagatggtcttgagatgaattcaaaatcatttgagaattggtaaaaatagcggtattgagaaatagaatttaccatcatgaaagtcaatgaattgctgaggaagatgattttggagaatgaaacagacaaataaggtatcattccgccaatgagaacaataccagttagaacagttgccccgaataagagcatgtaaaggaaatccgcggtctttcccctgaaggagttttcttcgagcagtttgcagtatcgagctagaaaaaacatatggaacaaaaagtccaaatctgcaaaagattgataacaagaacaagtcagcttctaattaacaatcacaaagaaaataaattcttacagggagcatagtactagagatgtcaaggagcaatggagcatatcacaaaaatgaatcttcaaaaacttaaaagcccatcaacaagttgtagctagaccttatccgtagctagaaacataactatgacacttctaagcactaaattattcagacaaaactaggaattattcatcacttatgtgagtttattagcaatcatgatcattcctagtaatctaaggaagactatatcatatgaaaaacagcacaacaatagtccaagatgagaaagatatgaacatttctcagaatactaataatatataaccaacacaagagctgaagataattttacccatctttcggaaataaaggaaatttgtgacaagacgccagaactggtattgcttcaccacangggtaggatttaggtagagattataaggagatataatctgcanaacaaaacaatgttccacacaatgttacatcataagccataaacaccacacacttagctctaaacttaaccattcgtag

SEQ ID NO: 28978 - DNA, 997 bp, Arabidopsis thaliana landsberg
caccataccccttataaaccgtctttttcacaccttccattcaacaagaactaattgttgcgtatttgaccgatcgaagcaagaaggaacgttctgtttattttcttttttgttaaaaaaaatcagtatttaaatcgtgatttgtagaagaagtattatcatattgcctctacacaaatctgtaagaattgagagagataatttattttaaagaattcccaaagaagcttcaaagactcaaaaaggaaagtaaccaagaaaaagtcaatggagatggactcaactactacgatcaaaccggagaccctatccaccgtgagttcctcacctccggagaaaatccatctccggccaatgactctttccgacgtcgacgatttcatggtttgggccactgactcaaacgtcacacgcttttgcacgtgggagccttacactagccgagaagccgcgatcgcgtacttaaacgacgctcttttgccacacccttggcttagagctatatgcttagataacgaccgtccgattggctcgatctccgtaacgccagtcgatgagatcagaggagagattggttatgtcctcggaagcaagtattgggggaaagggatcgccactgaagcggtgaggcttgtggcgggggagatattcaaggagaagccagagatgcagaggcttgaggcacttgttgacgttgacaatgttggatctcaaaaggttcttgaaaaagttgggtttgtgaaagaaggtgtgatgaggaaatttatgtatcttaaaggaaatgttagagatatggtcatgtttagtttcttgccttctgattcgttgcactgatctgatttgaattaacaaatatcaaatatatatattaagtttgtttgatgtcgaaatttatattttgcttagtttgtaaaaatcacatgtataatttgatgtgatgctctatctttcttcttcttatgtaattgttagttgtaaccttatatattaactattt

SEQ ID NO: 28979 - DNA, 3604 bp, Arabidopsis thaliana landsberg
atccccaccgcatgggaactcaaactaccctcacacacgcttgtgacggactccaccgtcacccacgtctccatctccgccgtgacgctgccgttaaacataccccacgtgttggtttcttgtgtttcctctccgattatcgatttcaccgacggatcgagactatcttgatccaacggcgagtactcaccggaaatatctgatttttccggcaagagttgcaacgtcacgacatcagtttgttcccgatcatcagacaagtcagatctgctcttacctcgacacgtgcctttattattcttcgaaaccctaacgtactttcgtttggttcgtttgctcataccgtatgagctattgttgttgttatctgccacaccacatggctgaccagtcgtcggctttggagcgatcggacggtaccggagcatgagagcgtcaacggaaactttatcctgcgccttaccggcgtatcttagcgttcccaaccagtcatcttgatccattttttatctttctctcttatcatcaaacactctcactctttttctttctttctttctctctctttctctatagtctttctgtgtgtctctctccggtgagccgaaaagattatcattcggggcaaatgaggaggaatggtaattcgccacgtggctttagggttagcgtaagatacagttaaatcatggaatggttcctgtgcttttcctatgccatctttggcaccatataagggtcttttttttaaatagtaatgtttttttttttggaaaattaaaaataagggtaacaattttatttttttaaaatgtatattgaacgattcattttgtaaaaagtttttaacaactccgatccgccgatccccgatacagatcatgttgatcaatcataccatgtcttacgacgtatcgccatatacatctatgtctatggtacgcgtggggggctgatggtacgtcaatatatatgtcagtcagtcagtctatatacatgacacatatatgtacatatgtgagatctatagaagaatattttctaaggattttatataaccacatccatcgattgtatgtatgttgcattgcattgtttttaataccatacacaaaactattatgactacaaacaaaaaaaatatagaatggaagggatagaacaatcgttttgaatttaaatcaacatccacgtacatttaatttaaacaacgaaagcattaattgttttttttaccttgcatatgccatacaaaaattacggataatccggattataagtttataatacgatgaccaggaactattagattagcaagagcatggatggactcaacaagagtaaatataaaattatggtcacttaattaactttaaaaatattttttgttgattagcaaaatgtatggtccaacacataatatacagtattaaattttgacggccggcaactataggcgaagaaacacacacgttgttgaatagaagcaatgtgaatatatctttacccacatagatgcatacacataggtccatatgataagttaaatggtatgtttatttccccaattttcttttatttttagttgagatttttatattatatgaacgcatgggtcctacgtaaacacacaatatgctgtttcaccttattcgaaggctcttattggtcctcgtaatctccgaccaatcaaattgcactatgtgtcctccatttctcacttgaaaagctgttatgtcatgactcatcaaacattcatacttacatatgcatgtctacgttgagcacgaaaaaaagaagaaggaattatgcgcatcattagcatgcctatatatgtgagtaaacgaataagaaatgttagcgatctaatgatatttgcagacataatatggttgttaaaaaaaagaaaaaagactaatgtattaattaattgttaaataaaacaagcaaaaactgaaacgagtagagtttttattttttaatagattttatcaaaaaaaaaagactgcgtctgcatggagtaattaatactgcattgaattataattttgtttaggtgttttgaatagttttttttaatctattttttcacaacaacttttgttaatatagtccagatggatgccacataacaaaagatttttttctagtaacaaaacaggattagtaactaggcatacactgatacacattcggttcggttcaattcttcgggttttgggttattcgtttttagctttttagcatccataaggaaaccgaatgtttttcagttcagttagtcttctttctttgttttgtgttacaaattaagcgagcaagttagctctccagtttataatctctctttgctgtcactttttggtatgtaacttactaacttgtgttgttgtcatatgaagagaagaatgggggaccaaggatgaaggtaaggttcggttctttgagtattttggtttctttttgggtacttcaagtaaaaatatataaaccgtaaaaatatccaaacctttggaggctgctggtgatgctttaatttattccaaattgttgaaatattgttgaaaacatagtttaaaacaagtatttctaggtcttgtggtacataaagtgttccagggattttttctcgctgaagttcgatgttttgggaaaaagagagtacaaagcttggttcccgcagttaagggccatttgaccgtgagtcttagtattattttcctttgtgattgtggtagattgcttgtttgttctttttaaaatttctctctgactttttgtcggatatgcgagacatatgtttagtagatgaagcatagtttctgactcggtcgatggttaagtatgattccacttgatagtaaaatgtgattattcctgctaatcacgcatatcacatcagaatgattaatggtccttagatcaaaaattatccacagttgtaattaaaatctcattatcaagatcatatattaatagcacaagtgattagaagtgaagcttcctcctaagaagtttcaaaagttgtgattgccaaaactttttttaaagcaaaatcgtgttttcaaattttcactgtttgtttatatatataatatgaaatgattagaccattaagccagtttgaagtacaaacattgtcactagtatgataattcaaacatttttttaattatctccatactgattttttaaaatccaaccaagtctacttctggtgatgtatgatcctaaagtcatatgttttacgttgcattcggaagatttttcttctcaaagataataaagatccaccaagcttttaaacttttcaagtgttatctacttcgacattttctgggctcaagcagtacgttgttggcccattaaggcccaaataagtaaaactgtggtcgtgtgtctagcagccgctgtgtcatcgtggaactcccattttctctcttttacttgttcgttcccaaactcttctccctcgatcgtctccgtcgccgatctcgtttcttcattttccggtgagactctctctctatttctctgtatatctcgaattcgaaaccttcgttttcttctttgacatttgattgatcagagttatctatattcg

SEQ ID NO: 28980 - DNA, 2052 bp, Arabidopsis thaliana landsberg
  unsure (1)..(2052): unsure at all n locations
aacattagaactaattacgaatatatattaaacgttcaacattggtatgaactaatacgtgtagcaatatttttacaaaaaaactttcaaaatatttgagactctagctagtgtttgtatctataccatagggtatgatatagttagtctttttctatatgcatttgtatatcattaatgaataatgaaaagggtttgtagaatatacgaaaagcttaaccttttttttttttcgactgaatttttccattagataatacgattgaaggatataaggtaagatgcgtttttggaatacaaagccggcaagagataaactctatcagaaacaaagccggcggaaaatgagtaaatctccggaaactaagcccaaacaagggaagcataagatagaaacaaaaaccaagactaaaaataactctaaagatatatacttgccaacacaaagctcccttgaaccaaatcatcaaagccaaacactaaacacatctaaagaaacctcctatagtgaaacaatactacctctcacaaccaagtgaacctaagctactattccgacaagagagaatcaaggcaaagcatataaattcccatactactcccgaaaacggcgatatcgactcagcgacaatttaacgcctcgttagaagcctttgaaccgaccaaacctcgatcaggtcttaactgtagaaacaaggagcgaaacaaatcttcaaccggatgaaaccaatctcaaaagagagcagcacaagatcgaaccggaaagaaaccataaagaccaccactagaaccagggagcacgagtaaacaagtccaacaaccaaatagagatcaagctagtcaccagaaccgttacaaataaccaaaacacatgaacacaaagaggaagcatgagagacgagggagggaccgaggtaccgagaacggagccgttgttgctcagatccagtgaaggaagaaggccagagcctcctccggtgctccaaatgcaatgaaacacgtgaccagagacaaaacgaagatccacaccatgaggcagaggcgagaacgacgactccatcttcaccatctaccttaaggcatgtcgatttcggtctcatagaaccaaacctcgatagatctgatattcgatacaacccaatccacctcgccgaaatcaccacgcttcacaaccgaagaaagcaaagacaagagataagagaggggaccgacgctggcgctttaggagccaccacgcgccggtcagatctagccaagacggtgagttgaagaagagcggcgattaggttttagagagagaaagttgaggaattagtggtgtattcacaaaaatcttaacctagtagtcatttcttgccaaaaaaaaggaataaaaaacaaaaaagagctaaagcaacaaaaaagcattggatttggtgttattcattagtgagccaactttgcattaggccaccaatatgctatagttatggatttatggtatagttatagaaagcaatacggaaatattggtggtgtacacataatgacatgaagagacggatgtgacaataaagaattanaaagaaataaaaaggtcccgtacgaggaggagtagtaggctctttggctccacttctcattgtatccgtaccatatggcatatgcagccacgtcaatgtcccatcttctctatcttcgtgtttcttctttcttttttttactctttctattcttcaacttggtacgttgcaactcgcactgatatttttataaaaatctctacaataatataaaattttcatttgtgggcaacactagggttttgtgccaataccaatcctcgtttctcacccatatttctctgacagtacacgagtttatggtatactaagcaatgatctggagttatgcaattgttaaagctatattcccatattcgtttgtgtatagctgaactattagacgagtccatatctcaggcatcattatgtatgtatatttaatgaaaatataaaaagcctacagggctcaaccaactaattatctgacgtattatggtgtagttttttt

SEQ ID NO: 28981 - DNA, 2603 bp, Arabidopsis thaliana landsberg
gaagaaaaaagatgtcttgaaaaaagtataaatattaacgcagacatacagatatatgaagcccgcccgtagtttttaatttttgtttttttttttcttatgaaagacgattgtctagatattaaataaaatgaactagtagtacaataattatcatatattatagattagattagattacattaaaaattccataaataatgcaactcaacctctcttttggccttttgtgtttgccttcttttggtccattggatgctatcatattcccctcttggtatccaaagtttgtgtctacgattaagaaacgtattattataattattatcatagtcacacattaattatattcatatacacaaatatacaaacttaattaattattttggcttcaaccataaaagtgcttagatgtatagttaaatttgaatagatatgcatacaattatgaaatgagcagcaactaattaatattgttacaaacttcattttatatctcaacttgtattttattaattattactgtgtcactattctatttgaatatggacgccggtcttattaaactcaaccggtcaatattcaaaaaaattagttcgacgtcattgtaaagcattatctatcatttcaacgtttaaagagaaaaacatgattttgataaaccaaagacattacatcagaattttatataaaggtatgtttttcggatatgaggtcccattcctctattctgttctttgaaagctatagtgatgcattattttgagcatgaaatatcgacattttcttcttcttcttttttcagcattagttttctagtttattttagttggaactttgaaagacagatacgttgtgggttcaatgttagtttgttacaagtacaagttacaactggaacacaaggtcagggaccgacatgattttaattaaacatccccgctttgaaagactaatattcactttgctttgtatgaaaaacaatatgggctagtagataaagaggataggcccatatttttaggcccaattgaaacccctatagtaattgatctgttttgtttcttcgcaattaaaagcccacataaacatactaatatggaggctctttaattttcatcaggattatccccacctccgcgagataacactcttgtacaacgttagcttgtgtgccaatttgggctgtagcccaagttaataacaagtttgtttatatcaggctcaagtccataagatacgtttgaggctttttatgttttgtactagtagatttcaatttgaggaaatcttttttttttttggtaggacttgaagaaatcttatcaccaaccaaaatttagactataaattcaaaagagtaaggaaatgaaaagaaaaagagatgtcttaaatctaatattgaccacaataaatatacgtcagatagacataaatacttcaaactgtgacacgatgtctcgtagattggcgattattttcccttgttttttttttgctaccaaccaagtaaatttattaacagtctcttagtacatttggagataaagaaatacacataaaacaaaagcaacaaggaatacaaatatcgacacgagctggtaatgacaacgagtggctgcgttgtgaacttgtggattagttagagataatgattaagacattgaagtattatttgtttatgctgatatgatgatccatacgaactttcctttcgaaaaattataaaaggaagtatctttgaagaaaacgggtacaatatgcaacataaaagtcaaataaaaagaatcatatgacataaaactttcacaacgatataagtttatttcttacatagaataataaataataataaaaaaatctgtaactattatgacaactaatgaattttttttaatttttttttctataacgctgaaataaataagtgctttaattcgagaagtactttgatcataagttccataaagtcaataacattactaaagacttccaaagacttttttgacgagatctcaaacagtagccaacacgcgcttgcacgtgaggaccttctccatcgctggaaaattccatttttttaaaacagttcataattccacgtgtcaatcagcagatccacctgtcttcttcacttctgctttttatttcccactctcttctgtcgtctttcgtcttcctctgtctgattcagtagagatttgtcatcgtctctcttttgtatgattgtatcagtgagagaacccaacaacctccaaattcttcctcagatctccaaaggaatccaatgaaaaacttaaactaatgttgaaacttcctccgagattcttctctgtttactcaactctcatccacattcttgcctccttcctctgctcctccgacgtcagaggcgatttcccggcgacgagattcgatctcggaacgttgactctctcaagcctcaaacttctcggcgatgctcatctcaacaacggaactattaagctcactcgtgaactctctgttcccacttccaccgtcggaaaagctctttatgggaaaccggttaaattccggcacccggaaactaaatctccggcgagtttcactacttacttctc

SEQ ID NO: 28982 - DNA, 2583 bp, Arabidopsis thaliana landsberg
gcgaagtccggtcttaattgtgaaaaacatagaaccaccgtttcctcctccgcttcttcgtctttccgtcgcaggtttggtcttaatcggaaaaacatagaaacactggctctctctctctctcgcgacgcagatttcgattcgtcgaatattttagctaatcctctctcttaatctctttgaacatttttccccaaattcgccgtagtgaatactttctcttcccgtaaatctccaaaaatcgagttttttttattacttctcaattgaatttgcttcttccgattgatctcttaattgattcgcttgtgggttggatttgaatcctctcttactttccaaaggtcataccttttcacagatctatctttgaaattgtgaagaagaagaagaagacgatgattcgactaagaacatacgcaggccttagttttatggcaactttggctgtaatttatcatgcattcagcagcagaggcacaatcttaccctgcgactgtttatctatcaacctcaaagatcagtttggtgctgcttaatcaatatgtgtttggtacttatgctcagtctctggcatatggtcaaatttgtcttgttggggtctcttacggaagcataagtcgagaggctaaatgaactagcttggagagaacttatggagattctctatgccattactatctttagacaagacttttctagtgggtttcttcctttggttgttactcttctgttgatcaaggctttacattggcttgctcagaaaagagttgaatacattgagactactccttctgtctctaagctttctcattttcgtattgtctcttttatgggtttccttcttcttgtggatagtttatttatgtacagttctatacgccacttgattcagtcgcgtcaggcttcggtttctctcttcttctcattcgagtaagttgattttcatctctcattcttagcaggattgaagacagtcatactggtgatattatgtagctgatgataggtttctgttgtaggtatatgatactggcgacaacgactgttgctatttttgtgaagtatgttttctatgtcactgatatgttaatggatggtcaatgggagaagaagccagtttatactttctatcttgagcttatccgtgacctgcttcacttgtccatgtatatctgcttcttctttgtcatattcatgtaagttttttcatccatttttttttgttctcaaattagattatttcaggaatatataatgcagaatgaaacatctgggaaagcaaagatgcttagactttgtagaacaagttcttgtttctttgttagactcattaatattcttatttgctgtttaggaactatggcgtgcctttgcatttgttacgggagctctacgaaaccttcagaaacttccagattcgtgtttccgattaccttcgttatcgtaagatcacgtccaatatgaacgacaggtttcctgatgcaactcctgaagaacttactgcgtaagtttcagatatcccatttatttttttatgactccactgaaaagtagacatattatgagtttggtcttatggatcttggatagttcttggggaatcttgtgttattgaatgcattttctttcttttatgcagaagtgatgccacatgtatcatatgccgtgaagagatgacaaatgcgaagaaactaatatgcgggcatctctttcatgtgcattgtctacgatcatggttggagagacagcagacatgtcctacttgcagagcacttgttgtacctcctgagaatgccacctctgcagctccaggccaacgtgaattacaccaaggttcccaacagggtaaatcatgttgcctcacatgcaaatttgcaataaaattgaaatctgttatttatgcattatgtgttgaaataattttttgctttttagactcttaatattggaacaggaaagactaattattagttttgtgcaaattgaatcaggtacatcaagctcaggtaaccagggctctgaaataagttcttcagctggcgtttccaataatagtttgagcaggcaccacgccaggctttaagcagctgcttctgcagcctccgtgtatgggaaatcaatggtttacccatctgcaaacacagtagcatggtatgtatttatctgttgactccatgcttggtctcgagttgtagaacagagcaagcgtcaactgacaaatatgtttgtcccttatgttaaggtcatcgggagttcctggaacagagcaagtgtcaactgaaccacatcaaactcgtccttcatccatttcccaatctccgcttcctcatcacagccttcctgttgaaaactctcaagcctatgcaaatatgtcggagactaagctagaagaaatgagaaaatctctggaaacccacctcgaggtatggtacctgactaatgtaatatcttatatgaaactccagaacaggttgttatatcttgtcactgtaaacgttgtggtgtagattttgcgaaaccgacttcactttctggagaagaggaaaccagaatccgcaggggaaccagagaacaaaggaa

SEQ ID NO: 28983 - DNA, 1605 bp, Arabidopsis thaliana landsberg
atacacacaagccacacataacaagtaaaactatccccgaaacaaatagttttatgcagtcccggcccgtccataacgcagctagagcatgtgtttctgtcgtgaattatgttttctatgatctcagcccctgttatgttttaaaccacacgttctggtcttcaaactcgttaacccattccaccctataaatcccttcttcgtaagcagggatagattgacgagtgattgaaaataatctttaatgatcaagaatttcctcccattcgccggaaataattcacttaaccaccaaatgaaagagttttgagattaattaatctactctttaaaattttaggcatatacacttgattgatgtgatgacaaaatgatttgagtactaatcaagtacaatcactacaaaaaaaatgtgtgtttttacatcatttattttatatatttttattagttataaacttataattgatggcaagaaaaacatttacatcactaaaaaaagtgacttttgaaagtagtgatgcaaatattttgtatcgattcttgtaaatcgatcttaacatatatcaattacaaaaaataatgttaaaattcgcatcatttaatttaaatgatgttaatatttgtaacatatataataatttatgcatgccaatatttctattacttgtaaacaattgatgttaaattagttatcagttttcataattgattcaaataattgtgtgatttgaaataattaatttctacattaatttaaaacattgtaatttcataattaatttgtagatactagtgcattgaaaagaagcgaaaaaagacgtcagcagtctataagatggattagcttcatctccaaggcatataaacccattcgtgtcaatcacaagtcacaccttacaatttcaaaaaaagtttctgaaacttggtcttttgtgctatcattttgattcttgtgctaagattcttcacgaagatcaacaactctaaaaagaagaggaaagataactttaatggatagaaatggtgaaggagaggtcgaaaatctggctttagataaagtttctgtaaaaaggtgttaaagaaaaaaaaactagtcagaaacattaaatcaaaactattcaaccatcaatgtctacctcgagagattcaagacgtagaagaagaagacaaacgtgaacgtctttaaattatgaaacctctttcttaaagttctcaagaggtgctcaacaatggcggatcaatctcttctacactctccgatcaacccacatttctttcagcctattcttacagaatctcgcactcacctcgtactctgttctgttctgttttcttatatcttaccaaaatgattcgtttgtttagttttttgtttgcatgtttgttgcagaacattcctgtagctttcttctcgaagcatgttgaaggaagaaacaaccaaaacaagactgtgacgctaagatcagacgcgtcggataaaacttggttagtgaagatggacggtctaaaactaaccgacggatgggaagattttgcctttgcacatgatcttcgaactggtgacatcgtcgttttcagacttgaaggagaaatggtgtttca

SEQ ID NO: 28984 - DNA, 2143 bp, Arabidopsis thaliana landsberg
gatgataggtatttatattgcaatcatacatattgtagtttgaagtaattggtcatttatgttaattgctgcttataacacatttgagttggacatgttgctggaatctgtgagctctgcggccagaagtgcagaaagtttgttgaacatcgtcacagagaagaaaataagtttttctggctccttcaggatcgaagaccattttacgggtctgtatgcttttttgggaccattttacagttcgtagttatatcttctctcttcccctatttaggtgtcctcatatgtttggttattaactttaccattttcttattgacatatttacagccctaaatttaaggtgtattgagcgactttatggcgaccatggtcttgacgtgatagacatattaaataagaatccagccactgcacttcctgtaatcctaactcgtttaaagcagaaacaaggtgaatggaagaaatgccgtgacgattttgataaggtctgggcgaacgtatatgcaaaaaaccattacaagtcacttgatcaccgcagcttctacttcaagcaacaagattcaaagaacttgagtgcaaaatgtaagtagacttatagaagtcgtaagaagatttatattcaagtagttcctttatcctgttttatcgctcacatacatccggcagtgctatttttcctttcacttattcctttctcattctgtttttttattgcttcgtgaaccagcattgttggctgaaattaaggagctgaaagagaagtctcagaatgatgatgatgttctgttgtctatttctgctggttacagacaacctataaatcctaatcttgaatatgagtatttgaacagagctattcatgaagacatgttcaaagtagtccagttttcatgtgaggagttatgttctacaaaagaacagctcagtaaagttctgaggctttgggaaaatttcctggaggcagtgctgggtgttcctcccagggccaagggcacagatcttgttgaagatgttgtaataaaccccaagactctcgatgtgaatcacagcacatctcctaacggggaggctgctgtgagttctggaggagacacagcaaggttggcttctaggaaacttaaatctgctgccaatggagatgagaattcttcatctgggacattcaaacatgggataggtttgttaaataaagattcgacagggaaagaaaatcttgaagatgttgaaatagctaacagagatggtgttgcctgctctgctgtgaaaccccagaaagaacaagagactggaaatgaagccgagaaaaggtttggaaaacctatcccaatggatattagcgaaagagcagccatctcgagtatgtcaatcccaagtggggcagaaaacaatcattgtgtagtaggcaaggaagttttgccaggtgccttccagatttaagctatttaattttatttgtgctgcttgattatttgtgttgatatttgttactttacaattaaggtgcacatgagattcaagccaaaccaagcgacaccctcactgatattcatcatgatgtagatagcattgaaactgttcattcgactcaggtactagtactacaatcaattgctcgttgtaccatatttacaccattcagttgctcgttgtaccatatttatatattcgcctaaacccactattacctggaggtttccatagcttagggatgtaaaaatttacagtactacctatgggacccaggggtgtaaaaatttaaaatgtgtcttatattataattatgctttccggacccttctgactctgtcatattactagggaggtgatgttggcaattcgatagttttggcaaatggattaaggtcagattcttctaaaggtactaggaattctgatgatcccgaaggtccctccagaaatgagaaagaggaaggtgaactgtcacctaatggtgattttgaagacaactttggtgtttacaaagatcatggggtgaagtccacatccaaaccagagaattcagcagaggctgaagtagaggcagatgctgaagtagagaatgaggactatgctgacgatgttgatagtgaaaatgcttccgaggcatctggaactgaatctggtggcgacgtatgttctc

SEQ ID NO: 28985 - DNA, 520 bp, Arabidopsis thaliana landsberg
tgagatctcttaatattctaaaatatttgacaatacgtacctactaatttccaacacagtggaccgactcttattacatttttttctgactccaatatttatagatactacaaaagcattgaaaactgctaaaacacaacattttttaccaaacaaaaacatatacacagtcttaaggattacagttaatatggctcatgcgccttagagtaaacctctttcacagagagaagctttcattgctttcagtgattcttccatatcatcacaaatcttgtgagggtctgatatgacggtaggatcatacgccaacgaaattatcattttatccgcgtaactcattaaatgtatcaacaatgcctatcaaccacaaaaacactaaaaaatttacacacaaaaaaggcttatcatgtaaatttagttgcgcataaaaaaatgaactacgtacatgtgagtgtccgtaagaacttggagcgatgtaagagacaggatggccacggaaactgatttcttccatggg

SEQ ID NO: 28986 - DNA, 3075 bp, Arabidopsis thaliana landsberg
  unsure (1)..(3075): unsure at all n locations
ccgcccttcgattgtaattttatctctgttactaatttcacacttggtttctgcaaaagttctgttgatcggtaacagcacatctctctccttcgacgacgtcgaagccactttcagtaagttctttgtcactgttccatcgattactgtaaaagaacgaaattgtggaatctttggccttaatagcagatttgggtttgatcgtttatatataaagtttgaaactttgtttcctttttcaagttattgtttgtttgaaatgttccaaattagaattgagaaattgggttttgaatttgttcagcttttgttatttgggtttgattgtatatagagaaagtttgaaactttgtttcctttttcaagttattgtttgtttgaaatgttccaaattagaattgagaaattgggttttgaatttgttcagcttttgttatttgggtttgatcgtttatagagaaagtttgaaactttgttgtctttttcaagttatggtttgttctaaatcagatttgagaaattgggttgttatcagatttttgttcattggctttgatggtaatggtgattgatttactgttttttcagctccgatgattaagagatcggatcaaggcggtgtgttgtatgtagcagagccactcgatgcttgttcggatttggtgaatacggtgaatgtgaaaaatggaactactgtgtctcctccgtatgtgttgattatccgcggtggttgtagtttcgaagataagattaggaatgctcaaaaggctggttataaagctgctattgtttatgactatgaagattttgggttcttagtatcaagtaaacacttctttccctcgccttttttcgttattttgtcgtaggctttgtattgtttcttgttttgatttgttgcttgagactttggttacataccttagttgttaatgatcttgtgaatctaatgtagtggcaggaaacccctctggtgtacttatttatggtacgtttgtctccaaagcaactggggaagtacttaaagagtatgcgggtcgtaccgattttgaagtgtggctcatgccaagtttcgagacttcagcatggtcaatcatggctatttctttcatatctctcctcgccatgtcggctgtgctcgctacttgcttctttgtccgtaggcatcgagttaggcgtcggcgtattctggctcttaatggcaatgactttcatcgtatgcccaaaagcatgataatacgtatgcctactaccatatttaacggtatttgtgatgaagcaactacatctatattgtgctgcatatgccttgagaattatgagaaaggggacaagctaaggatcctaccttgccatcacagtaagtactttgactcagttcgaagtaaaaaaaaattcatgcataaccattcttaattggttcttcttgttgtcttggcagaatttcatgttgcttgtgtagacttgtggcttggccagaggaaatccttttgcccggtttgcaaacgcgatgcaagaagcatcagtaccgacaagcccccatcagagcacacaccctttctttctcggactcctagcatgaccccgacgtcatcgtttctcttatcatcatcctccacaaccccattgcagtcatctcatgagctaccaatatccatcagagtagacccttctttaccatccacctcaatgcagccacacacagttcctatgtatctctcccactctcgctcccacacaagcttccaaaannnnnnnnnnnnnnnnnnnnnncctataccagttagccggagttcagcagatctcaggaacgccgtttcccaaagatcttacaactcaccccaccaggtttctttgcctcgtttcctccactcaagatatacgcacatacttggcccgggaaatgcatcaagaagccgggttgttgggttgttaacaagccagcgcgagcattcacttcatcaaaatgactcgcgcaggtctttcagtcactttgcatctgcgagctccttaccaggctggtaaaaccgcaaaaaaggtaacaccgtactaaccaaaaggttcaatgtcggggctcattgctttgaagaagcaatcaactcctctgaggatgtccctcggctatgaatttgtgaccatgcatgattttggcaaacaatagagttaaaaagagtgttcagtgtgactgatattcttcagctgtacagttgtggagtaatgatgaatgtgagatgagtgagtttgaagagtaaagcgtctctggtgaatcattaagctaaccattgagtgtgggtatataactagcttattactttggttctttgtctatatatgcttaatacttgtcttctaaaagtttaaccattacgcagaaactataccgtatacttaccgagtagattaacaggtgaagacgaagattataatattttcttcctaccgatgttaccacagattgatttggcgtaaaggccacggaagaaatacaagtattagagtcaattaaagacagaaatctatggatgtattagccattgtgaaagagtaaaactcaggccttttgtctctaggcttaaagaaaaacacatttccaatactttgtagaagtgtgccattatccaaccctatctctagtctccaaagactttccgatcactcctagcttcccctgacctcgaggccgcaagatcccttataggaaaaaaggagaagtgtctctatgtttgcttaaacttaaataaaaaacctggctggttcgtacattcccttggttcagatatttacttggttgtaaaactcatcatttgcgtcaactccccaagatgcatgtccctcgagaagaagcatgttttaatgttatcgacggtaagatctgtgtttggaggcatcagcagtaagtattatgacactgctgagaattatggagaagtttacgacccaaagacacagacttgggagccaacaaaatgtactggaagattttctcgcgagaaaattattggtttgtgccctactgtttgcttgttagagtcaaaaaataacgtatggtggacagcgagggtttttgaaactcgc

SEQ ID NO: 28987 - DNA, 2095 bp, Arabidopsis thaliana landsberg
  unsure (1)..(2095): unsure at all n locations
tataagcacaactatttcagtatatattgcttcagtttcactgagaacacaggaatctctgattcaactcgatacattcaacagaccgaaattacacagttcaacaaaagagatacaataaaactcacatgagatttggaatttggaaggagacgtcttctgggattacaagtcggaaatcacgtacggactgggaaggactctgtttcctgggaggcgtgacaatgcggccaagactgtgatacgtacgataattcgcgagatacaacgaaatatacaaaattttataataaaccaaaaactgatagtttcttttaaatgtcattaaagggagcatcacaatttttgactaaaaaagatctcaacatttaattcttccacatgtaaaaattaaagcttctcaatgttcatcagagacgcagcaaaagacaacttctgagatcagcttagagatccattgattctgcaatcttgcttctggcctcgttgcaaagaacatccagctttgcttccatgtattggtttatggatgataactttcacattcccatggttcagtataccttcactacccgttggcatgattttgcctgttcccattagcgttattggaactactgcaactccggtcttcgcagccactgtaaatgcgcctttctgtaatatcacaagccagcctcttatgttaacacacatacaaaacatgatcaagaagaatcttgagactgtgtttaccttgaaagaacctaaccgaccatccttactccgtgttccttctgggaagaaaaacacagatgctcccttctttaaaagttccatgcagcgttttaagcaatcctataatttgcacaagagttaaaacactttgaagattgtttaaaagcaaaacacttgaaaaatgtgggagaaacaaagagtaacataccacttggcttcttgggtccatccgcttcaagggaacgacacccatcatggacatggcccaaccgatgatgggaattacgaatatccctgtcttgctgatgaacttaaagctttttccaagactaagaagtgtgtagatatccagaaaactttggtggtttgaaacatatacagcaggagtgtctgatgatggcagattctccaaaccctcgatgttgattttgtaaaacggataaatgcttatggaagcccaaagtttagcaatgaagtggtggaattttctcctatagggatcgaagagaaggacgaacggatgcccaataatcatcaggacaatgagaaaagtagccgaaatgccagcaacaacacaaaagaatatccctctgagtcttgagctcaacttaatctctgcacttcaaagttgaaagaacaagaaaggattgtgtatagagacagaaactaacaaacaaaaagaacgatgtaggttgtaatctaccaaaacagatgaaatttgttcacaaaggtttagccaaaaaaaacctggttcaggaaaagaagagtcagnnnnnnnnnnnnnnnnnnnnnctgctctcacagtgatatctcttgccaattgacttgatctaggtgatttcttatcaagaaatctgtaaggatcatgtcttaaagagcggttagaccattgaatgccagtacgtcttgtttcgcccataaatttttcactcgggacagctaaagaagaaacatggaaagcgaagcaagtaaggatttaaaagattcatctcagtatctcacgtcgaaatagatatatggataagtaactcgatcagatctcaaaaacaaaatgagtagatcctatataaaattacaagtctttatatatagcaaggaatgattgaaatgatattgtaacgccccgaccagcaacaaaaccgcatcaagggacaattaaaactatagtttgattgccttaccatgaagggaagtagtaaagctcgtcatgccattagaaatgcgaccaaagcaacaaactttatccctcgaaatctgcatctccaatgatttcatagaataagaacaattagaagagagcttcatgttcattgttcaactatgttcaactatccacatccacatcaaaatctgaacagagccagattatgcccaatga

SEQ ID NO: 28988 - DNA, 956 bp, Arabidopsis thaliana landsberg
ctgtttgatgtagttctaaggatgctcatgacttccatggtctaatgactcagaaattgtggcgctttgtacgtgtagcttaaaacgacatagttctctagaacacttgtagaaaaaaccagcagtgcacaaccaaggacaagctgaacatttattctcatcactcaaaacaccgttatatcctatttctagagtgagtagatgtggatgcaacgggtaatttatttcgggaggaaaacccaaacattcttcgtggaaaatgaaatcacatcccacacaagagtagaagttcccgaaatagatcggcatgatgcatgcttggcacatcttattctcgtcgtaatctcttccagtgtcctcataacgtctgaaacgatgttgatgactggaaccgcttgtcatctcagaagactcatcttcttcattctcttcatctacttcttctggaattccctcaatttctataccatcccacacatcatttcttgtggcacatttcgaatgtgccgcgtaccaacaaccatcctttctacaagaatagcccccataatcattgtccatctttttgcgacaaacaccacaagaccaatctccttggcctaaagaaggggtcaaggagatacgatggtgatggcgtgacatctttatgacacgcggtaagctgatgcaattttgatggaccgcaaagccacaaggggaacatatatagaacggacagttcgaatcagtcaaggcgcaggagtcgcaagttaaggaaatgtaccttggaaacagagtaagtgtatgctcatggttcttcggattttctattgataagactgttggtttgtccacacaagcaagatttattgcaatatcgcaagctaagcaataataaaatagcttgttgagatcttcatcacagcagtaacatttccttgtactactattgtgttgcaacaagacaagttgaagag

SEQ ID NO: 28989 - DNA, 1232 bp, Arabidopsis thaliana landsberg
ttttcctcaacaacaacaacaacagcaaccaaggccttctccaatggctagacctggacctcctcctcctgctgctatggctagaccaggtggacctcctcaggtatcgcaacctggcggttttccgccagttggaagacccgttgctccgccttctaatcagccaccgtttggtggaagaccatctacaggtccgttggttggtggtggttcgtcatttcctcagcctggtggttttccagcttcaggtccaccaggaggtgtaccttctggtcctccttcaggagcacgtccgattggttttggttctcctccacctatgggacctggtatgtccatgcctcctccctctggcatgcctggcggtccgttgagtaatgggcctcctccctctggcatgcatggcggtcatttgagcaatgggcctcctccctctggcatgcctggcggtacgttgagtaatggacctcctcctccgatgatgggtccgggggcatttcccagaggatcacagttcacaagtggtcctatgatggctccaccgccaccatatggacagcctcctaatgcaggcccttttacaggaaattcaccattatcttcacctcctgctcattcaatacccgcgccgacaaattttcctggtgtcccttacggcagaccacccatgccaggaggctttccttatggagcaccaccacaacaggtacatccattgaagctcattatgtatgttcttgtctagcagtaattgcccagtcgacttttgaattgatgaaacaggcgatgcctttagacgatgaaagtgaaacatattcttgatgtgacttggggatctttccagaagggaacaatagttatttatttatggatctttctgcctagtaatagaatatgggacaatttatgtagtatctttagaattttgcctttcatctatttcacaactgatgtattacctttgtgtcgcacgttatgattgctttaccactttgaaaattggtagctaccttctgctcctggcactcctggttcaatctatggcatgggtccaatgcacaatcagtcaatgacctctgtttctagcccctcaaagattgatcttaatcagataccaaggccaggttcaagctccagtccagattgtgtatgaaactcgggtggaaaataaggctaatcctccaccacgtatgtcatataactctaattctgacaaggactgttgatctaaa

SEQ ID NO: 28990 - DNA, 2202 bp, Arabidopsis thaliana landsberg
  unsure (1)..(2202): unsure at all n locations
atcctcacaactcatactcactgtgcccactccttaattaacctttgtttaaaactatacagattgctttagaggcaggatttgggagaagtctctttgaaagactggctcttcttggacataagaaatacatgctaaacatccaataccggatgcattgttcgataagtagcttcccaaacaaagagttatatggaaagaagattttagatgctccaacggtcaggcaaagaaactacacgaagcaatatcttcctggagaaatgtatggaccctactctttcatcaacatagcatatggacgagaagaatatggggaaggagaaggacgtagtctgaaaaacaacgttgaggttgttgtggtcgcggctataatagccaaccttctccaaggtaaagaagtctatgaaaaagtttgtctctctttggttttggttcattgaagcagacttttttgtttatgaaatgcagtttcagagaaaacaaagacacgtataaacgttggtgttatttccccttacaaggctcaagtaattgcaatccaagaaaagattcaggaaacaagcataggtgatgcaggaggactcttctctttgaggattcggactgtggatgggtttcaaggtggcgaagaggatattataatagtttcaactgttaggtccaacggtgttggaagggttggattccttggaaaccgccgaagaacaaatgtattactcactcgagcaaggtatgttaggcatatctcatttctttggttactgaaaacgaatgtgtctttcaatttattatttttgttttctataggttctgcttatggatacttggaaatgaggcaactttgatgaatagcaagtctgtgtggaggaatctgatacaagacgcaaaggaacgtggctgtttccatagtgctggagaagacgagtcattagctcaggctattgctagtacgaatatcgagtttaggccactgaataactcaaaatggaaggtaatgactttgctttgagacttggctttgtgcatgtgaaacagcttcgcttcagaaacgtggctgtttccatagtgctggagaagatgagtcttttgtgttcttttagtttattcttcttctctgagacttggctttgtgcatgtgaaacagctttgcttcagcgacgaattcaagaaatatgtgggagaaattaagaacccggagacttacaggaagataaagaatttcttagaaaggttatcacagggttggcttaaggaagaagagacagagagagagaatctggtttcttcctctcagctgttaaaacaaagcaagatcgacgatgttcttaggatcatttgggcggtagacattcttaaggaagattttcactatgatcaagttctgaagatttgggatgttgtaccatcatatgatgctcctgaagcattaaaacgtctagacttaaaccgggcgggctatacaaaagatgagatagaaacatgcccagccagatgtatcagagggtgagtaaaacacaaacatgacatcctaacttgttgtaactagctaaagcatttgtacgtctaagtttttnnnnnnnnnnnnnnnnnnnnnnnnnnnnnnngagatggtctattgagtctacaaatggcatacctgaaaagagctcggtggtttgttcaagtgatgttatcaagacatttggatcactcaaccttgtgggagaaatgttgtcttcagtaccatccaagtaagttaatacttgtttggattactcaaccttgtacattaagaaagatcaacctctcatcgattctttttgtatgcaaacatcacaaatgggcgtgtagtgactctgtggaacctctggaagttgagaaggaagagcaggattttgaagtagatcgattaggggatctatttgcctataaactcactctgtgacatggtttcctcctattaggaacaaatctacgttagttagtgtttttgtgaaaattctttttgatgtaaattcgaaattaggtttccactatgtacttgctttaaggtcccaactcctaacagagatgtactcagaaagcaaattctgaaaagtttgaatcaatagtttcttctccaactatcgtttacaataaacttaaaaataaatatgtacaatagtaaacaataaacataacattttgttattcccacaacacaaaacattaaatcaagtc

SEQ ID NO: 28991 - DNA, 1987 bp, Arabidopsis thaliana landsberg
  unsure (1)..(1987): unsure at all n locations
acgggatcacgttcaagatgttagggatgtactacgcgatggtgacgaggttcgggttatagtcacgaatattgacaagtgtgttgcttattttggttactgaaatttattagccatgactcatgatatagtttttaatcaaaagttgttccaatgcagagagaaatcaaggattacactatccatcaaacaactagaagatgatcctcttctagaaacattagacaaagtgattttgaaggtaaaacaatgtgaatgaatgtgttttctgtctcttgtgggtcttagtgatttttaatagataattgaatattgttacaggacagttctactggatctccttcgctaagctcgaacaatggggatacaattgaacctcttccagggctagaaacaatacttgaagagcttttaaaggaagatgggtatatagacaatatcattttataatttaaatttactatgcagtcctagtcagctctttgcataacatctgcttattataagtgactaggatcacctctactctactagatttgntcactcctcgatttgcgattggatatatacatgtcaatagctattgctggctgatactttttctgaacccatgatgagttggatattgttaattgcattacttatagaatctttgtttcaggcataacattttggttccagtgtgtaactaatattcatttctatattgcagaatagaagctgtgaaaatcaaccggcaaggatttgagaaaagagtggtttcacaagacctacaactttggctctcaaatgtgagttctgtttctctttactttcccgtaagaataaactctgctctgtgaaaattctgattctatgcgcatgttcacacgcagacaccgccttctgatgggaagtttgttcttcttgcccgtgctggaagacaggtaaatctcagaagctacccatttatatggccatagatagagagattcttggtttgattttaagtaaaatattaacattacaggtgcaagagatacacttgacaacgtctctggaacaaggaggaatcaagaaagcgcttcagcatgtactagaacgcgtcccctaagaacccgaaaaaagacttttgatactcagccactatattcagctctatgcatctcaaactcttgccaatgtaacttcaagtggagcagagactacttcagaaatattcttaaaaggcaaaaatgcaaattcatttgtatcatcattatatgtcacacataacacaaacctatgaaaatatatgtgtatactcaatgtttttagttacacattataaacttcattaacataaacaactcataatacatcaaattcaagtctaaaaccttctcaagtcaataattgacttttttgacaccatgttttggtaagtaccatcttttaaaatagtctcttaaccaagaataatcaaacatgataattaaaaacaattttatccttttgtttgttttctctcccacaactttcctgtctctgccatgcacatgctctctctctctctctctttcttctctcttattctcactccaatgattacagaggccagcctaagcagcctacccactttcaccatctaatgttcccacattaacataaaacacacgtaagattcttctccttttgaactgtaaaattcactcttttttaatttcttaatctttcttatcattactttctcttttttattttgtcattttctcttaaaccttcttcttcttcttcctttgatcagtaaaaaaagtcaccgccttcttcttctctttcctctttcccctaattgatcaatcatgcttcttcatttctagttctctcttcctgactcatttccctcattagatcttcttctacactaaacccataattgaaagaagctcttttcttgcttacattgaagataaaaaatcatcacttgttttgtttttgaagaaacacacattaagcttgtctttttact

SEQ ID NO: 28992 - DNA, 979 bp, Arabidopsis thaliana landsberg
gtttctagcgaaacatgatcactctcttcttagaaatgtctgattttgtgtgtttcttcgcgatctttgtcttcttctctgttttctcgagaaaatcaaacggaaaagctatgagctttgtttcaattttcaggtttttgtcggcgaaatgtctcagagacttcatggttgcaaaacatgcgggagaaagtttggaactttaaaaggtgtgtatggtcaccagaggatgcattctggtaatcacaatagaatcgaagatgagaatggtttggaaaggatttggggtcttaagaagaagtctagggtttgctctgtttcagcttttgatcgattcaaaggatcttcttttatgactgagattgagaaacatgaggtgattgaagctgcattgaacttggttatgttgtgtcaaggagtttatgactttgcttctatcagtaatttgcctctaggtgatggtttcatggatttagagcttaaaccttgtcctttgagaaggaaactacagaaaaaatctcgctccagttataaatgcagtatatgtgagaagagttttgtgtgttctcaagctcttggtagtcaccagagacttcacagatggaaactagtgcctaaacctgagtacattgaagatgatagttcactgttagactcatcagaagctaagaagattgtttcaaaaccatcaagctttgaacatgctcaggaggagaagatcttacaatgtgttgagccgaaactagagttccacgaacagcttgctcactcgggtttcgacaagtttgatacttgcagtaaaatcaggttcagtgcattaccttctcctccagaagctaagaagattgtttcacaaccaccaagctttgaagtctctgtggatgaaaagatcttatatcgtgctgagccaaaactaaacttcagcgaaccgcttgctcactcgtgtttcgacaattctagtagctatagatgcataatatgt

SEQ ID NO: 28993 - DNA, 1648 bp, Arabidopsis thaliana landsberg
tactcatgcggatcgttctgctgattcttagtctgcctttgatcgatttctggatccttcgaatattccatctcgtatacaggcctgaatcgttgatccaaaaacttttaaacgattaaaggagttcttaaagtcgttgagaagagactgcgaggaattatgtggagtgcttatagaggctttcgtgaggttcaaggaacataacgatgtgcagattttaaaagatgatgttgacctaatgttacgagattatcctcgtctaaaagaggagtttaggatgatcctactcgaccacggtttaatacaagatgagaaacgagatgagatgacgcgtggggaagaggacgagctgttcaaagatgatatgtactttcatgccatagaatcggccattaagtttgcggtggcggaggataatgagaagccggaggtgggtgtatatggagccattagacggttttacaaacaacgacgcagaaagttgccacgaggaatcatgaaagatccgaaacttggagttagaagaattttaccaaatttgcagaggaagtacaacgagttgctcaagaacagaacaaagtcgcttgagaaagtgcgaaaagtgaatgaatcattggttgtttttgattgggtacggtagaatgttgtgttttttttgttaagggaagtatttggtttgttagggttaattaggatattgtgtctactattctatttagattgatatttggcttttgaaacttgattaacataatgataacttgataaaccacatgttcaaaacagagagattcctaattatgaattgatttttactgtattaaattatgaattgatctgaacttacggacaggggcttgtgggcctatatcagcacgtgacactagccacgcgtagcggttctgctccaacaaaaaagcaaactcgctatctgtccaatcaggaacaaccacgtcatagctcctgacagaagtgaaaaagacgaaactatccaaacttatggatcgtatttacaaagtcaaacccaaatctgagtcaaaaaataagaatctcaccgttccttacttcttcttcatcttccctcgaaaaactgagaaacattttctttcaaaagagagattacaacaaccatgtgtggaatcttcgcgtatctgaattttcacgcgaacaaagagagacgatacattctcgatgttctcttcaatggtcttcgtcgtcttgaatacagaggctacgattctgctggaatcgccattgataattcttctccttcttcttctcctctcgtgtttcgtcaagcaggaaacattgaatcacttgttaattccgctaacgaaggttactttacttacggatctctgaattttgaatccaaagtcgccgcctttctgaatttttgtgtggtggtgcttctcgatttttgcagagattacgaatacggatttgaatctagacgaagttttctactttcatgctggaattgcacataccaggtgggcttctcatggtgagccagctccaagggatagtcattctcaatcctctggttctggagaagattttttggtggttataatggggctatcactaactatgagggttctaacttctcaattcttatggtaaaaagaggttggtgattaaaaga

SEQ ID NO: 28994 - DNA, 2934 bp, Arabidopsis thaliana landsberg
tgtgtgcattgttcgtaagaaatcaaatatttatttggggagttttgtggcgatagatgtttaagagaattttaccaaatgatttactttgcgacttacaagtacttcgcaagttcatagttaaatgttaaaagcgttgctcagaattagaggtggatcaaacttatgtttcgtttcgattttatttttggttagatttgttagtaattgtttttaataggttgtgccgttctggtaaattagctttgtgttaactagttatcttgatatgtaaacatctattttattagattaaaggtaaggagtataatgtcaaagttaaatttcgttgtctttattgaaatgactattcgggtgatgtatattcttcttagctaactgaacaattgtattacgattttattaattcctaactaatatgctaattaatatccccttccaattttattttgggtttagttaacaatttaatgtttagttatcggtttatggttcaatttacggttcagttcaaataatatggtaaccatggttagggctttaaaccagagtcctttacgagatcagagttaaaaaacaaaaagcgtcactaggaagctgcgactatttgactgactctgatttcacgcaactccttgtgagattctccgattgcttcgcctgagtttctgggttaactctccacgccgtcactttgatctttgcttttccggtggggtttcttcatccacttgttgatttccgaattcacacattttccgaatccacttggggccaaagaattgcaaaccctaattttgaatcatcaactctattctgaaccaatttgatttccgttttttgcagatctttagggtttttgtttagggatttatcgaagactctgctctatcatggtaaagtttaacctaaattgaagtagcaaagtatcatttttatatgagcgagtgtttgattgtctctgtttgtttttcacagtctggaagaaaagaaacggttttagatttggccaagtttgtagataagggtgtgcaagttaagctcactggtggtagacaaggtaagccaagtttttctgattgtgctccaaagatgatgattctttttactgtttctctgagatttgtttgatagttgctatgtatttttgcttgcagtgactggaactcttaaaggctatgaccaattgcttaatcttgttcttgatgaagcagtcgagtttgttcgaggtatctcttatcttacctatatctactacattgatcttgttaggctacaattctctagtggaatctctgtattgctatgaagtttattagtctggttcatacaaatgtctccatgatgctattggaagatatatagaaattttgattacaagagactgtttgatgcttgatcatgttatgtttgtgatatgaatgagataatatcattctcttagctatattttgaaactagaaatgggatcatatttccatagatctaactcagttttatgacccttgtgttatgttttgatcagatcatgatgatcctttgaagactacggatcagacaagacgccttggtttgattgtatgactcattcaccatccttttcattactataaatgtagtgcaaataagatcattgtttcttctagcatcttgttatttgtaatggagttccatagtttagatgctaaatcatgatggtttgtcttgtttttaggtttgccgtggaacagcggtgatgcttgtctcaccaaccgatggcaccgaagaaatcgctaacccgttcgttacagcagaggctgtctaaaagactttcttctcaaacaatatgtctctctattagtttaacttggcgatttagagagtattttatctaactctctggtgtgatgttggaaacatatatgttcaatttaaactatttggaacatcatggacacttcttcttgttacctaacttcgttctcaaatctcgttctgccaaatcacaaaatctccttaaccagaactgaagtaaaccggaaaagtcgaatgtctgagtcttctcgttactgaaccatggatttataagtgagtgatttgagctttttgaagttgtttcgatagttttagtggagacgatgaagtcagtaatgtcaaagatcaaactttttagaccagtcctcacgttacgttgttcttacagctccacaggtcaaactcttcttcttaacgaatttaccagactctgttaccagagagaccttcccagagctatgaaagcaatggagtcattgcaaagtcatggtctttgggcagactctgcaacttattctgagcttatcaagtgttgtgtatctaatagagctgttcatgaagggaatctcatttgtcgtcatttatacttcatggtcatcaaccaatgatgtttcttgttaatgtattgatcaatatgtatgtaaaattcaatcttttgaatgatgctcaccaactgttcgatcaaatgcctcaaaggaatgttatttcttggcctccgatgatttctgcttattccaagtgtaagcttcaccaaaaggctttggagcttttggttttgatgttgagagatggtgtgaggcctaatgtgtatacttactcctctgttttgagatcttgcaatggtatgtctgatgttagaatgcttcattgtgggattattaaggaggggttggagtctgatgtttttgttaggagtgctttgattgatgtgtttgctaaactgggtgagccggaggatgctctttcggttttcgatgaaatggtttcgggtgatgcgattgtttggaactcgattattggtgggtttgctcagaatagtacaagcgatgtagctttggagctttttaagagaaaaaaaagagctggtttcattgctgagcaggctacgttgactagcgtattgagggcttgtactggttc

SEQ ID NO: 28995 - DNA, 1787 bp, Arabidopsis thaliana landsberg
tagtactcattgagcgtaatttgatttgactgtttacatttttggtgttagctttgcatccacatgagaagataggttcaatggatgtaacaaatttcttgatgtgcaagaaagagccacggccactggagaaagtggaaggtataagagagagtagagctcggataggccatggatggaaaactactcatcttcttcggtttttattaggatatattccttacaatcacaaacctaactctacaagtcaaaaggactatagatcattcggtgatgggaacgcttattgtatagaggagtaccaacaagagtttcaaaggattaccaaaataaaggaataccaacgagagtttcaaaggttctagtcttctagaataaatttgggatggaagcaaaatgcattggtcgtcacaactgtagtatggacccatgggctactgcacctgtctccaccctatttgggccaggcctagttcttatcccttccaaatattttgatagcttaatcactaatatctatatgaaactttctttgtataaacatttctattggaacgagaagaatccattttaacccgttcctagtttaccaatttacgattactagaactgaattttcattattcataaccaacaatgcaatttgtctacacatatcaatttgtcaatttttctaatatcagtttatagtaataattatagacaaatcaacaaaacatatttacacaccttaagagtttttataactcattcagacaaaaacaattaattaaaatacccttaaaaatagttaaaaatattttcactttttaaaaaatcaatgggaggggatcaaagattttcacaatttacaagatttgtgtaaactaatactcttcatttttatttgatttttgtaggaaaaaaaatgttttttaaacattaattttttaggttttatatgcagtattattgatgtattttaaacttcaataaaaataattgaatattctttatgatcagatttaatatatattttaaatattttttttttagaaaattaattaaaaataacaaaaggagtaaataaataaaacggaataaagttgggcgtttttttattacaaaacatgggaaaatggacaagttcttcaattcttgctttttgggcttcttgcctgtctctgtctcgaaacacccagaaagagagataatctcgcttatctgtctttatacttagctggtttcttcttcttctttatcccttttggctcttattacaacttttttttttccatgtatttcctcaaattttaatattttttctttactgtatattcatcaaatctcaagttctctaatttcccattcgacctcgaaatttgaccaatttctcttgtctcaaatttcagattctcttcctctgaaaaaaatcaaaaaccaagtcttctaattccatctcctctctgtacccatctcctaaaaatctcaactttgagtcaaaattttgtcttctctcaaaccaattcatagttctaaaaatctcacctttatctcaaatttttaatctttcatctgatttctgaaacccaaattctctaatctcatctttgagccaaaaagtttcaatctttcctctgatttctgaaaccaaaaatctctaatttcaaaaaaaaaaaatctcacctttgggtcaaaaatgtcagtagcttgtggactagaatgtgtcttctgtgtaggattcagtagatgggcatggaaaagatgcaaacacgtaggctcagacgatagcgccacgtggacatgag

SEQ ID NO: 28996 - DNA, 2045 bp, Arabidopsis thaliana landsberg
accaaagttgagccaaactaaaatacaagagttttcacgaggctgacccaaaatctgaatgttttgacatgtagacacataagacaaatagtacctacttaataatccagatcacgcccaccagaatccttgaaaggtacgaactcatccccaaagtaaagttacaaaaagaaaacaagatctctttcaataattctaagtacctttccagttaaatggtaaggaactatgactttaggcataaaatctgcatattcacacaccaggaaacaaagattcgataaccgaatagctcaaggcaacaaaaagaaactcaaaacagtagcgaaccaaaagcacatcacatgatcttcgaaaacagatacaaaccctatcgtacaattcaaatctaaggagggcaaacccaagagtcacgcaagtcacgctccatcaaaacaaaacaaaccctaagctgagaaagagacatagatgatgattcgtacctaagaagaggagcttctgagcggtctcatgaggatcattgaaggaatccttatagacggcaaagatatcctcatccgagtgctgctttccggtatactctctgattttctgaagggttttgcggagatggtaaggaatcgaaaccctagaggagccgccatcggaggagctcatggttcttgttaagggagagaagcagaagcgggaggagagagaaattgagagagcaattgaaattggaagcgcgagtccctccgtatttatttatttacttaccaagataataataatgtaccgcttcactgtcggtaacttttatacgctcacgtcacttcattgcacaccaaaagactctttaaagttttacattttgtatgacttcaacagtcacccaattatagagagacacgtggacgatgacccaaaaactgtgaatacgttcacactcattttgttttgatattaccgtatacatatatgtgtgaatccgatcataaaagtactacgtataacagttgaaacaaaagaaatcaaaattttcgagggaggcaaggcaagctcgcactctctcactcatcatcggttccaaaatagcggtctccaaactcgcccataccaggaacaactcggaactcgtcgtttaaaccgagttctatctctgaagtcacaatctttatccttgggaactttttgcacaccacatttactccttgaggtgcctataccatacgtaaccatacattcattttgactgtttaggctatgcagataagttgcaaaaaggttttggtttgttaaacttataagttgcaaaaaggttttggtttgttaaacttacagatatcaaattgagaaatatgatgttggattcaggcacgcctttacttatgagcagtcttatcgcttgcaccgccgagtttcctgcgatacaaaacatgcttttgttatgtttctatgtacatagtcttttactctaccagtatagtacagagttcacaaaacaatgagtcagacctgtcccgaggattggatccagtaaaagcacatgcctttctgaaatgtctgagggtagcttctcgtagataagctggtgagtgccatttgttgttagtaaatagttaggagaattgatgagcagagaaagaacacaaacctgttgaccattatcgccttctctatgaatcagaatcttcccaattttgatgcctttgcagcatgctctaagagcgttctccatactctcaccgctgtgttcagagacaaaatcattatatagtattgacgttaactattagtgtttaagctgatttctttaccttctgataactgagacaccacacagtttcttacagaagtccacacccgaatacacagatcctacaattacagaaatccaaaaactcaacatgagtttataatattactatgattggagagttcttctccaagattgtagtaagatataatctttttcattagcttacctgttggagtaaccacttgcttttctgtaaagggaaggtgtccgaggccatgttcaacgacctggcgagagctcattg

SEQ ID NO: 28997 - DNA, 1594 bp, Arabidopsis thaliana landsberg
ttttttctttcttcatgggttcatatggacccttcatcatttcaagttcaactaaacatcttcaataaaacacgtagttaatatgtcaaaatagaagtttttaatgcgtatatgacatcattaagtgatgacgtcttagaatagttttgaagcatcatatcacaaacttcttggttttgaagctgtttttcctaattatatcaactataacccaaatcaaaacatcattaaagacttggggagaattggctcagggttaattctatcaatcagaagagacttatgcatggagtaaataaaaatagttgctatagaattgtgttaattaaaattaaaataaggttagacattgaagccaaattaaaaaaacaaatccaggttttcttaatagaaaacaattaaaatacctgaaggaagtagtgaggtggtgaaggaggataagcatctcaagtttagccagctcacttcctggacatgagtgcactccatttccaaatggcatgtacgtgtaaggttttggtgccacctgtcgacattacaagatgtcatctacatgcagtgtaagtccatcaaagtccccacatagttgacttaaacctagatttggatttgagttccatcaatgttttacttttataatattcatgtattctcctatctttcaccaacattaacttgtagtaggtcaaccatacccatatacattatctacccatatacataatctaagcatcgataaatttgattatatgtttagatatacctcgaatctagaaggatcgaatttttcaggatcggggaagaattcggaggagtgatggattcgccggaaaagaggaagaaccttccaaccctttgggatcaagtagccatcatattcgacgtcttgtactgcttctctaaatgtaaaggacagtacacttgctgctcttagtgtctcttgtatcacctaccaaattaaagtacgtatagtaaccattaattgattgtacgatcaagtaatatgacatcatcattacaaatttgttttatcaatatattgaaatggtgtataccctagtggtcagtggcatttttcttgtatcttcccatgagattcttcggttttctttttttattttctgtcgaatgctgaattgctccctctagtaaaatagaaaaagaaaaattaacataagaaaaatgaaatggcttcttggctagaaccccaaaaagtttcattaatattgggggaatatgcagtaacaaaaccatagataaataatacatgatttgcatttgattgaaataagtaatgtaatcatatataaaatcgagtttcataaaatatgtactgtgaattctgtaatggaccaagagataacaattttctcacaccctttggcctttgcttcgataaaatatttactatataagatttaacatatttctttctaaatgatcctcgcattatacgcacatcatgtgcggcacatgcatgcagaagataaacttgaaaaaaaaaacatagagaaagttgcttacggagacttcttggaggagattggggtggtcgtgtaagtacttgagaagccaagtaaagacagacgcggtg

SEQ ID NO: 28998 - DNA, 4226 bp, Arabidopsis thaliana landsberg
ttcttagaacgtgaaagaaagaaaactctcagaaaatgtaaaaaatctataataaacaattcaagatagtggtgatccataatgttgggatttttatattttctacgctaatcaggatattccgagattcttgagagcttaacaccgtccattatagcaaaatcaataattaaaaatatgtatgacaactttatgaccatataaatcttcagaagacaaaagaaccatttagtggacaacaacaatttagccggacgtcttttcgacgacaagtttcttgccttgtttaattctgttttcttattgtttaatgagagcaagatccatgcccgtaccaattacggaagataataaaataagggtgaaatttgtggtaccttgttggatgtgacatcatgcaactggtcaagaagtatccataggcatcaaagtgcatcttcagattgcgaaagcctgtaaaaataaagcttccatggtcctgtagttttctccattgaaatctacagcttctggttttggcattacaactcaaggaaaacataggcatttcactctactttctaagactccaagagtttctcgaactcatagtatataaataaataaaagaaactaaaatcagcaaaaatcatttgaagatgtaagcatgaagttcattgaaacactggtgttttgagaagttcatgtggacattttgacgaacaactggtgcgcaagtcaagtaaacatgttctgcgagatgttcgaataatgagactacacttaaaaacgaacttggtcattacgaaattggattgaaacttaaagtaacaatccagtttaatcttcaaatataagtgtttcacgtcctattgcttagctacttcaaagttttcaggaagccgtttatatacttcagatgaatgtattttgttgctttttattgggctatgtggccgtcatgggcttttaaggcttgtaattttcgttttaatggaagtgtaaaggaaaaaaaaaaaaaattgttcatgttggtcgtcacgtcacggtcacttgcccaattcacttatctttattccagcttttggatttgagattgttataaaaaattctatgaaaatggaattaaaactgaatagtttccaattgatatatatggcaaactgctctttatattttttgttttttcttttcaacaattggagctattacattacgagattatcttgtattgtcaatataacacttatatctttctttctttttggctatatttatctacaaaacatgccaaatgaaagatagaaaacacacaaaaaatttctttacacatgaaaaaaaagagaagttaaaacatgggtggagattatttctgtcggtactggtaaccaagttgtgatccactctatatattacgtacatataataaaactatataagagtcatgcgatatatttttctcaaccaaaatatgactacttcaaagaatgagtcattttcttaagtggtgaggcctccacttcttggactcagtcaaatcattttacggccaccaggaccccaactaataactttatttcctgttttgcctagctagttgtaatatatattgcaacatttttgtgcacttacaaagtaaaccattgctattcatttgttctttataactcaatatactcataaaacaaaaaagccacatgtagtgaagtgaaatgaatacacataatcgtagatgctctttggtacttatagttatataataagcagggtctccaccagagaatatctgattaataaaaagcatctagattttggtgttgtttttgacagggcggtgatgatgagtcttttggaacaaagtgattggtaaagaaactagaaagctcaaaaaaaaggaagaatgcatgtggtttccttttgttctattcactaataaagactttttccaaagaggaaagtaaaacttttcaccgttttcagcttcagcttttcaccatcttgccgttttcctctctatcggtgcttttttcatcttctaccttagctcgtaagcctcagatccacgagccacgaggaccacgacccatttttttttttttgcttcgcattacttatttcacaatatttcatttaattaattaaagagctactagtaactaaaaaatgactttttaaaacgttaatgactagggttcttttgatcaactatttaatattgtgattaaccgtattattgtaatggtgggtctggtaaccgataataattgtgtcagaaaacgtctctttttttttttaaattctaaattgggtttactaaaaaaaccaaactgaaaaaagaaaccgaaaaggtaaaattaatcgaggttaatgcccaccatttgaaaatgattatttaacttttttttgttgttgtcggttataattttgtttttccgataaatatgagaaaattgagagtacagtgaagtagtatagtgtagtgggaaagtctggaaacagctgtatctaactttttcccttttctctatgattctgttgtgaataatgcagagccgccgtgagctcaggcgccaccgtaacgaagaacaaacctgaaggagaaaaataagccatgggatgtgcggcgtccaagctcgataacgaagatgctgtacggcgttgtaaggatcgccgccgtctgatgaaagaagctgtctacgctcgtcatcatctcgccgccgctcacgccgattactgccgatcgcttcgtatcactggatctgctctttcctcattcgcctccggtgagcctctctctgtatctgatcaaactccggctgttttcctccatactccccctcctccgctttctgaacaatctccggctaaatttgtccctccacgtttttcgccgtcgcctgctccttcttctgtttatcctccttcgacgtctccttccgtcgccagttctaagcagccttcagtcatgtccacctcttccaatcgacgccggaaacagcaaccaaaacctagactgcctcatattctctcggagtcaagtccttcttcttctccgagaagtgagagatccaatttcatgcccaatttgtatcccagtgcttatcagaactctacttactccgctactccttctcatgcctcctccgtctggaactgggagaatttctaccctccttctcctcccgattccgaattcttcaacaggaaggctcaagagaagaaacataactccgataatcgattcaacgacgaggatacggaaacagtgaggtcagagtatgatttcttcgacacgaggaagcaaaagcagaagcagttcgaatcaatgagaaatcaggtggaggaagagacggagacggagagagaggaagtacagtgtagtgaatgggaggatcacgatcattacagcaccacgagctcctcggacgcagcggaggaagaggatgaagatgatgatagagaatcaatttccgaggtcgggacacgctccgagtttggatctacggtgagaagtaattcgatgagacggcatcatcaacaaccttcaccaatgccgcaagtatacggcggcgctgaacaaagtaaatatgataaagcagatgatgctacgatatcttctggtagctatagaggcggaggagatatcgctgacatgaagatggtagttaggcatagggatttgaaagaaatcatcgatgccattaaggaaaatttcgataaggctgctgcctcaggggagcaagtctctcagatgctcgagcttggcagagctgagctcgatcgtagtttcagccaattgaagagtgagttctattgttcgttctgttttctttctttgataacttggattatcctgcttttatgaaattgagtttgtgacattgtgaattttgtttattagaaacggtgattcattcgagtagtttattaagcaacttgagctcgacatggacctcgaagccgccattggcagtcaagtataggatagacacgactgcgctggatcaaccgaacagttcgaagagcctttgttccactcttgaccgtctcttggcatgggagaagaagctttatgaagaaattaaggtcttttacagtttgtccaaatcaaaggtttttccttttatgaaatttaacaattgattgttggtagctgatgatttctttttccaggctagagaaggtttcaagattgagcatgagaagaagttatcacagcttcaaagccaagaatataaaggggcgta

SEQ ID NO: 28999 - DNA, 2383 bp, Arabidopsis thaliana landsberg
  unsure (1)..(2383): unsure at all n locations
taattaccgatattatagctccaaagacttgagatttaatcatggcactcacaatgtcccatggtctaagtgctcggtgagccgagtccatgattatgttaatgctgatcccgtaaactgcatcagagagcagagcgcttgaagccataccaacagtgaaacacatgagtgtcagaaacggtagagccaaacacgaggcgatgactcttggagtgattagataatcaattgggtcagctcctaaaacacggagtgtatcagtttgctctgagacttgcattgtccctagttcagctgcaaatgcacttcccattcgtccagcaacaacaatcgatgtgatgactggacttagctctctagagaaggctaaagccaagacacctccaatggatctgtttagacctagtctagtgaattctctaacgaactggattgtgaaagccataccaacaaatgtagaagtcagaagacaaactcctagagatttcggtccggttctctccagctgttgaagagtgtttctccagtgaatcttaccctttaaaatccggagaacgacttgtcctgctataataggaactgataaacctctccatatgtacttagaaggtgaccatttgctgaacggaagctcggcttcttgactgggtgcgttgttttcagtagaggtttcttcttccaacatagacatggatgggtgaccatcattagcattcaaattcacatataatcttctttgccgtatcggacttgaaatcccataagattgagtctttccaatgaaaccaacttgacaaagctttgggggcttaataccaatcgaagcatcaaaccgtggaaagactctgcaaaattaatattcaagaatccaaaataacatattctgacaatgaagcgaatgagaaagcttataaacttatggcaacacaaaatacctatgagggaaannnnnnnnnnnnnnnnnnnnnnnnnnctgcatcattgtggttgccttcttctttacgacctcactgatttagtgcctctcaatttgtagcaataagcacgatttcaacagctgaatctgtaataaacccagaatcaaattgatttacaatcaaatagaattaggacacaacagattttgcataagagatccaaatcgagacaaaaagtttccggtgacctgatcaattaatcaatctctgactctgaggcagccaaattcgaatcccagtataagatatgtacggaccaatctaggtgaaatctctactatatagaaggggaacaaataattaggtctatcaatcttcttactgaaacaaaaacttgaaaacttacatttagaaacgaaactaagctcggaagatcgaagaagcttgcttgagagggttcatcgagagagaaagtggcacagtgccaacaacaacaacacacacaactaacagttgcgaagaagatgtgtgggtttaactcccaacaaaacaaacaaaataaaaaacaatggcaaaacataaattggtccgtgggccgtaaagcccaatatacttttacaagtaaagtgtgggctctatgccattcacggcaggtccacttgtactttacacatagattgatatagataagtataaataagaaaataacaatgagtgtttttctctattgatccaaaatgacaaaatatatgatctaaacattttatgttattctgtatatgtaaagtgttaattatttaattggttgtataaatctacaaagctattatatgaaatgtttataccaagacaatcaatcaaataaaggcctacatttcatgtccagatttgtactaatatccccttcattacttactaatatatagtaaatttaactaaatgctacttaactataatataaccaatatcgaaaggagaaagatgtgaaaagaggaatggtggtggtcacgtgacagtgatacttggtaacctttacggagacaacaacgttatctttttcttcagccggtccgttctttaaaagcacactctctgtataatatatgcctctctacgttttatatactcacgtttaccctactctacactacaaaccaaaagcactacttctctcctacacaaaacgtgattctaccaaattgaatgcaagagtttagtagagggtctcgattcttaaaaaaaacaaactgtcctagatgatattttggaaatataagtttaaggaaacgctgaaattggttgctttaattcgactactatatctttcgcatcttagaattatattagaagatattcaatatttgtatcttttacattttatatttttatgagtattctattttaattagaggtattaatttgttaaggttttaaacgtttatgttacaaaattacaatattcaagt

SEQ ID NO: 29000 - DNA, 1043 bp, Arabidopsis thaliana landsberg
gttaacttttcaatgttgcatcaagtttcttagattgttcaatcactagactaatcagtctcactataatctcctacagattcatttctattgccactcatagcaattgagttttctcaccttttttgctctttatattgtctttgagttcattcaggtcttgaagaagagcactcttttaagctgtgtgaaacttgcgccgttcctgtgaagaactacttttggcattgcagatttcagagagctgtgatttgtgctatcttaaaaacggacaagttctatgttgtggcggatgagatgagggatgctatctgggttgatgaattttctgaatgcctgtctctggccacggtcagatcagcaggctcgttctgcctcagattctggtggccgccaagagggtttgctctggttcagagactccggccagcacgtctttggtgatttctccatggccgtcgttcaagccaacagcttgctagaggaccagagccagctcgagtctggctctcttagctcccacgactctggtccctttggcacctttgttggcgtctacgacggccacggtgggcctgagacatctcgcttcatcaatgatcatatgttccaccacctcaagagtgagtcgctcaacctatgcttttaactcttgtttggattagctaatctagaaaggaaatatagaagcatttctctaatagcagcactagtccagaaaatggttctagttttgatctctcatcttttatgttatgcacagggtttactgcagagcaacagtgtatgtcatcagaggtgataaaaaaagcgttccaagccactgaagaaggcttcttatccatagttacaaatcaatttcaaactagacctcagatagccacagtgggatcatgctgtcttgtaagtgtcatctgcgatgggaagctatacgtggccaacgcaggggactcacgggccgttctgggacaagtcatgagggtaacaggtgaagctcatccactcagctctcagcagacacaacgcatctatagagtcagtga

SEQ ID NO: 29001 - DNA, 3616 bp, Arabidopsis thaliana landsberg
  unsure (1)..(3616): unsure at all n locations
atatatatactaccacccccccccgccgtgtacgtaccatctaggcaaacaacatgtttatatattaaaacgttaataagcatcctccaacatctgtttgtgctacaagaataaaccaggccaaataaattggctgtttttataaaattagatcaaataataacacgatgtttaaaaaatgcctcatcttggtttgtaaccttataaaaccgtatacaaaaggattaattcttaaaacggggggaaaccaaacacagaagaaaaaagaacacacaacactctactgatagcttagccttcaccggtgacaacctctcctacgcgatacnnnnnnnnnnnnnnnnnnnnnnnttcttctagtattcgtgaagctgcctctggactaaccaccataaccatccctatccccaggttaaacgtccttctcatctcactgtcttctattctcccagtctatacaataaaccaaaaaacattcaaacattctagaagtataaacgtaatcgttctgtttatgattctctcctcattcattacctgttgaatccacttgaacaacggtggaagttcccaagtatcggtgtgaataacagcacccaaaccgtccgggaagactcggggaatgttgtctgtgaaacctccgcctgtgatatgagctaaacctttcactcctcctttttctatcatatcaagtaccttcgaataacagagagagagaaagtcatagagttgttacaaatgtgatgatggaatgaatatttgttgacaagaaaaccaacctgtttcacgtaaatgacagtgggtgccattagagcatcaccaagggtacttgatccacctggaagcgcatcattcagcgaaagattgcttcgagccaataccctgcaacaattggaatgtggttaaaagccatgaaatcagaagcttaaaacctcgactatcgctaactctttaccttcttactagagaaaaaccattggaatgaacaccactagacgggaggccaataagaacatcaccggccacaatgttttttccgttgataactgaagttttctttactatgcctactgcaaacccacttagatcgtactcgccctctgcataaaagtcaggcatctctgcagtctaaaaaaaccaaaacaaaaccaaattgatacacaatcatggaaagatgcgtaaactacattgtcaaaaccgtaacacatacctctccccctaagagagcacattccgattgccgacaaccttcaacaatccctttaatgacctgaaaacaaagcatacatcaatataaagtccttaaagcaatctcatattaaaaaggggaaagagatgatgaaaccatggtaccttttcaacaaggtctacataaagacgactaggagcaaagtaatgagggaaaagacagaggctttgcaccagaagtaataatatcattcacactcatagcaacctataacaataagctaaaccatgagtttatgggctagtatcacaaaacacacaaaagagaatttgctataccaagtcgattccaatggtgtcatgaattccagtttcaaatgccaatttcaatttagtccctacaccatccgtaccagctacaagataactatcacctgctcacacacactcattcattagaagacgaaaagtttcaacattcaggtgaaatttttgcagttttccatatatatttacctaatggaaagagaccaccaaatccaccaattccaggagccatctttgcgattcgtttaacaagctcagcaccagcatcgatatcaacaccagaatctttgtaattgagactatcagtgtcatcatctttatcagtgcgaccatctttcttcgacatggataatacacgagtccttgttctcgtcgtctgagcaaagctgacggagaaaggtttcggagaagagaaccgggatcgattgacagtgtaaagagacgaataacaggaagaagaagactgcaaaatccgagcttccatggcttcaacagtagcagcaaattcacaacaagagtagtaaattagtaattaacaaaaaggctaaaacttttcaacaataacgggcggaggctgaagactgaagagagaaagcttagttaggacttacgggagacagaatgagaccgagaatagcgacgccgaaaagggagggacttgagtagttaacttagcttttttgagtctgctgcagcagaaaacaaatataaatacttttaaaaccctaataaacctaaacaaggtttacttgtttttttgtttgttttttcctcaacaaaaagatttaggattagatatcataaaattattttaaataaatttgggaaatgataattctttggaatgtatacagtcctcagattaacaatgcttttttaatgacactaatatttgagaatttttatgaaagtttttgagtttgtgttaacggcttaattgtagttgacatcttatatcaataatctttacttccaatcggatttctcaaacacgacaaacgaaaaacttaagaaacaaagttgcaacatttaaaaccatacatgaaaaaagaaacacacatatatatgtagagatactaattcacaagctggattttaacgaaaagccttatcaatctttcccttcttcttcttcacttgttccatccttcacattcctgaaccacaaccaaaaccaatggattagattatttttcagttctatccgacttgtaaggtaagagccatgacgctccaagttacctccaagacgatgttaggttccgagttttcctgtctagctgaagattttcaagtgctgttgaggctctcatgacttcttccggcatatcttcagtgtcatatctccaattgctctcgtcttttctgtaccctgaggtagcggctcccgatgcagaaaccgacctgcccattaattaagcatgtcagactcataagcaacatggaagattaaagatcgttgatttggtagaacatggagttggatttaccgtcgttgatgaggtaagctatcagaagcagatgatctgcgaggaggatttctggtgtcaaggcttgatgacgactcggtttctgactctctccttgaactaccacccatgacctgcgtcatgttctgaagaaaaatgttgatcactaaatatgaggtgaatacagcagacaaattataatggttttactacaagaggatggaaacataatccctgggtgtgacaagaattgtaggcttggaattcaccgaacttattcaaagctctgaaaaattattttcttgagtaagacactttatttacttggaaaaaatgtgaggtcgtgagcacaatgtaacaagatttgaactaatttggtaattgtaaagcttcgatgtaaccaacaggtattggtcatcttcacttagagaatagaggaactgtaaacactaacgccctgaaatcatgtaccatagctggactattgtaatgtgtaacaaatatggttgtaaagcttgtaaacagagaaaaaaaaaaaagctatactgtatgtgtaaacatctacagagagaaagcagaagaaatacctcgaacttcaagaatccttcaagaacatccagaagaagcggtct

SEQ ID NO: 29002 - DNA, 4808 bp, Arabidopsis thaliana landsberg
cttcttctctattccgccagagttactctcttcccgcttttcctttagaaagcaaagacttgtgctgcaccctggatatggtccctttgttcctctttagagttctaactcctcctgatgctgctgatgcttcctccgaatattttctgggaggattaggccaagataagtcaaatgatcatgtggagcttccatctcctcttcagtgctcagtgaaagtcaatgttccaggaactgagccaattttgatgaacatgcttgactgccagatcatccctctgggccataagtacagattgatgatcggttgcaatcctgaagaatacagtgcagcttttcttccgctaaacgaacaaggaggaggaggcgaattcgttgcgctcctcgactgcactgatttgtttttggtgttaagaagtactgaaatgagatggattcggcttgagaaaccctcaactgcttcatgtaaggagttattcacttttagaggaaggttctatgcaactttctttaatggggacaagttcgttatcgatccttcttcgctggaagcgactcccctaacacctcatatcgactccaactttctggttccatctggcaatgaggagcttttcctggttaagacagacttcctaagatgtagagtaagtaggctagatgaggaggctgctgaatgggttgaggtcagcgatttgggagaccgtgttttgtttcttggtggacacctggggaatttctactgctccgctaaggagcttcctcatggttgtggtttgactggggactcgattttgttcaccgttgggtcacgcaatgtaacttacccctataaatatggagtacatacaaataaaagaaaggctgaagacaatatcaattgttggagatcctcaagggagaatcgtgtgttgttccgcaacagatatgatccggtcctgtctttccgggttgaacgctaggccgcaaattctcacttcagactgttattctgtttttattagatcaaaggctatgttttcctttgattttaagtctagattttgtgtacttgaaaactcgaactatacatgatctctagcaaatgtgcaatggtctattgtagttagtctagaaagatttgttggtaaccagctatgttcttatcaaacttgttgcaggcatagcagcaatgtcgtccccttatgccataccctcatacaactactattcttgcttttattctgttaagagctttttgatcgttgtatattgctactacattttggtttgaagtagtggtgcatgtgttgcatagtccgtaggtaaaactggtccgaaagcggtaaacaggatcacttcgttgttagtttgtatccttgggatagtgaagatcttgacagttggtacgtttgagttttgtatcaaatttaagccttttctgtgattcagggaagctttcaagaaagaaggtgataatcaggaaaactacattgcttttgactactcgagctgattgtacttgccttgagggagtctttgattttctcaacggttaggtaagcttttccatctttttttttaacatatcagatttccaatattcttgaatgagaatatagcttttaagaatggaaatggaacagagagggtagagactgattttgcaaagtgatggtaagaagtgaactagattctttaaaggtcagagcttatccaatgtggtagctcacattgttatgccacaaactttcccggaaagtgtaaatgagaaaagaaaattccttccaaaaactaacagctaaaatcttgaatctttaaggaaaagcgaaatgaagatataaactttaactgcccccaaaagacagtatcagttgcaaccactcacatgtactaactaaggtaacgaatcctcaaaaaaccttaaagaagctgaggttgagattttggaccaccatggaaacagcttagtaagtctaacgagaataaaataaaacacagctaatactaagaactctgtatcgagtgaagacctggctatcgttgatcggtgtaagagacataaaatcgtataaaatcgatatcatttcttagtaagaagcaacactttctttgtatagaacaaaactaagatcatcagtctattgctatagttgtctttgtctattgctattcttttctctgtagttttctaaggactctattaaaacaagcaaactaaacgtgaacaaaagcaaaccagagtattaaggtagtgaattatatgatcggacaaggcggagtctcccagacatcaaacacattctcctcgctatgcaatgcaaaaaggcggtcgccaccaatggagaaatcacagattgagccaccatagcttcttcttagcctagaagttaagacccagtctggtccacagaacacagagatagaatcattcattgatgagaaaagctggccttcatgcaaagctagtttcgggtaacaaggctcatcaggcatcttactcttcatcagtttacttctcgaactccacctcacgcttcctccatacatcctcagatcaataaaccccaaatcctcaaactcattcaccacacaaatcgaattgctatcttccatagctattgcatctctcactctcttctcgtctatcgccataggagacccaatatccgaccatgaccaaaccatgttcttgtcccgaaaatccaacaaactaatgtaacagttgtcctttcttggaaacaatgtagccacaagaagacagttcttaccattcagccattgaagcttgtcagcatcaccaagtgaccaaccaggactctcgtagaagaaatcggtttgctttccagttatctgatcccaaactccgattccatactcattactccgacctttgcagctcgcaaaaatctcataatccggcgaaaaactcaaagctccagctgtataactcttcacctgattctcatgacagacctgaaacttataccgaagatcaccggaagatgaactgaacagtcccattcctccatctcctcttcccaatttctcacaagcagagagtacgatgttgtctgaatcaatccagccaacatcgtttactctctggtaatcaaggttgatcggagaatgttcttccaacatccaatcaaaaacatgaacaacactcccgtgcgcgacgcaacaaccgccatcaggacctgccctaatggcggttccgtctccgggagcaattcctttaacagaatccgatagacgaagacggttaccatcaaacggaccccatttagcggtccgtacatggtcaagtaaaccgtagaaagaagcttctctatgaaggagacgctcagggatgttggccggaacgttaaggtctcccgtacggagaagatcaagaagaactgcgaagcaatctgagtttctgtctacgaaaagaatggaatcttcaagtggtgaaagattccattcgtcgtcgaacaatgctccgaagaaagaatcacgacctgcgtttgctaacgtcgtcgccgtcgtttcgaagagtcgtccaccaacgttgaatttgatcctgtcttttgagatacccatcaatggaaaattaggtgaagacgatgtaacagagaatgcaaaaagtttccaggaaagcttcgatttttcaatgaaatttgaaaaattgagctccgggcacgagaaagaagatctttctgagtaatgggaaatcaaaatttattagaaaaatttgaactttttttcagaaattgaattgactctgtcttctcttttctctctctgcttctgtttttttttcattccgtttacacacaacagttgtttctacatttatacataagaaagaaccgttggatgttagtgttctcaagggtattggttttttgatccaacggttgatatttagtgtagtagattgctaaatcgggagaacattctcagatgatcacacctcattggtttattgatttacctgtttttatacacacgtcaagttgaatttggggagataagaaaaaagaaaaatattaatagtttgggtaatatcacaagtgtgatgtccttatctttgatttattgatttaagaacacaactttgatataaatgataagaagagactttctcggatattttatttgttcgagttagtggaacatttcacaatcagataacttaaatatacaatcattttttggcttattgtatgttaggttctagctatctatgtgtgttctttatggaattacaaaataaattaggattataattttataataggaaatttgaaatttcgacgataatatatatgattagtttttaaaaaaataagtttagccatacaaactttctcaaatatttcatccattttaaaacaatttgttcatgttagtggaacaatccaaatcaatataagaataatcaatcattattcatttgtgacttgttgaatgtcaaatattaataatttatatgttgtccttatcaaattacaaaaagatattaggattctaaattttataataggaaaacttaaaaacaaacaaaaaaatcttattagatattgtttgtacgtccatgttaatttatacaattagaaaaatatgagacgattagtaaactatatgcttttgaaacgataaaatgttttcgtgagaatgagtaaataagaagataaggtatgcaatttatgttcttcgagataagagaggaccaaagtgatttattgcgcaccataaggctacagaattggcatacgtttggcgaaattaatatccactcgaataagacaacgtatcggttaaattcgaaacatgttttaatc

SEQ ID NO: 29003 - DNA, 1851 bp, Arabidopsis thaliana landsberg
ccattggcttttgcaatgtctgttttatctgatcaagtttactttttttatattttgttggcagaggctgttcaacttctggtatcatctctagctgatgattcctctgtggttagagaagcttccatggcttctcttagagatattgcctccctgtatgtactatttatctcattttacttcgtacacaagacatgcaactatgagtatcgggagatctttgatactgagctgttgtgtgatttttttttttttatttatttaggaatccgcttctggtacttgattgttgctatgctgtgtctcgtggaggacgaagggtaatgttctgtttgcttgtcttttgtttccttttattggtgggttgaaacttaaatcttgtgctgtttggtgttgcagcggtttggtaacatggctggggtttttcaagtaatggcatttagtgttggtgcgttagagaaaggggagagtgattcagttttcatgggaaagcttgctaagattgctacagctgagattatatcttccaaggtgtgttgcgacggctgaatcattgttaaagatttcttttttgtacgtactgatagttagatagatttacgtagtgaacttggaatcgtaggtgagctacattatttctataaaaacaggggacacttcttgcaatgctcacaaactttctcgcaactgttcgtatatgtttcctgatcaattttggatcttttaatggttcatcataacgtaggaactaaatgctgattggcaaaggcaagcatcagggctgctcgtctcaattggaacacattttcctgatcttgtaagtcttgtttttttcttttctgtttgctaattcaaagagggatttcttgacattgagaaaaaactgtttttttagttccatgtgactgtacactcttgagttgttgccttttactatacacaaaaggttggtaacatgattggtggtgagatgcattacgattcggattatctttgatagattgcatgatataatatgagttgctgctgagaaaaccatagtagagactttcatctgccatcatgttaacatctatattgagacattttagatagtgtcatgagtaaagctggtccttgtctctatactgtcatttatgaggtagatggcagcctatcccgttagacgtggggcttgatttcccttctttttggataaagtccaagatatttgatattttttaaatgatatggacagatgatggaagaaatatttcttcatctgtctggtccggtaacagctgcacttgctatggttcaaatacttgctgactttgcctcatataatggttaatttctaactctcattcgtgtccctgtaatattttgtttctcatattgaaaagtttatggaccttgcagttctctgatattttgagttactttcatatttcctatgaagctttgcagttcactccacgcctgaaaggtgtactttcaaaggtgtcgcctattcttgggaatgttcgggacatacaccgaccaatatttgcaaatggtacagtgaaacttttgtagtctgtttttgtttagggagtgaaattcttttacagaaactactattttgtgccaattttcctccctcatcctgtaagcttttttttgtcttgcactatgtggttagttgactctaatctggcttctagaagggtcatgaggtcagagtttgttttcttgctgaaccaatatggcaatataattcatactaacataaaagtaggttaattaaccctgttgatcatgtaaatacttcggcactcaaagtaatcgagctttgtgtgtttagcatttaagtgctggtctcaggcagtg

SEQ ID NO: 29004 - DNA, 1919 bp, Arabidopsis thaliana landsberg
  unsure (1)..(1919): unsure at all n locations
cacacgacggaacattctcttccgagtcttatccaaagcaaaatcatattttgcttaaatattttcttctccggctctgtctctgtctctcttcttcccgcggagctttcagtttttgtttggtaacatcgtttctctttctcactaactctgatatcatattatcaatttttccttttcaacacccaaaatcacaatctttcagctttattctgtttttccttgcttgagaattgtgttcgattcatgtctacgaactgaaatcacaaattttgccaacgttttatgattcctggttccgtatttttttttttgtaatcaatagttagctcatttcgaataatcaaactcaattttattgttcatgatttgttatctgggataaaagagagtaatgtgctaattatgtatactcaggtattgcttggtgtggggaagattagatagtgtgaagaatggcagtagctacacattgtttcacttcaccttgtcatgaccgtattcgatttttctcaagtgatgatggtattggtaggcttggcattacaagaaagaggatcaatggcactttcttgctcaagattttacctccaatccaaagtgctgatctcagaacaactggtgggagatcctcacgtcctttatctgcattcaggtcaggattctctaaggtaatcaatcatactagtcttgtgtttcaataaaaaatttggtatttcgatgatctcattgcttttgattatgtcaggggatatttgacattgtgccattaccatcaaagaatgagctgaaagagctgaccgctccgctgttgctaaaactcgtgggtgttttagcttgcgcgttccttattgttccatctgcagatgcagttgatgcacttaaaacttgtgcatgcttattgaagggatgcaggtaactttccttcgtttggattctgcatatatagtgtccccccaccaaaaccggttttattttcattgtgattgtgatgctataagtgttttgaattgtatagctccatactcttcaattgttgagaatgttaaagctagatgaagttactgtgtctgtctatgatagagctgaaatcagttgatgatatctttctgatttttttgccgtcaatttatatatttccctccttgtctgaccatatggaagcccaattatctgttaggatagaactcgcaaagtgcattgccaaccctgcctgtgcagccaatgtcgcgtgccttcagacctgcaataaccgtccagatgaaaccgagtgccaggttataatttattttgatatatcattttatgaggcagagatattgcttgcttatgaaagaagaccaatgattttgtttataattatgtgcttatattatatcagattaaatgtggggatctgtttgagaacagtgttgttgatgagttcaacgagtgtgctgtgtcgagaaaaaagtgtgttcctagaaaatctgatctcggagaatttcctgccccagacccttctgttcttgtacagaacttcaacatctcggactttaacgggaagtggtacattacaagtggcttgaatccaacctttgatgccttcgactgccagctgcatgagttccacacagaaggtgacaacaagcttgttggaaacatctcttggagaataaagaccctagacagtggattctttactaggtcagccgtacaaaaattcgtgcaagatcctaaccaacctggtgttctctacaatcatgacaacgagtaccttcactatcaagatgactggtaataacatcttgtatccacccacgagggagagtcttgatagtgctgctattcttctttggcctaacaagctttcatatgatttttgcaggtatatcctgtcatcaaagatagagaataaacctgtagcnctatatatttgt

SEQ ID NO: 29005 - DNA, 1909 bp, Arabidopsis thaliana landsberg
aattttttccccagatattttttattctttaaagaaaacaaaacacataaaacaaaaattagaaaaagtaatattagtcatgaggttaactatattataatctattctatttagtccattataatgtcaaaaatataatctacaagggctgatggcttcaaatacgattgaagctctctcactactctgagatgtgaaaaggtcttgaaagtattcagagatcacttcaagaatattcccttcatcaaactgtgagtcgccatttttgtcttctataacttcaaatttgttaacagttttcctgcctctggtgatagcatgaaagtagcctgtatttttatctcctagggctaaccaaagttgtctgcttcgttgtttctagaaaccctcttcatcttggtaggctaagagtagcttggtattgagtgtaaagatgagttcaatgcaaggtaaggagcttgacattgctatctcaagagcttttcgagttttctctatggttatttggcagtttttgagcttttctatggaccaggaaatgatacttcgccttgttcgagagatcttttcacttattatgtctgctaaatcgcaggtccaagcttctttcaccaactgtttgacttctagatcctctttcagtcttctggcatatctaaagatacccttttctttttacttttcaggacaaaagaagtgatgagaggtctgtagtctgagccttcaaagttgaggtactcacatctccctgatgggtaagcttctgtccatgccccattagagacagctctatctaatcgacaatggattaggttctcatgtcttttgcctcgccatgacagggggttatccgaatgttggagatcataaagatcacactctaacatgaaggagcgcatgtcaattaaggagccttcaggtctggttgggccaccagtcttttcagtggagtcaatgatatcattgaagtcaccagtgagaaaccatggaacctctcttgctgttcctatagctgtcagttgtgcccagataagttttcttttagttctgtctcgttctccataaagaaaagtagcaaaaaccatttttccttcagatttaatagatgtatcaagatagttttgacaagagtttaaaatttccaattctacatgttgtttccagtagagagcgagtcctccaccaccaggactgtgaggagagatgaatctgtggttagtgtagtccatccactgaagcttcttagtgacaatatcatccggatttttcgtcttcatgaggaataaaacatcaggtgagatacttttttgtatcacacgcagtctttggactgtcatgggattccccagcccacaacagttccaacttgcaacttttaaggaagaggagggggtggtttgtgaaaatccaccctctctttcactattgctggtatgatcttttgtttaggaggagctctgcttgtcgatgccccatttagtcggccttggagtattttctttttatgcccaaaagttttgttgacaccgttatttaactcttcttcaccaagatttgatgagctctggagaattcttcttcttggtgaattttgaatggtaataagttgcctttttgatgattttgtccctgcaagccttatcggtgttttatttcctggcttggtcgaaggtctgataagtggaggtcttcctcttttcttctttactagtgcagcagccgcatttggatctagtattggtaagtaaggtgatagagattgtcttgaagactgaagcagagccgccccagattcagcttggagttgggcttgtgttgcagagttaataatagatgcagcagtagctgccataaggcctttagcttccccttgcagaactcgtcatctccgtgttgcactcgtgtgggg

SEQ ID NO: 29006 - DNA, 1964 bp, Arabidopsis thaliana landsberg
cactgtgaaggattatcagcagcaggctagcgactcatctacccattgttaccgacggtgtaggtgagagaatattagatcctgactcatctcttacatgcttttgtattaaccaataacttggatcctctcatgggcactttccacagactgttaactgtatgttttccaatgccgtaattcagatgacagtgaagcttctgagatactgctggtgaagaagaaaagagatgaagtgtttctgaaggaccgtataccccttgaatttgcgattgctggttatgtgggtcttgcagctatctcaactgccacaatcccaataatatttccaccactgaaatggtactttgtcctgtgttcttatttcattgcacccgctctcgccttctgcaactcttatggaacggggctcacagactggagcctagcatcaacctatggaaagatcggtcttttcataatcgcttctgttgtaggaagtgatggtggtgtcattgcgggtttagctgcctgtggtgttatgatgtcaatcgtctccaccgcagctgatctcatgcaagacttcaaaacaggttacctcactttatcatctgcaaagtccatgtttgtaagccagctcgtgggaaccgcaatgggctgtgtaatcgctccactcacattctggctgttctggactgcctttgacattggagatcccaatggtccgtacaaagcaccttacgcagtgattttccgtgaaatggcgattctcggaattgagggctttgctgaattgcctaagcactgtttggctctttgttacgggtttttcatagcagctttgattgtgaatctcttaagagatattacaccgcctaagatctctccattcatcccgatcccaatggcaatggcttgcccattctacattggagcttacttcgccattgacatgtttgttgggactgtgatattgttcgtatgggaacggatcaacaggaaagatgcagaggactttgcaggtgcagtagcatcaggactgatctgtggtgatgggatctggactataccatccgcaatcctttcaatcttaaggatcaaccctcccatttgtatgtactttggaccgtcctcagcaagatagagatgccactgtggtcataatcgcaaccgcaactgtgagtcatacaaaaggaaacttatccgagagtcttgtggccgtcagaatcgaaacagttgtcttcatatgttgtgtagatatgtttagtatctcagctcgcaagaacaaaatgttgttgcaaatctcttcaaatgttttagtcaatgttgttgtatgtccccgggatgttgtctccttgaatgctttcattcacaagctcaaagagttttacgaacatttgccttgttcaatcatcataaggagtgaatgcagatgaaataatgtactgaaacgattccaattagcctcatattgatagtttaaaattaccaagtttaaaactactacaacttatcatgcaagtaaatgttttaaatttaatatatactatgatgcatgccactctcgtaaaataagttaagtccaatgatgtgatcatcaaatgtatggtaaagttgatatatgtgaaattctggttttatatagttgttagactaaaataagaagatatgaagaacaatttcattaaagaagttaaataaggttatctcaatgtgttaaatacattgaaaggttggcgtagtggaattattaatcttaaaaactgctaagcaactgtaaatttgtaatgatgacactccaatcacaatttaccataattggggcacgattggtggagataatcgtggcacaaactcttaaaaatcattgagaaaaaaacaattttaaatgaaaataatggtgagggtaaacataaatgaaggatatggacaggttgaattaaatggatacagattatcttgtaacaatgtgtgtccattttatt

SEQ ID NO: 29007 - DNA, 3366 bp, Arabidopsis thaliana landsberg
tctaaattggaacttttcaatcttatcggtacgtgtttactccaagtggtagtaaattagtcgttcctacccgtaaatagttgcaagtcagaaatcgattcttaacaggcgatgaaatatctaagctttttcatctcgccaatcgaaatagtgtttatgttttatatccattaaaaaaatcgataaatgagttatttgatggctacactcatcctaaaagaactcgtcaagtggtaaaatcatgaattacactttgattaaaaaaaatggtatcagtagatatatacttcgaatagccgatgtatagtcaattaatattagtcgaaaatacgatgtacagtcaattaataatagagtctatatctctctctctatttttctttatttttatgatgtttaattatgttctttagtgataagcttattatagtataaactaattctccaaacctcttggtctttcattaattttataaatatttacaaatccatttaaattatttcaccttgtctgaaatcagaattaaatagaggaaccgtgtgaacatgtcaactgtgaccgaaccgcatataaatatgaacaaaaacgatgactgggagatccattttacatttgcgatcttaaattcgagtcatgccaaccaaactactgcttttctgccatataataaaatttaaataatttttatattagaagaaagaagaaataataatatggatcacaaacatacaatatgtttctcgtggacaagttctaaataatccgcctaatggtataatttggacataaaatatgttaagactgtcaattgtcatgtgtggatgcacatcagagttatgatatctcaagcatgcccttcacgtagccagctaagatctttgtatctgcaattattttcttctgattatgagaatcacaatcctctaaaagattgtaaaacaatattctctcagttttaaatcatttaaacatttaggagttttgtttttatatgtataatcattctttcttaattaaccatactatttttaaagagaaattctaacaacaacttttttttttaacaaacagatagattcatgatattaatagtctgtaaatttatgcatatactttattgatttgttggttttatccttaataatttctcttctttttctctcttttgaaatccaaatccattgatgttatgttaggtaaccagtctacttcaaattcggtcttatcatgtcccgtttcacacaaaaattacattatttctaaaatacaactaaattttgtttacaaaaatataaatttaaaaatattagttttctatgaaatttgaatataaactaccccatatgaatatgaaaaatacaaatgtatgtaaaaaaaaattgttgttgattctagatagatatccaaatatgaagcgttaatgctctgtaccgcagaacaagatagcattcgtatcaatgtgattgaggatcatatacttgtgttttttggtgtatggaatgaaaaagtggcaaattctttaaaataagttcaatttctataatagaattaggcatgtacgtaaaggaaaataaaataagttgttaaaattgactctaaatgcaaaacaatgaagaagatattgaacatgaacaagatggtgacacacaccatttagaagaggaaaagataaccatcacagatttacaggaaagctcagtacaataatcttctgttgctctcttctggaagttgcttctataatgatgtaaatgcttttaccccacaagaatcaagcaagccactaacaactccatgccattaaaaaatgacagagacaacataaaaaagacaccactttataattctataatggatcctctagtctaacaacattggtccttgcaactctctagacttgatcatctctttcaccacattccttttccaatttatattcgcttctctcactattcttttgtttatttgttcaaagaagcttattgttacaacataagggatgggaccctattcgtatatccttgctatagtgctataggtgtctcattgtagttagcaatgccgccgataaaatgcactagagcaactgaaatttcaacaaccttaaaagaggaaatagttacgggagagagggactgaatcggctggcgcacatgtaaggacctcgccatttgctgtgacaacgtatgtctctggatccacggtgatctctggaagcgcatcattcagcttcatgtcgagttttgtgagctgcctcacgttggataccgctacaaccctcttcttgagtccatatagttcttttaccccctttctcaaggcagcctgatttatgtaagaatacagaaactatagttaatattaactgaatccacaaatcaataggagaaaagaatggatgatacagagtgacaaaagattatatgccttgctgacaaatgcaacagagttttcacttccggcctttccaaatgctccaaacataggtcttgatatcacctaccatcataaaataaaagaaaggaccgtctttagagacgtgttgtcaagaaaacgagtctagaatctagtagtcagtaatgattaccggctcaggagtgggtatgctcgcatttgcatcgcccatattagcccaggctatattgcctcctttgattatcatttcaggttttgctccgaagaaagccggctgccatataacaagatcagccagcttcttcacctgcatcacagtgcagtttccaattaagtaaacaaaagcactgacgttaagtagttacagaggaaaagaaagctgtatgagtaagatatgagacatgtgtggagaagattagcatacctcaaccgagccaattaagtccgcaaacccattggctatagctggatttatagtgtactttgcaatgtatctcttgatccttgagttatcatcatcagccatgttaggatcaatggctcccctctgagccttcatcttgtcagcggtctgccaagttctgcttattacctgtcaaaagagaacacgccacaaagtaagcatctctacagaaaggatataggattcaagaattcaaatactatgaacctctccaatgcgacccattgcttgtgagtcggaggagataatgctgattgctcccatatcatgcaatatatcctctgctgctattgtttcagctcttattcttgattcagcaaaagctacatcttctgggatgttcttgtcaaggtgatggcaaaccatctgtttgtgtttgcatatgaggttattaacaagacaaaagtaaaagcaattcaccatcactcgtataacattctcataccagcatgtcaagatgctcatctacagtatgtttcgcatatgg

SEQ ID NO: 29008 - DNA, 1971 bp, Arabidopsis thaliana landsberg
  unsure (1)..(1971): unsure at all n locations
ttgaggtttctgcgatcacggctggtccagtcaagaaccttacggccatcgcaaaccctgctactgattttccgcacgcaataatctttggttgcaatgccataaatagacctatatgtatcaataattagcaaaaaaaaaagcaccaaagactataactaaatatatatatgaagggaactataccaagactaaacatagccattccaagaccagcatcagataatatcgaaatcgatccactcattatcgttggcatctttatattccacctgtcccataaaatgatcaacaacatcaagcaattgcccaaatatattgttatgttatatgattgtgacattattattagtacttacttgaaagagacaagggaccaagcaaggccaaagagactagagtaagtgttagggtttcgaatgagttttctccaaaccattatcagaattagtctcgtcatcacactcgccggcggcatctgctgtttcctaggaccgggaccgccgtcttccacgtcgctaccttttttgcccatgtaaggtgactttcccccgttattaccgtcttggtccatttccacatgcccttttcttcccggtgacatgttctctatcagattctgcatcgctgtcatcaccaagtatgaatataattataattaaatatcacagaaaatactaaactaaatttattatgacctttcttcgaccaaaaaactaacttatagaaagccgtacggaaccaaataaaaatctactttaattagtttaaaagttttcataagttttgaaactttgaaaaaactataaaaaaaacttagaaccgatattgagctttatacatttttcctaaaagttaaaaaaaaaatagaagcgtggcaagtaatgataaaaaaaaatatgaaataagttggagattaataaacctttagtagcgaggttgtcgtgaggaggaatagaaactttagggtcggtggatacatcggtggaagaacctctggtcatagcattcttcgcgttggcttccgacaccggagaagcactcgaactccacacgaacatgttcatctccttgttttgtcctcctactcctactccgccaccgcttcctccgccaccactttcctttttcttgactccacttgctccactcgttgaccccgtgaacattgggttcggcggtgggtacgacggaactgaccataaattatagaaaattttattttaaaacattacattataatgaaaaaatcacatttaaatttcaaaatacaaaattaatattttgttttccaaaactataatcagtttaaaaacctaagagttttggaagtgatatactaaattattattattttgttaaaagaaaaaaataattacgcaaaattatttgatgaactctttacttaacttttaaacctttttaaacctaataatatcccacttataatcaccggtgactgatggaaaataataataatatctgaatcgattcttatatctatttaaatttataaagaagcaaaatatatttttttaaaaaaataaataaaaaatnaatatatatatatatatatattaaaaaattcatacccctattattgttgtataattccccactcatattntgcctcctcttcctgcttttttcgccgtcttcataacttcctcatcaaaatttgacgttctcggcgtcacgcctttagaagactgaagtgagtaaacatctccacctggaccagctcccccgcnngccgtagctattagtgtaaccgtgacgagggcttggagctttgcttgcgttaaacattgcgtagaaatctgtctgattaaagctagaagctctcggcgtcggctctcgtgacgattgaacggagtaaatctntacctcggtgagatttcccgctcgcggcgttatcatggaggagttaagtcctcccccgtgagatttgttgaatgaagagaaaatgat

SEQ ID NO: 29009 - DNA, 1965 bp, Arabidopsis thaliana landsberg
cgtcttctgggacgtcgtagaatgcccactccctgatgatctcgagccttctgaggtttctgagaatatcgaatcagctctagatagacagggttatcttccttgtaatgtgtcaatcagggtttacggtaagaagaatcatgagttcaaggatgagtttctcctcgctaatatcatgttcgtacccgcaggtgatcatttcctctccctctttaacactactcactccccttagttgtcttagatatctccattgatataactatggttttcaggagatgcaaatgcgagatataataggatggtgaaggatattgataaatgggcattggacaatgatgaatcagatttgatggtgatctcacgagtcaactcgaagttcgccacttatctcgcagattggaaagccaaagacttgtacattttcggagcagagccagaaaaagcaccagggaaatgtagcaactgcaaagttacgagtttggacgagcttttcactcaacaatgggtttgggaaagcctatcacttggaggagaccctatcacccgagcttagttagttattcatcgtttcaatcgattgtgaattctacttgtcattaccgactcgaaattggattgttttaacattttcgtatcttctcattaatcaaaagggtgaatcttgttatagttcttaacgttttctgtgttaaaattaaaagtttgttgctcctttgaatgcatttgctgctcttaaactcactcctttgcatgaatattgattaatcttataataaaactgaatatgatacttgtgggttctgatgagtattacaagttcccgacatagatcgagtaataggggctggttaagtcaagttcccggtacgaccagttcagctgctcttaaactcactccatggccttcccagtattacaagttgctcaaaatgtaaacttgcacagaattcttgattagagagattggtgttgtttctcattttgaacaagacttttttttttttcatctcattttgaacaagactctgtttactatatactagtagaaacgagaaaggagcattctatgttccagaattcacattttgagcaacttgtaaataagaagtccctagtacaacacccacaaaagagcccattaacttcgttgtacagaatgcaaccattccgggaccatttattttaaagcccaaccagaggcccattactgaccctttctagttgaggaacaattaataacttttgtcccaatgttgtcaactttgttcagaagaagtctctctcagtctaggtcactcgaaaccatgtcttctttgacaagcgaaaatgctggtaagctctcgttctctctctatcatgtcatttgtaatggatctattcaaattgtattctctcgatgctgatttgtaatgcatcttccgttttcgaaaaaccttgctgacagagactaaggtaggcgtcttctgggacgtggaggaatgcccagtccctgatggtgtggagccatctgtggtttgtgagaatatcaaacttgctcttgagaataagggttatcgtccttgtaatgtctcaatcagagtttatggtgagaggactaataagttcaaggatgactttctcctcgctgatatcatgttcttacccgcaggtaaagaaacacagtacttgtctttttcttttactttatgtccgtatcttagagatctctgttgatggtttcaggagatgaaggagcgagatttatgaggatgtgtaatgatttcttttgctggggaaatgacaatcgtaaatcaactttgatggtaatgtcacgagacagcactgagttcgcctcttctttcgtaatgtacaaaaacttgaattttacattctcgtagcacagccagaaaaacgtatacggaaaatgtcctgtctgcagaaagcctttggaaatgatcatcactgacgaatgggttttgggaa

SEQ ID NO: 29010 - DNA, 2131 bp, Arabidopsis thaliana landsberg
accacgaggccaacactggcacctccaccaatgttcaaaactggacgggtagaacagggcagtggatgccttattaaagtgttcgttggaaagttagacagaaagattctttatgctgagtgcagtgaagacttcattgattctcttctcacttttcttgttctgcctctcgagtcggcgtcttcgttcttcgaagacaataccattatcggatgtgtaaagaatttgtgctgatgtgggtatagaagacatttggcttacaattgttttattccaagttactatacttgcagtaagaatctccttgatattgccagttgcccttcaccagcatatgaatgtttaattccctattttcgtcacccttattctatttgcaaattttccagaagttttgaattatctgtgcttggtgaagggcaaaaagttgttactttgaatcctattgatccaaagacttccaagtcttgcacttcagtggtagctgatagtgggtttgtgaagagaaataccaaattcatcgtctctgatgatctgataatcactccaatgaacaaattttcaaccattggcctgttaaagaagatgcagattaacatgaacgactttgaggctcaatcgatttgtatctacaaagcagaggtttgctcatactattttttattttgctattgattcttttttatagcctttctgcatcggtttaaatattgtggtcctgcatttgtttttgcagctcgtcaatattttaagagcttcattgacttcgtcctctgctttgaccaacgttctctcgaacttacttgcaaaggagccaaagaaagaatcttgagttcagtttttctctggtgctgaaggcattcaagaaaacagtttggttctaatgttttttttcctctctgtttcatttcgttctgctgttgttcctattaagcaattctcatataatggttttcagcatttgttgatttatgattctaaataaaagttctttttttcttacattgctctatcataacacctctttgctaatacctaagactctgaagttgcctctttctgaagaccgtcccttgtggcttttggggtttaagaatcgtgttcttgttgagatgttgtccttgcttacaatgatctaaaactgtagttgagttcgtcaacttcattgttaagaaagattgcatgaacattagtcatattgaggagaaagtgattaacgttagcagatcagatatatatcagcatatgaatcttgatgcttctttatatcattaacattagactttttcttcttctttcgaatgtatcgttgttgcaggctgttagttaactgagagagagcttccttgattacaaaatctgtattaaccagtgttctctctaaagaaaaatcctaaagaagtaactcttttattttattttatttttaacaactaatcctcaagaagtagctcagtcgactttgcagacccctaaatctgatgaaactcattaaggcgtttctttctcaatgcccttatagctactgtcttgtttattactggagataggtgggcggctcgtctttaatcgattgcatttttatggaaaatatacactctttcccttgggacatgaatccaaactcatgcgctcatagggacactcaaaggtttcttggttttgggtatttgaatcttttatggtaactaaacattatgttctgtggaacacgtctatttatatgggtgggaaagccttgtttccatttactgacaaaaactcctttctaaaacactgctcataaattatctttcttctttgatttgacccccctgatattttgatggctaagagctctgagaagccgaagtttagcctaagacttctcattgatgaggagaaaaacagagttattttggctgaagctgggaaggattttgttgatgtgctctgtagtcttttgactcttcctatgggtaccattgtcaggttgctcgagaagcatcagaatccgcagtcttcagtcgttggttgtttacacaatctttacaaaagtgttgcagacatggacgttgataatttcgagtctcaagcaagtaagcatttcttgctgcatcctcggagtgcgaaggggagtcatggagagatc

SEQ ID NO: 29011 - DNA, 1577 bp, Arabidopsis thaliana landsberg
  unsure (1)..(1577): unsure at all n locations
acaagaacccctaaatttgtctggaaaggcagctttttcattgatgtttctctgtttactatgtagagcttcaaaaaccttctcaaggaatgaatgtttctttgatttccaagaaagttttggttcgttgcctgagtttagttttggagatctnnnnnnnnnnnnnnnnnnaaatacttaaatggacgtagcaggctactgtttgtgaatcctctcgatggcgatgttgtttgtgtggaaaaagtatggcctgtttcagatgtttctctgttgattcaagttttaaacgagagccaagagtcagaaatcaggtcacaggctcgtgaaagctgctttgagtcaaacccatgtcaggtgctcctagagttcagtccatgaatgtggctgaagcagagaccaggtcaactctggggtctactgctaaaaaggctagtcctttcatcacacacaaagctgtatcaaagtcactgcgaaagcttgaaagatcctcatctgggcgtactggatcagatgagaaaacatcttatgctacaccaacagaaactgtgtcttcttcttctcagaagcatactcttaatgcggcttctatactacgacggcatgagcagaacctgaattctaatctgtcacttaatgcatcgttttcatctgatgcctccgtggactcgttccacagccgagcatcaactggtcgcttgattaggtcgtacagtgttggaagtagaagtaagtcttacccttccaagccaagaagtgttgtctctgaaggtgctttggattcaccacctaatggttcagagactaagaagaggtgtacttgggtgacaccaaactccggtcagtttcatactcttatctacattcaggtgtagatggatatacacaatcatcgacttactttcaaagatctctctattgactgttttttgttttgtatgaaaacgccagatccatgttatatagttttccatgatgaagaatggggtgtgccagttcacgatgacaagtacggttcaagcttttctcgcttgtgtatatctgctctctgtttgatttatgaatattccttactgtcattctttgctggtgtatgttcaggaggttgtttgaactccttgtgctttcgggtgctttggccgaacacacatggcctacgatactgagcaagagacaggctttcaggttcttgctatgactctggttcactcattttgcatgaacgtttctctcatttctttgaagcagtacattccgttttcttatgaaaagtgtggaatgcagggaagtttttgctgattttgaccccaatgccattgtgaaaatcaatgagaagaagataattggtccaggaagcccggcaagcactttattgtctgatcttaagctaagggcagtcattgagaatgcacgccagatacttaaggtagacctctcttccactcttggttggttgctcaagatacccaattttgagcacattgattcaaagccttgcaaaattctggatattgaaataaaggggggtctagaagtaatcaaagtattattgtttcaagattcaagaaaaagaagatcaa

SEQ ID NO: 29012 - DNA, 2404 bp, Arabidopsis thaliana landsberg
cattgccccacttataacactgacgagcagtcccggtgcaagtgcacatgggcactggcattgtcgtctcatcgaacgtgactaggacatcgttactgtcccaatcctttctgcttttctttccgggagaagcaactggacggttcagatcctcgcccattttctttccctgcttgctctctttcttccttttggtcggtctcgtgttggctgcttcaggtggaatagttgatataggggaaggattaggtaagtggctttcttcagttataaacctttgggaaccaccgcgcttggcacacgacaaaatgtagttaagattgttttcacggtatcgaagagcatttaacgcactttctgtctccatgatagcattatctctttcagagagagctttgtcccgctgctcaagtgcttcatcacgagaggctaatgcttccttagttgctgcaaccgcttcgtttctttccttgacagctgcgtccctctcagcaaggatggagatgatcttcttattcatcaccaatgcattatgttgctcctttttcggcatcacattctactgcacacacacacagtttgtacttaggtttcattcaaagtaacgaaaacatgtttttttttttagtgatctgcttcttcaagtgttttttcttaccacagattgtgttcctttgtagtaatcgggcttgtagcgcccattttcatactgcccaccactctccatcctcttactttcaactgcaatggagaaattgatatcaaacattgtgaaactaggctgacgagtaactaaaaacagaaatactccaaatcataagcagttccataacatacatttaacccaaataaatcgagaaatcgtatcatatcccacaagtcagcgtaataccatccaaaccaaacgatgaagaaaacaatggagcaagtaagatacgcggaaacatatatagagttcgaatttcaagttaaagcaacgacgagagagctcccagaagaaccaaaattcgaagaaaatgaaaattgtagagagaaaaacttggcatgttgaaattaacagataggtcaagaacacgattaacgatcgaagacttacggatttcaacgagccttcaggagaaacaagcaacggaaatcgagaaagatctgaggatacttggaaatggtgtctgtgtaatgtggcaacaagtgtaagacgagccaggtactctcggttcattttactaatatacccttgtcttaaatctgctaaacgagcgcaagcaagaaggttattattgtctatccatcttactcgtaaaaatgcaaagaagtttctgtttcaatctctccaatataagccaaacaggatatgattttggttctggtggatcattctagtgggccgtatgatgggcctaagaataaggcaactaatctaggtcgaatacgggtagacccgggttgagatcccgacgtgtgcgcttcgctgttgtagtagtagtatatctcatcatcaatcaggcttttgagcctcggaaactcaatccttgtaaattcaacggagagagatctgcgagagaaagagagatcagattccggtgttccaaggaagcacatattttaagatccagaatcgcctgagagatgtctaccttcagtggcgatgagaccgctcctttcttcggcttccttggcgctgccgctgcgctcgtcttctcatgtatatccatctatactctcttataatctccatcttcttcttttctctttggttctgaattgttcactgatcttgtgtgtgtttgttgttctcatgatctccctcaaagttgcttttgtgctttagatcggccctgagaagttcaccgatctgtgtgttgctcatgatttttcttagaaatttctctctagatttgtttaggctaagcgatatcactgaactattatatgtctctccttttcgaaaattctagtttattatctttagtcagtggatcaaattcttatggaactgctctacgctggttttaaatcctttttctttgtcttttctccattggtgatgtagtctaggctgatcttctagaaactaagactttttggcttagatctgtatgtgttgaatttcttggtgtccccgacaaaaaaaaaagaatttcttggtgtcctgttctttgtccaacatatcgaaattacctagggaaatttgctggagttgccaggttttgtgattgctgtgactggtactaattgcataagtacagatttaccgttgttaccatcaaaattgctgagttgctttcatctatgtcaattatgctttttcttcatatcgaaggcatgttgattacttgtgtaaaccatagttagattgtgaccttaaagagtgtgtatctttgtgctattaacaaggtatgggagc

SEQ ID NO: 29013 - DNA, 1167 bp, Arabidopsis thaliana landsberg
  unsure (1)..(1167): unsure at all n locations
gcacattgtaactccaaattctgatatatcacgacttcatgatcacttgattctattctctatgggtggccgtctctagtctttgatactcaagtatttccctcccctctaggatgcttattcctgttgggtgaatgtagttttgcttactttttaaggcaattattgattatattcgagcaatatgccacaatatggaaaggttacatcattcccaccaaacaaaagatacaactatttatccattacatacacataaaggaaaaagcacaaatattattcttttacnnnnnnnnnnnnnnnnnnnnnnnnnnnaacgaaattttgtttcatttttctgataagattgcattcatatacgtggatcatataaaacctagttcattaatccatttgctagttttgccctcagatctttcctcaatatcttccctgatggagctttaggaatggattcagtgaagaacactttgttgattctcttgtaaaacacaacctgtgatttcagatatatacaaagtttgcatcaataatgattcatttctcatgcattaatcaaaatcaagaacttgctttgtaattcactttttacctgtttcgacacgaattgcttcacatcatcttctgataactccgaatccttcgatttcaccacaaatgcaacaggaacttcaccagctgcttcttctttcattctgtttaatcatacacgtaacaacaaaaagtgtaagcagtttgaaacagagatgctagagaaatcaagatcggctctgttattgatatcattgatctccttttgtcattatgcttaaattatgttttaatcattcatgttggttcaacaacatactttaataatagattagtactcagaacatagattagcctaaatatattgttgaaccaacaacattatttggtcatgatcaaacaatgtccgttttgtagttgttggttcaacaacatattttggcgcaattcaattagcgactgcaaaacgaacaacggttaaaaatttgaacttacgcgacaacagcaacatcagtaatgtcaggatgaccgatgagcaaagcctctagctcagccggagctacctgaaaacctttatacttgataagttctttcaatcgatcaacgatgaaaagctcgtcatcgtcatcgatcaat

SEQ ID NO: 29014 - DNA, 2316 bp, Arabidopsis thaliana landsberg
taataaaaacaatggggtttcattcttgcaatttgtgaaagatagttggaaagagttataacatttgcaagttgcgattaaagagggaacatatactttgacagagatctaagacctattgcggactaagagtgtctcactgacttctgcagtcacaaaaaccaaaatattgttttcagagctgccaggagaacttatttctattagagagcagccatttgacaaagaaagaataagaaatgcatttgacttaaaaatataagaaagtctgcagagagaaatttaattgaacgagtcttcacaagtgtagttttttacctccacgtaaagctcaatcatgtcatcagtcacattgactggattatcttggatgaatttgggaaagtcattgagtccttccaaataaatcttcgcctctttgggtatatcccttctaatgttttcacccgagctatctacagcttcatgttttcttagacgagaaaaatcaagactcccagacaagtaaacctcaataacagtcttgagatacaggaacaagcttcttggatgagaatggagctgctcttgaatgcgtttaatggtgtctttcaaattacaaataatcaggaagaatgctccttgtctgcaaaatgccagacatccaatattattagtccactagacctactcaacagagagagagagagagtaaaatcaacctaaagttacctgctcaaatcaaggagctcgggaatcctagaaattattgcagattgaaaggcagtgaattcatctccactcaactgtgacagcatcttgttcacatagcaaaacaaatgtatgggttcatctgcctctttcacgtagctatccaaagctgcaacgtaccttcgatcgataatatgaatatagccacaaacctggggaatttggaaaccattaacagagatcaaggacaacatcccaaaataaagcattgcaagcacgctataggggaatgatgaatggctaccaagaggatacctgataaaaatgtgctttctcacaaagctgtgatacataatctgcatcccaatcagtctccgggacagctttcagaaggtttagtaattggttctctctcatcttagaagacacgttataagttggaagaatgtggtctgatgttaagtaatctaaaatctgtgccaatacgctcttggaaatactcactctaccacgtgctgcataatatgcaacaaactcaaatagatgacttgtatcctccttggaaggccaatttttatctgattttgaatcatttggatcgccagattcattgcttacgccccagtcgggaacatgaactagagcatctacaagattctggattagtatatcgttgctaacttcgggtaaactgccatcagtcttggactctatacttacttcaccgtactccagaaggtgactctcatgcttcaccatttcattttctacaaatgcatatcttaggacatctaaagtggcttcagtatccatttctagcagatggtagaggttcaaataattcaatcgagatgttacacatgtactagaatcatgggcatttgatttctccagtagaaactgaatcagctcactcctaagtgatggccatcgtgtaggatttagagttccatgtcctgcagataaaactccaactaagtttgtgagaggaaaatgcctatataaaagtataggtcactggatacaataaggtcgattgcagatcataacatgcattgaatccataacagaatcctacctggtggaaaagccaaaccaagaaagcagtactttaaataaacaagcatccggtacctgaaaaagaaacagagttaaaaagaactcatcatttatgtggccgcaaaatataccttagttcagacaactatattgcgtcataaaggaaatcaaaattttcttacacaacaataatattgcaattagctatatgcataggtgcgctctaggattagttgcatgttaggtagaaatgaatgagcagtttgaattctaggctctcgagttcagttttgcatgtaaggttttattcagccagaacaaagtacaacgacttaacataacatacccaatggctgtagccctttgtttctcactgttccgtaagacaatcaagagttcctccagaggtgacctgaaatcatccaaccctttgttgaaaagatagagcaaggccccataaagcccatgctcacggcaaattctgactacctaagtgtcaatgaggaaaacatcaaaattcaaccataatactaaatcacacatcaacttattgagaaaaggaccgac

SEQ ID NO: 29015 - DNA, 709 bp, Arabidopsis thaliana landsberg
agatgctaggacaagcttggaattaaaaatctgtaaagtagaagctcatggattaccatcaaatataatgtttacaagtacatgatttcttataaagtaaggtagggttacattcaaactcttgttttccatggctcccctgaaaatcgagcgaaaatcaatcagtttgtctggtatcgacagtaagaaaaagaaaaatggacagaatatatttgcaaagggattaattctacaagtgtgacagaatccaccatttggtcatacatgttaaaatctggaacagcaacaatgttgaagagatccaggtcatactcaagcccgaacacctagtgaaaaaagggtacacataaataaataatcagattcagtaacctaacaagtaacaactacaatttaaaaaatgcaagtgcttacatcctcatcccacttcatggccgcttttagggaatacatggcatgggcagtctttggtagatcttctgcaggagtccagattttcagggaaacctgcctaccagagcgtgtggtaaatgtatcatctgtgctcactatctgtccagccaccaaagcaaatagatagcacggtttcttgaatggatcctcccacaaggcatagtgttgaccaccctacatttccataaaacattatgctttcagcaaagaccaagccgagagacacttggcaatcgagaaagaaggcattattttg

SEQ ID NO: 29016 - DNA, 1078 bp, Arabidopsis thaliana landsberg
  unsure (1)..(1078): unsure at all n locations
cggggctttgatttaggcttagtgttaagcccaatttccttttattgtcttctacttaaacttttcttcttcttatcaaattttggtcaatatcggtcaacaccggttaacactgggtaatgccggattctggtcaaagtaggatgtcgtgtatgttcgtatgtgatgtcaatatttcgtgtagctaacgagacatttttaaagtctgcatgtgtggcgatgtgttggcttgtactccgtgtagctgataaacatttttccaaaatttttttatatattaactaaccattgataaaaaaaaatataaaagacattgcatggaattttcaattagagcatatagcattaagaaattgtcgattacatcaccgaattataagaccaatcaaagtcgggtgtcaactaaagctagtgagaatgcggatatgtcgcggtagacaggtggcgtaacgtaattacagataaatagatgaataaaacaaaatcatatcttttttgacattcttctttttacatctataaacaaactcatatcatataatagtttcttggcttctctctaaattccaaacagaaaactttccctcctaattcaccatgtttctagggttttcagttctttgtttgggttctttgtgttggtagagaaatctccgnnnnnnnnnnnnnnnnnnnnnnnggacgagtcaacaaacgctgatactctgtggcgggagttacacaaggtactgccggagatttggtacgacggaggaggcaaagatcactgtgagattgatgaggctattagaatcctgacttgtctgaggaaaatagaatcgaagaatccggaatctgatatatctccggtggaagttccaaaagagtttatatgtacactctcgaacaagatcatgatcgaacctatgctcatcgcttctggccaggtttgatctcttgtgattcttgcttcagttttcgatattccatttattcgtatgagcatataaagttccatttaaagtttcagtatcaaagaaaaagaaagatccatatatatgattctggtgtgttcatttatgtgttatgcaaatacaga

SEQ ID NO: 29017 - DNA, 1225 bp, Arabidopsis thaliana landsberg
ctgcatattcttacccaaagccttgagtgtgcatttgttttaaggttttgttcttgggctctgtgtaacaaaacagagagaaggattagttgacaagtgtaatctatatacaaaggcaatatataagagacattctaaccttatgtgcaatgtcttctacaatgacaccttcaggtggaacaatacataaatcggcatcccatgcaatcatttctccaactacatcctcaatagtagacatctcaggtacaggtctccatagtggagcttctggcttggtagcagattcaattaaaaactaaactacattaggccctaggggtatcccatgtactaattcatcagcatcatatgacacaacacggccctcaacaacattatcatcagaagaagtccagtcaaccaaattacacttaggaagtgatctggtatttacactcctatgtatagagttttcaccaacatcagcctcttgtctgtataatttcagaaacagatcaagacatctaatattccttaattagtacacttaggaagtgatctagtatttactaacctggtcataaagtttttcaataatctgctctagatcctgaattctattcttcatttgaatctgattgttttccattgcagccatagagtggctgttgacctggaaacaagccagttttgacaagctcatgcctctgcccattgcacgcagtctttctggattatcagatcccaatatctgactaagcacatcttcctttgtgtattagttgttgctgaatcctgggttccttcaatatctatctcggttgcctttttctgcaaacaaataccaaataaatccacaacatacattaatttataagcataatttaaaaggaacaaacataacatacaatcatttcagtcgcatcgatgtttacaggagtaccatcctttttagtacgtgactcgtcccacacttttagccttttcaccttggatggttcatcacttttctagactaattcttctctcaatctgacaattcctttacggccacaagtatgaagaatctgcttcttccttcttttcttatatgagtcacttactaccttaaattcattactagtcttctctttgacaaacttacgccattcagccattgttatattaagtgcgacgtagactcatactgtctttcatgttatcagcttctttgacctctttgacaaggcattacttggatgat

SEQ ID NO: 29018 - DNA, 2038 bp, Arabidopsis thaliana landsberg
aatatgttacttaagtcttgctattcattgctgacaaaaagaaaaaagtcttgctattcattgtttttgtatatattttgcaaataagtcatgtttccaaaaaaccattgaagtcctactttgaaggaatgtgaagtcccaaattctattcaaaaataaaagaaaaccacatgggtatatttaagagatacattatgattatgggttttaaataatgtttcttacataataatacttatgtgcttctcctttccacatacctttgtgtttacacttacacatgattacatcaaaacattacatttttgcaaagccagttcactttttcttttctgttgccttttgttgggtttcactcgcaggcaagtttagtgccgaaacttgtgagacagatagcaaaagcctgaaatgcagagagaggctgtctataatccatagtgaaagtgtcatctcccactttaccaaactgtagaagaactgtttcttcatcgcctttaccgctcggttgactttggtcaacggtcgcaaccagctgaaagttcttgaccgaagcaacagtaactcgtccatggaagttcagacaccagcactgcaagtgctcgtgccatctaggagctttgttctttagtattgtcaagctggaaccatccttgttgggttttttcattatcttggttacatcacatggcttttggtcagacgagagtccagcggatgatgatgaaggtgatggtgatgggcatcggagtgtgcttaccattcttcttggacctcttgatttcaaaaggttgaatttataagaaacatgaccgacttcaaagttgcctgctggaacttgagggcttatctgctttgatgcaaatctgcgactggctttgccatttgaaggttttgctccgttgtgtggtggttggctatcgtatactgtaaagttggtcccaagaaaatctgatctgttgaagtttccaaaaaaaaaccatgaacccttagttttcaagccacactcatcttctaagcaaaaaaaaccaaaccttaaaaagactcacaatactacaattccaagagtggcaataacaaatttaaaacttctgagatagcaatcctgctttagagattaaatggccgcctagccgcctaggatattcagtaatgcacatatcaataccttaattttccgacgtaggcattacttccttgagagaaatcatcagcatcaagtgatatgatgtactcagtgtaagcaccggtcctaaacctccgcgccgccagaagaaactttcccttatcagtgaatgctggtgaacagaaaatacaaactaaattaataaatcctgaaaatgatccttttgccagcaaaggaaaaatttacttaacttgttccaaagcagtttgctcttaaatttaatataatgatattttcattgagtttggaatgaaaatataactcaaaatatcattcagtgatgtcaagatacccgaatatagataaaaggattaacaatgcctagcaaactacttcacaggtcaactcctatattagactgcagctcagaattttcttcatcatcaaccaaggtcaacaaaaaagtcaatacttattaatggcaattggttggtaagttgtttcaaagacaaggcattattaggtaaaagactgagacaaccttaggaagtcactaattcaatcgttttcacacttaaaaagcctatctaaaactttcatttcaagccatatatacttttctaattttgactgaatcaacaataagaatgaagcaaaaggaaaagtaatacttttgaaataacttacatggtgttagagcaagatacaagtaaaacgttgatgtcttcttgttcctctttatcaagcactgattagaaaagtctctaggacctggctgcatttcaaaatacactaaactatctcaattctcatcccatttttttttccaattgctcttaacaaaagcaaagccacaatagcatctataaaggcatattaagctaaagcaagaacaaataccattaagcgaacaaa

SEQ ID NO: 29019 - DNA, 1162 bp, Arabidopsis thaliana landsberg
tatttggggaagttaaaattaaaaggcattttctgttttatatgtcagacacataagcaaaacagcaggaggctcatttgttctgttgccacagaatcagttccggataaagctcaagattccaaaatggatgcacctaaagaaatatttctcaagaactacacaaagcctgattactactttgaaactgtatgctagctttcttttaattccaaattgagtatatgactagaatcattttgctgttatttaaagcttttttgtttgtttgtttaggtggatataagcttctctctaggtgaagagaaaacaattgttagctctaaaatcaaggtttctcctcgagttaaaggtacaacagtctagtactttgctctttaagctgaacatacaagtttatttttcttttgcatgagctgtttgcatagctttaagatggatttttgcttctttttttctcacatcacatctgaacaagtatcatgttggccaggatcttctgctgcattggtcttggatggacatgacttgaagctactttctgtcaaggttgaggggaagcttcttaaggtatccattcaatagttttcctttcggaaaatatttgtatctctaggctcactttatagacttttctctaagacaagcaactcagttgactaagaataagtaactcagtttcctctctgatacttggtctctcttttcactttggctaggaaggggattaccagttggactctcgccatctaactcttccttcgcttccagctgaggagtcctttgttttggagattgatactgagatatacccccacaagaatacttcacttgaggtgaacttattttcctttctttttaaactttcaatgatgtaaatgatttcttctaacctttttaatttcttctgttaggggctttacaagtcttctgggaatttctgcacacagtgtgaagcagaaggtttccgcaaaattacattttaccaggttgattacttgttgataagatgactggtgttggggtagtacaattgatgttcttacattgtgttcttattatgaaatgacaggatcgtcctgatataatggctaaatacacgtgtcgtgtggaaggtgacaagacactttatcctgtgttattgtccaatggaaacctcatt

SEQ ID NO: 29020 - DNA, 1368 bp, Arabidopsis thaliana landsberg
tgcacaaaacatgtgattcaattactctcacgaagatcatcatcttctagacgttactacaatgattttagattattgtataaaagatataagttttttccgtttttttaatgatcaagctattctcaaacattgccttattgtacactcaaacgattcaaattcccaagaaaaatcacagaatcgagaatttacgaaactaacctgagatgaagatcttcaccggtagagaatgtgaatggtttttcgatgaacaacgctttcacgagctccgccgataagaaccacgagcttgataagaaatcaacctgaagaatccgatctaaggtgatgtcataagctggatcaggcaagtaaaggccagcttccttagatctaaacttcctatagctcggaaacgtgaaatccttttgccggaaaggtaaaatccttccgatacttcccaaaacagagttttcgtatttctcagttccggcgacgtgtgagagcatctgaagcattttcttcccaggaatcatatcatcgtcgaggatataaaccagatatgcttctgtttgaagcgcgatctggaatcttccatagtatttgaaatcgtagtttgagctgatgaagctgattcgagaatcgttgtaacttccggcgattcgccggagagaagcttcgttaggactcccgaaggccaaaacccagacatggtgaaacggtagcgtttggtggagaagagaatcaagctgagcacaaagtgttttcctcttgaagtgatttagtattactgttactttgggcttattaggcccatttaaagcccattttgacttcatcttcatcaactcttctaaactctctgacccaagattcttcctctggtaacccaaaacgtcgtcgtataactctcgcttcatcttgatcattttctcgtcgtttgattttttctgcgagaaatcaatcttctcgtactcgcaaacttccgctggagaaaccatcaccggaaaattctccgatttgagaaaagaggcagagtcttggtaatggcttacgacgtgaggggtaacaatgtaactacgcatgttatgggcccatttagtggcccaagtgaagtctggcttggcccttaagtcaatggaaggactcatgtagtagagaagtccggtggcgtagacggcaaatgcgaactgaagacacgtcagtgccgtcacgaacttggccgagttaagtttccggctaggttttgttttcccggcggaatattcgccgaaaatgctttctatataatcgccgcttctcaccgccggtggccgtataaaacccatttttgcagaacccaaacccttggttataataagaagatgaaaagagagaaattagaat

SEQ ID NO: 29021 - DNA, 2428 bp, Arabidopsis thaliana landsberg
  unsure (1)..(2428): unsure at all n locations
ttagtttttactgttgatggtattttttatatattttgataataaaaccctaaaatggtatattgtgatgacaggtgagatggatacgggtattgtattcgagcttcaaagtgtttacggaggaccaagagtacttaatctcaatgcatggtcaattaaagtttgattacgtggaaggttttgtgattgtggacgaaggactcgtcaacaattggagatcttctttcttctctccacgtaaccccgtcaagatctcctctgttagttccaacggctctgttttgtattgccttgagatcaccaagaactaccacgactccgactccgaaatcgttgatcaggtcactttcattattcacttagaaaaaagcgatattttctttttttatattgatgaatatctggaaggatttaacgctatgcgactattgggaaatcattatgaaaaaatatttagtttatatgattgaaagtggtctccatagtatttttgttgtgtcgactttattataacttaaatttggaagaggacatgaagaagaagccagagaggatctacagagatctagcttgttccacctgaacttaataatgcacatttatataattatttttcttcttctaaagtttagtttatcactagcgatttaattatggttactaattaagtagtggacagggtggtggaccactcactcaccaaataatgattcctctttactcttaagtttaattttaataaaaccaactctactggaatcttaacttatccttggttttggtaggcttttatagcaacacggtttttttaattttcctattccagattttgtatattaaatgtcgattttttttnnnnnnnnnnnnnnnnnnnnnnnnnnnnnnnnnnnnnnnnnnnnnnntaccgacatcggtctttacaacggatttacaatatgtggactttctcgaccgggtacacaaggccgaattgaagctccggtccaagaatttatgggaggttccacacccatggctcaacctcttcgtgccaaaatcaagaatctctgacttcgataaaggcgttttcaagggcattttgggaaataaaacaagtggccctattcttatctaccccatgaacaaagacaagtaagtcttgacattaccattgattactacttctaaatttcttctctagaaaaaaagaataaaacgagttttgcattgcatgcatgcaaagttacacttgtggggattaattagtggtccaagaaaaaaagtttgtcaaaattgaaaaaaactagacacgtggtacatgggattgtccgaaaaacgttgtccacatgtgcatcgaaccagctaagattgacaacaacacttcgtcggctcgtatttctctttttgttttgtgaccaaatccgatggtccagattgggtttatttgtttttaagttcctagaactcatggtgggtgggtcccaatcagattctcctagaccaaaccgatctcaacgaaccctccacacatcattgattattacattaatatagatattgtcgttgctgacgtgtcgtaatttgatgttattgtcagatgggacgagagtagctcagccgtgacgccggatgaggaagttttctatctggtggctctattgagatcagctttaacggacggtgaagagacacagaagctagagtatctgaaagatcagaaccgtcggatcttggagttctgtgaacaagccaagatcaatgtgaagcagtatcttcctcaccacgcaacacaggaagagtgggtggctcattttggggacaagtgggatcggttcagaagcttaaaggctgagtttgatccgcgacacatactcgctactggtcagagaatctttcaaaacccatctttgtctttgtttcctccgtcgtcgtcttcttcgtcagcggcttcatggtgacacaggacaaaaccaagaggaaagtagtagttgagaaatattcttcctgatgtatatatatgacctaatagagaagcatcagagagattaggttgggtcttttgttagtaggggttttaaaattagagtagaagattcaaaattagtcaaatttattgtgttgtttttatacatcacggattttggaaatgggtttgggacagcttaaacccaattaaattaaaaatagacaacaaacctcaaagactgttttggactattttacattttttttggttgatcgaggtttatactttatcgtcgtggaaccaccatcgggtctcctttggagatcttccgttcttacaattcttcacatatcggtcattatcggttggtcgttgctgcaacaaaacaagccaagcgagacgaaggttcagcttcagcaacaaagagatcaaagtttatatattaatggtgagtgtaagagctgtaagtacctttcagtcgag

SEQ ID NO: 29022 - DNA, 2199 bp, Arabidopsis thaliana landsberg
gctccccgagaactgatggttgtggatagggcctccctattaacaaaggcttgaataaatactgctcccgtatcaacgtggggtgctattgccacagctaatcctttgtcatcccatttaatgcggtccaacaagttatctacctaacacaagaaaacaacagaaacaatgattagctaccagggaacacaacagccgcatatacattgcttattgagacagtaataaaaggcacaatggcaacactaccaacacagaaaaaaacattgtcatttcaatcaaacaagcccctctctaatagtataaacagtaaatgcattatcggactagatattaaagccaaaagagaaatgtctcaatgaagattattcaggttgtggaggacagatgtagcccatgccatcacagattcagatgaccaagcaaacgatgtacacctttagagaaaactccagaccaaaagatggaaaccatcaaaaagcctttccttctctcttttttctttaccagagatgtaacagttcaaactcatttgtcaaagagtaggaacctgaccatctctggccaaatctcaattgtacatgacgtaactaaaatagattaacaaatgacacatcttacatgaacctccttttctctaaattaaaacataagctacttcggaaggcatcacagtaattcagtgatgaattaatccaactctgagagcgcaagacaatacatatttccttgaaaagatatcaactgtgatgaacaaatggagccaagtcatcacgtaacaaagatgaccaagcaaacgatgagcaccttgaaagagacatccaaacctaaagatggaaaccatcaaaaagcctttccttctctctcttttctataccagagatgtaacagtccaaacccacatgtcaaagggtaggaacctgaccatctctggcaaaaatccaaactttacatatacaatttactccagacaatgttcatagaactaaattacttttggcataacaatatacttaaatgctttaataaaatgtgatgaacagatgtagctcaggcatcaccaaatgcagatgaccaagcaaacgatgagcatcttaaaaaagaaatccaaactctaaaaatggaaaccatcaaaaaagctttcccttctctcttttttctctacccgacatgtaacagtaattactcatatgtcaaagagtaagcacctgacaatgtctggttcaatattcaatctaaattctaatcgttcttagataacaattaaacttaacacgattccattgcagaacattctatctataagttaagattacacagaagatgtttaccttagcttgaagagcaatgttcttattatcattgcacgcgaatacgacattggatctgcttctcagcttagtatctctaaaggaataaggtttggggatgaagcagctacttctcgctaaagactgagctaatgcattgtacgataccgccattttaacgctcgagaaacgaaaagtggcggcggattgaaaaaaaaaagcaacggaagagattaaccctaattgttctgaagtcaatgtgatagtgaagggctttttaaagaccgactcagcaatgtgtgcaaatactaaaatgcccctatttatgtcttaatattaggaattacaaaagcaatccctattaattgcttgaaatttcaaattccgccataacttaagtttttctctattcttcgtctccaggagatccaaaaaccctagaagagctagctctccgagttatcattttcaactattcgcgttgggttactgatattttcccggtcatctccggcgttaattttccgatcaggttagtaattttacgattctatgaatgtatgtttgtcttcgtttagctttctagttttctggaatcgcttttgagtagatgcaaatttgtggatttgatgacgatataagactaagcattcttttgttattctcgattcagtctcattttcgtagggcttgattgatgctaatttgagtttagcaactaattgttgattccagatttggttttgaaagctatatctataattcggtctcttaagatgatgaacggtggcattgccattaattcctgcttgaacctctggttcctgaattgaatatatcttcgtctggatgttatgtttgactgaatttttcaagtttatcattggta

SEQ ID NO: 29023 - DNA, 1460 bp, Arabidopsis thaliana landsberg
agtttactttatgtatgtatagtaccttcacaacacatgcacctgtgatataatgggtcgtttcatcatggtagtgaacaagttccattgtggttcgtagtgctctttgtctaacaaacttgttgagaggccagcggtttatgatattctccgaaagcatatgaacacctttccaaaacaaatcttggccaaatgactttggatataatagatcttcctgcatcatcgtgatcacaaattgttttcttatattaatataagatgtcatttttttttaatccatatttcacatgactacacaaacctttgcgcatcgattacgggctttgctccaaatgattttgctgtaaggctggggataaagatcttctcggagctgtacaatgagagcggttggtgtagatacatattttttaccatacaaatatgacatgcccatgagaagatcccggatatatatccatagagtacctacactcataggtatatgaaacatggttttactcagtgtcataaagatatagagctcatgcaagtgctacaaatcaaaaaaataaatattcatatcattaaggtatgaattatggaacctccattaatgggagaaaaagaagggagcatccaaatctcgggtggtagaggtttgcaaccagaccagtcatatactccgagaacctgtataaagaattgattaacttaatgaatcgaaccacaacttatataaaaaattggtttagaaaacctcgaattttatacgtatgtgtgtgaaaacataccgaaagccaagctttagcgaccatgggcgcatacgtggcacccccatggtctaggatccatttacgagcccttgcgcatgcacttccttgaccgtcaagatctggttctactcccaaaatacgtaggcagatgtagttgaggaccgtgcaaaacatgacactgtggctttccatatctaacccccacccaccatcatcattctgcataccaatggttatggttgtaacatactataggttacaagttctaacaattgtatacatcttttatctttttttctttgtttttgttgaatcattaggaagttctaactaaggtctgtacatccccttaacacgagacaagagcatgttatatggtcccactccaagcgtactcgatcatgtgacctctaggttttgttttgatttgaggtgttttttcagttgagctaacgaggtatacatatctatatatatagatatatatatctttgtctattttgaataaatgtacataaatctgttgcaatttatacctgagtgttatacatgtaacggagtaactctttgacatgctctagtgtaaagatttgctccaggtgtccggtaatgtacaagcatatcacctgtgattatttaattttaaatcactaattattattaagaaataatcatattcctttcgaatagataattatgaat

SEQ ID NO: 29024 - DNA, 3099 bp, Arabidopsis thaliana landsberg
  unsure (1)..(3099): unsure at all n locations
cttgaccttcccaggtgatccaatcggtggtctgctttgaggaaccaaaaatggagatctgtagtactccactgtgcaattgtactcctcaaatttaaacaccaagaaccctttgtgctttgtgatcggacttccatttatttcataaatcaagctctcgttcttgactgcagaagatagtagacaaagtagagactcccactggtttcttcctattgaatcgccaacaaacacaagccgcttgtcccggagtttctccagcatcagttttgcatcaaatctaattcagttttcaaaacaggaaaatagagtcagctaagtactgcctcccaagacaaaactgaattctctattataaatatctgcaatcaagtattccacaagaattgacctttacccacactattccacaaaaccaatgtcaaaacgtttgcttgatctaggtggaattcaaatcctaaacatatagttcatagctcaagaaacaagacggacaaactatggtgcatacatgttagtttttggcaaccaatcatctctttccagtttaactcacgggtacaatacaaaacaaaaccctttataaaaaaagaaagagcacacacattgattggtgaagaaatagctgtttgatgtaaatgggaaatggaagaagaagggaccatataaaacgatcaaatcaagagaagagaacaaaaagagcgactggctttaataccaaaatctgatgactagtttcacgagattgtgcttatcctaagccgtaacttgcggacaactggagaagagaccatagaaaacgacatcatcaaagctgaaagcaacaaaacttaaagaacctctgacttatcttctccatagaccaaagacttgataaatctcaaacccaaaaacaaaaaaccttttgatttaccagaaattactacaccaaaatctcctttccaataaccaaaatctctagaaaacaaacataagaaacttaagttgcctagaacagtaaaacacagaagaaacttaagaagctctgatttctctaaaattcaataaccctttcggtttccaaagaaaacactattcaaagaacaaacatgaattccatcaagataaacgatttgatttagcaattaagaacaccaagtggcagaaacagagtaagaacagaagaaacaatcgaattttccgggggagaaaaacagaatcaatacctgggcaaattacagtgtctaggttgccatcgccactgagtatagaacaaatcagaccttccaaagtcactacacctaaacccttcatcgagagatctgcaatctctggattgatacaatggatcagactcgtcccaaacccaatcttcatctaacacatcacacccacttccactctcttccagaaacccaactctcttggaactattactnnnnnnnnnnnnnnnnnnnnnnnnnnnnnnnnacttgagccaaacgaatctctcttatttattcgaaaggccatagcttttagcaacgcggctgtgatcaaagaagaaaaaactgcaaaccaaacagaccccaaccaagaaaaaccccaacactcctaaagacggctcgaacacaagcctcgaccttttgaatctcctcaaagcttcacagattggctttgctcctccattctcttcaacgtttgagttcttagacatctgaaagtatctataggaaatcgaaaggctttgtctttgggtttaagaattcaagaaattggtaaagtaaaaaaagagggaaatcatgacgaatgaagatgaagcaagtagaggaactttgcttggtaggtcagtttcgtttcttttagtttaaaatgatgaagaatgaatgaatgatgcgaaaaacatgtgtcaaggaaacgaggaaacactcatggatggatgttttgttgcgcttttccaatggagaaactgaaataaagtttggatttttttcagacaaaagaagacgaagagagaagaatattggtaacaacaacaatggcgattcggttcgaatccagacaagcgaaaatcaaaagaaaactctcaactttctcttcttgtccttttgtgttcacattcacaaggagagagatagatgcaggagtggctattggttgagaatcgtggggtttctgaattatgggtccaattaattcctctttatttggttttttgtttaccctagaagaatcgaaaaaaacttactcttcaatttaccctgattaattttttctaataattgagataaatctgtgcttttgtagtaactttagatttttgtagaaccttgaaagtgaagattcataactaattaagaagtcaaaggataatagtatccagaaacagtaagaaattaaccacagtttaaataactttcctgaacaaatattcttccaatctacaattagtcaattactaataacaacaggtcagaattcttacacacataatttttttaatttgtttcttttgtaacaaaactacttaatataattggtttgctagtaattttacaacgttgtatgaataattgtttacacgcgcctgcttggcgggtgagatcattcatgtcgtagcgagtggggagggcaagcgtgtaagttaaaatagtgcgaaggcgcgtgggacaaaatgttatgagtggtaatggtggggccaccagccgtgtgcccttttattagtggggtttttaattcgtctacctgaaaacaatacgtaattacgtaaatgtaatttgcatttaatccttttttgggactcaaattttatgaagtaaactcttgattccttgctttacagagagattgttctattatggaagaatatattggtgataaagatgagtagtacagttgtgtaagtagataaattggcacctgataaatgttagacaaaaaatgggaaaacaaaaagctgtatttgttatgggatttggtacatattaattagtaaatgctagagattttttggatgaaattgtagtcttttataaactttgtaaccaggatgaaacactacaaaaattattagttgagtcatttaagcatttgattaaggcatataagttaagaaaatggggttattatcatgttatatca

SEQ ID NO: 29025 - DNA, 1523 bp, Arabidopsis thaliana landsberg
tgctcacgtcatctgatatcaatttagtggaataaaaaataatggataagaatggcaactagatagttttttttcaaaagtagtgaaaacaaactaaatggtttgttcaaggcgtgtactgtttttaatttaaatattagactttcataagtttttttgtttgttttaatacttgttatgtggactttgtagttcaatgatcggtttatcaagttaaagaaaactgattcaaactttaaatagagtaagaataatatggaataagcaaaaatgttttttcatttcctctgaaagcaaaaataatttatttttgacaacgcaaaagagattttaaagaatgggatgtccctataaattattgttcttaaagtttcgggctttcttatatatatatatatatattcacaaatataggaaccatcttgcaaattccaaaaatggattacagattttgaaaggattaacaatttaatgcaccatagattggaagacacgtgtcaagcattagcgcaaatcggacgacggagctcatagtcagaaatggaacgtcggatgtagacaaagaaaagagtcagagagaaatttagataatcaattacatcttaacacgtgtcaatataacatgggaagttgtccttttgtaggacccaatagtatgtactgattggcgtaaaagacgtgatgtcggttacgtgggtccacttgacttattgactagtgccacgctggaacaagcttgttcgagaagaaatgatgattttttagaaatttataacgttccttattttttctttcttctattctatgcgttacaaaatacaaacaaaccaataagaacttggttatttaattcttatcacgctatgaatcctcaacgattaggtgttattttaacttattattcactaaacatgttgaagaggccaatctagttacgcatgatctttgaaattgtaaatacatgatcttggatactctaaacaaaaaaaaaaaaaaatccaacaagtaatataagtccgattggctcaatcgattagggaggtgttgttgcaatgccaccggatctcatttttagtcctaatgctacaataagacgggtaatttgcgcttgtgaatccgccaaaagtattatcaaagaaatgatcgtggacataaacaaactaaaactaaagatttagattttagaacgaatagaaagttagcatcatcttttgtttaccatttttggggcacataaaacaatctttcgtaatctcgtttatgggaaaagggtttgtgtatgtattttttcaacgtaaatggttatgttttaatgcagtttttaaagataaacttagatgtagataatgaaatcatgagtagacaaatgagcataagatgacttggatttcttatgaattaatatgttaatgtgtgggatgtcattttcgacctattgaaaaagatatactaaaaatattaatgaaggacagatggtaatcggtaaatgcatcatctcttaaaattcgcctaaaataaaaaaa

SEQ ID NO: 29026 - DNA, 2327 bp, Arabidopsis thaliana landsberg
  unsure (1)..(2327): unsure at all n locations
tggaatattagattcatatttacttttgaagttagatatagaagttgcatttcaactttaccaaccaccaaaatttaacttgaatctgcatatcgttagtaacaaaatattttcatgcattatagtatataaatgactaaaatatgaaaccttataacatgtgatttggacaaaacagaacgcatcttttactatacgtcgttgtttgactctttagtcacgcaatctaatgtaacgagtgggttcacgcgccgaatctacatggtggcacccacttttgattgtgatatcttcccatgttggtaagtgggacccacttttctttggattagattttcatcatttcaacgagtgaattgtgtcgttttgtggcatcacgcaacgcgatcaccgtcatcaattattagccgttgattaaggtttacatctattccatcggacggttgtcacgacttcattgcacttacctctaatctccaccgtctaaataattaactagagttaaaaaagagtcaagagaaagttgacttacaaaggaaatcgatgacgaggcgtccgtcggataatcggccggtggatctctggaaaaacgaacgaccgttaggaagaccaatgctgtatccgagtccggcgaagagtccacccgtgtcggagttggaatcgccaaagttagaaatcaacggcggaacctgacatccctccggccactgccaagttttgtcggagaatgaggataaacggaaggagaacaagaaggaaagagtgggagtgaagagagagagtagccattgtaacttgctagtagagatttgatcaagatagagtgaagatcgaaagctttgtaataaattgtaataatggtaagccttaagtgtgtgggccttatttctcttattttaagctatagtgtgtgagtgtgattctttagtgaattaaaaacaaagcctaagactttgtatgttggtggttgacagtgacagacacataactcaagcttactgttggttccagctccaatgtagatgctaattgttcatacataaatatgcatatgcatccaaaagtatatatccaaaacgaatgtacaatggaattttccttttgtacgtaacaacgaaaagataagatcgaaaaaatatgcggcgaaaatttacgttggaacttggaagccaaagaggacgcggaaattaatcatctggacgccaacgctagcttgtttgacttatgcaaatggagcattactcataatttattcatcttcaactccaaaagcatttcgtataaaaattaaccactgatatccagcaaaatgttaagcatcacttactttctcaaatttcagccaacaaaaaagtttaacgtgtttggtatacctatgtgctgactacagaccaatgttttatctctatccatatgaaatgacattcttgctcaaggaagtcactgtacacctaaggaaaggccttttaagaataaatgaggccttttaagaccaataattggcccaacaatatatgttgttttgtatatgagattttcttatattatacaagttttcattatgcattttactttagtttactaaagttttatatataaatcattatgtttcagtatagtttttaattaaaaattaattagttttctgaaaattatactagccactctagttatatcctactttttaatgatataaattccagttattttcaaagatattcttaaattacgtatgtccaacccattgtgtaaatgattacctagttcatacattaaaaatatatagtatatatacagtatgcagtcgaactgaaacatgtaataatataatcatgaatttaattatatattaaattttagaaattttagatgcatacattttgcggatacttacctagttatatttatattgcataagatgcatgccattcaatatatattcgataatccatgcccaacttccaacccttttgggatataaatagttaatttaccatttatgatatatattacacacacaaaagtttgacaaaaagcaagagtgatataatgaaaatcaattcaaaatacgtaagataatactaattcgatattgttaatcaagcgataaaccaagcccttggtttaatatcacagaaacgagttttagcaaaggcaaattgattgcttgaagcttgagaaagacattcacaagctccaccaaacccatgaaaaaacggaaaccaaanaaatggattaaaacgaggaaaaaaagttagatttttttttgacaaaacgccaatttggattgtattagtaatcagcaaggagaaaattaaataaattgc

SEQ ID NO: 29027 - DNA, 1198 bp, Arabidopsis thaliana landsberg
tgttgtcgatggttttcaatccatttttcaaggatcacatctaattctcttcctgtttgcttcatctccttctcatgtccttgaaaatcaaaccaccctagtttcggaaaagcatcggacacggtgaatataccgacgaggtgaaagaaatttgcgacgccctttctgcattgccttgcctcttcggcatcttcaggggataacgagccgcctccaaagtatcgctttccggccaccattctcaccatcatgttcagactcatatcctctaaccagctctttagatcaaccattactggttctgaaccacctttcttgacccacaaggaatacaaatcttgcataactgcatgcatgcatgtgacaatatgtcaatatcgcatcataacaaaattaacaatatcgaaaattattattatatacgtttttttttttttttaattacccattgagatctcagaaacacggacatgcttgagcatctgaagccgccggttagaaagaagctcgatggttgcgattttacgcatctcacgccagaaagcgctataaggggcaaacccgaaaacagcaaaattgtaacccatgtgctttgcagctgcagtcataggacgtgaagccaaggctttgtcgttcacagtaaaacaatctttagccacctcaaaactgctcccaacaaatgtttcactgctcccaagtcgtagcgacatggctggaccgtagtggtcagccatttttcctaaggttcggtaaagaagctgttccttgccaccgagaaggtggagatgaccaatgatgggccatgcaccacttggtgcaggagcttttacatattttggtttctttgatttcttgaaaagagcgataaaaacgaaaacaaggattgaaacaaataaagaaaagagggaagtatccatagtgttttgagagtgcaaaagagatgtgtgttggtgatattttgttttgaatgattgaagagctactacaagaaaactatcccttttatactatgaattaggtcaatagattggtcaaaaattggccatttcttactatgtttgaccaaaagcaagtcgtcaaaagcgcgtgtcgcaaattggatttggtcgacttttttataaaattactgacgagtataagtggtcgaacattgtgaatattaaaatggtccaacttttttgaaccatttctgaatgat

SEQ ID NO: 29028 - DNA, 1617 bp, Arabidopsis thaliana landsberg
gttttttgaagagtacggagcagaagagccatcgatgttcgtcgccgacgtttagggctctttcgatgttttctctgattggaaattgaactgaatcgaaatagcagagctctttgtgggctttttggatgtccaatagtccaatacaaatattaatgggcttccatgaataaaacattgtttctgagtttttaaagcccaattttgcgtttgtgtaaaaagacaaatagccaatgaaagttgtttaagaccatgcatgaatcatgaatgttgtccatttatttcaacaagaaactatattttgaacattaaaacagtggtgtttagatagtagttgtctcggatgggctagacaagttgtttcggccggggtaagggttaatcacttcttgaattggtttggtttggtttggttcatgcatacaatacaactaagtttcttcttgataaataataattattatttctgatcattttgattaataatgtttttttatatacccgatgaatgggtttcttccaagctcgcaggatttccgaattcaattcgggcttagttgtgtgttatgtattcattgtacaatagtacatgcaagtttttaagattatttatacaagttagtcaccaccaggcgaagtccaaggcaggtccgaccaatgcaaagatcgaataaattcatcaatcaatatataattgagttaaagatttcttaattacgttgacttaactctaaaagtctaatattggtgacgttggtcacgctatgcacttcactagtgaaacagcaaataaggcattaactaatcactcgaatttcattgcgtgtaatcaacagacgtataatgatagaaaaaagcagcttatgcatggatcttgcaagatgtgagaaaaacaatattaactaataattacagagtattaatcgaaaaacaaattattaaattttgtttcttaaaaaaggtttattattaatgctcttgattcaatgcataaatccttgctcgagccattaatttttttaaaaaaatggtttttttaattactgctctttttgttcattgtcaatatccttactcgtgcatgcattaataaaaattaaaattggggccctatagttttgatcatcaatcggtaggtgtatgtctcatgcgttcatggtgttgaaccgatcatctctgtgtgtgtatatatatagagagacagacactactcttcaatcattcaaacaagaaatcaccaaacacacatctcttctgcactctcaaaacactatggatacttccctcttttctttgtttgttccaatccttgttttcgtttttatcgctcttttcaagaaatcaaagaaaccaaaatatgtaaaagctcctgcaccaagtggtgcatggcccatcatcggccatcttcaccttctcggtggcaaggaacagcttctctaccgaaccttaagaaaaatggctgaccactacggtccagccatgtcgctacaacttgggagcaatgaagcatttgttgtgagcagttttgaggtggctaaagattgttttactgtgaacgacaaggccttggcttcacgtgctatgactgcagctgcaaagcacatgggttacaatttt

SEQ ID NO: 29029 - DNA, 1658 bp, Arabidopsis thaliana landsberg
ccttttcaatctattgaaacagctagcaatcgtattacaagtgaaaacatcagcttgaaaccctttctgctccatcacatcataaatcattgatgcttcatcaaccatccctttcctgcaatacccatcaatcaacgtattaaacaccacctgagtgatattaactcctttactttgcatctcgttcatcaatatctcagctgcacccatttcccctaccttacacaccccgtcaataagcgccccgtaggtataactactcggcgaaagtcccttctctgtcaattcatcaaacaacaaaaacgctcttttcatatttccctttctacaattccaacttatcaaagaagtatacacatgaacatcagattctattcctctctcacgcatttcatcgaacagcttctccgcatcactcattttcccattcttaacactcaattccatcaaaagcgtatacgtaaccttgttatacgccacaccatccttcttcatcaccttcaaaaccccttccacacccgagaaatctctctgtttaacataagcattgataatagtgttgtaagtataagcttcaggtttaatccctttaacagaaaactccttaatcagcttcttactcttctcaacttcacctcttctacataatccttcaaccacaatcgtcaatgaataaacagttatcttcactccagaatcaaccattcgccggaaaatttccaaacagagatcaattctccgtcgcttcttcgccgcaaccaaaaacacaatgcaggatctttcatcaatactcaatccctttttaaccatgtaatcaaaaacccttaaaccctcttcaaacattccgttatcaacatacaccctaaataccaaatcgaaaaacttttcgaaaaattcaaacttttcttcagaaatgtcacaatccaccatcgctgatcctaactcctcaaccggacgcttgtaaaacccgtcgttagcaactgaattcagaagcgatctcatctcattgaacctccggttagaatataaccggtgagataaagtcactaccgccgtgagatcaggtttgagattagattcgaattcgcgaagaagcttgaagaaatcgatgcaggattgagtgggaagagttggctcagatagaacgagacgggtaacatttgaattcaaattgaagaggagtgatggattcgattgaagttttccgatggtggatttctccaccaggcacgccgtgattcttctggctgcttcttggtcagaagaaagcaaaactggagatttctgattctgagttacaatgttgaagagtcgcgagagtttgcgagaagaagaagacatgttcatgattcgctgcagaagaaactcaagagttcaaaactcttctttcacttcacttcgcttcgctctaaatcttggtgttggtttaggcgcccttggcagcaataccaaacccggtttagttaaccaatttaataattgtacgcagatgaatatgtctcttattgtttaagctggcgattgttattgtctatccaatgcattaaatttctaagttttctctctaatgtctaaagaatggcaagtaaagttttatcttaatgtaaatttatgatattttcccctagattacgaggatgatgctgatctcgtaggaa

SEQ ID NO: 29030 - DNA, 1234 bp, Arabidopsis thaliana landsberg
gcatttaaatgtggtctaacgttctactgttaaatcccatgacggattctcatattggatagtcgattttttttttttgtattatcaaattaatcgtatatgaggataatatttaattaaatattttgatggaaattgaaaaccattggccaataaacctcaggcgtatatcatcatcttttatgtttaggaagtaaaagttaaaagatatagataaaagagataagctctctaaaataagtaaatacaaaactctgacgaatctttcacatcgccacgtcatgaagatatcattgcgttctcaacttcgaggcttaataataatatcttattttttccggatagtatttcccaataatcaaatgtgtataaatcaaatctctttcttctttagaaattactgtttctctccgctacaaataccagatttttctctctctcgtcgaaagcaaaacactctcctttctctaacttctgctcatatcagccattgacacagttgctttgggtttccctcaaacggcgccgattgtctggttcgtctttctctctttcttcatagttcctatatacgtgcctttgcgtatgtataggtgttgttatctcatatctgtgactatctatcttcgccggaaacttcttggtcttttgatttggactttttttctctctaccatttagatttgaattgatgttgaattttccttgaggtgatgagtttgttgtctctctgtttctgctaaagtctttctctaatcattctctttcttgggtttcgataaatttctcgaatttgtaagctaaacttaatccgacgatgatcaatggaaaatttggatgattggttatgagttttcggaagattctaactttcaatcccaagtttttatgggttgtttttaatttcatctgtttccaaaatttcaaattttagggttcttcgataatatagggttttagattttctggattttttaaaatcttttgcattttttctgattaacctaattctcatctggataaaaataggctatctttgtgtgtttcacttgtaaatcttataatatattgcattcatctggatctaatgtttgcaaaaaaaccacatttttttccaggattttgaccactgatggccttagatcaatcttttgaagatgctgctttacttggagaactctatggagaaggtgcattttgtttcaagagcaagaaacctgaacccattacagtc

SEQ ID NO: 29031 - DNA, 1859 bp, Arabidopsis thaliana landsberg
gcctctagagtagtagtcaacaaagttctagacaaaagcagcgcccgtggctctcgaggcaagaagaagcaagatgataactgtgattccgctaaggtttgttcttctattcatgcaaacaacattattgttataatgatttcactatgtttaccagggtacttaagatgttagaagcagcgaattctattgattgttttcaaggtttccttgaagattgtgaagtccgtggtactactaaccaattatcaatggctgttaaaaatagtttccttgtcctatgcctaaagattttcttgggacagtggagatttttgtcttatctagtcctatgttgtccgggagtgtaaaattatttaatactcttctatcattgcagcgggataaaggcgtaaacggtaagggaaagcaagcgctcgacgcaagattgattgataacgttctagaggacaggggatgtggtaatgttgatgatgatgaaatgaatgattcagactgggaagactgtccaatccctagtcttgatagtacggttgatgataataatgttgatgacaccagagagctaaccatagaatttgatgatgatgttcctgatgctaagaagcagaagaatgcataccgtgcaacagcagaagacaaggtatactgtgcttaggaaacacaatatgcttacttttgtttattctttaaaatgtgtggttgctttagagatttgtgctttgtctcaaaggtacgggcggaacttgtccataaggtgcacttgctctgtctgcttgcaagagggaggatagttgacagtgcttgtaatgatcccttgattcaggtgaataaattgaatacaacagtgttagcagttgcttcaaagtttaatttttcatattgcaacctgcgatataaagtttagtttttacatttaacgtgcaggctgccttgctttcacttctaccatcatacttgacaaaagtatcaaatctcgagaaagttactgtcaaggatatagcccctcttcttcgttgggtatggatttactggcatgtagcttttgttttgttctaatggaaaggttaaacaaatgttccctggtttaaattgtaggttcgtgaaaacttttctgttagttgttctcccagttctgagaaatcttttcgtacttccctagcatttgctcttgaatctcgtaaaggcacagcggaagaggtaagcttgggatcagatttatgccattgaaccttttcattatatggtgacttgtattgttgaaacctctgtttacgaaacttatggaaacatttttgcagcttgcagcactggctgttgctttgcttagagcattaaagctcacaacccggtatgtgatacttgttatgttgccacaatatagtatttctatttggtttctgagcttggttgtgaatctgttttttactgtgtatcaatgacaccttgtctaaagtggcatatgagaactccattcttgcatgttaatgagtttcctcagtcctatttggctaattatttagatccataacgttcattgacattatgcttttcaagattaatcttggtcagataactatttacggtaccatcgtttctggagtgttacttatttataatacttacagcttagtatgccaagcgtgtttcgagttttttgtaataagttgagttttacaggtttgtgtctattcttgatagtgcatccttaaaacctggggccgataggaatgaatcatcaggtcaaaacagagctaaaatgaagcatgggatattcaggacgtcaacacttatggtaccaaaacagcaggccatctcgtcatacccgaagaaatcttcctcccatgttaagaataaaa

SEQ ID NO: 29032 - DNA, 2815 bp, Arabidopsis thaliana landsberg
ttgagtgtagcattatgtataaagagggatgatttacatatatttgcatgtattatcaatggctgatcctagatctatggaccaaaaacactaaactaaattcaaaattagtttttagcaattcgatagtatggcactaaaaagtcattggatagtatttacatatatacattggatgttcttttttgagagaactaacaattgcaaaatgtatatgggaaagtgtagatggatgagaagccatgtgaaggtgatgactacatcacagtgttaaagaacaacatcatttcttcgcttcgtgacaacacaaagtgcaaatgatatatagtgaggtatagaatcaacagaatatctttgatgatgcatatcgcaacttataatattcctcttcttgcttagatcatgtttggtttcgtgttgggaatctcataaatcatatttagatgtagaagttatgtttatctccctatggtaaacctcttcttagtatgcctcaagatcaccatttacatgctctagtacccgatccgagaggattatctaccaaaggcccataacttgtaatccaaggagaaatttctttgcgaagctcaaactcaagttttccaaaacaagttgttagaatgccgaataaagtttctttatataggtttaacaagaaatgtataacctaaagatttgatcccatggcataaaaaaaaaaacttaaaaacatggaagcaaaatatatacaacagatagactatgatcttccagtctaaaggtaagaccactctttgatggaccacaacctcaactttccgaatcagccggcttgtgtttcaggagccaagacacaacaaccaaatcaaaaatgacaactcggctccaaaaaaatatggagtttggcaaggcttacctttgctataaataagttgagcattggacttgaaataactttgtctaatgaattcttacttgtattttataagacgaaaacgtaaatcttgcattaagcatttatacaaattttcataattgataaaattcttacattatcatactagaaaatcgaaaatgcattccaccattatacgtgttagtactaatcggagttttaacttgtacaaactaataacaaatatgacggagagagtcgaaagcttatcacaatggcatttaccgttttgcccttgtcgttgtaatttcaacatttccaatttcttaacgcctttactgacatcgaccccaaaaagaagaaaaaaaagaggagaagagtcaaacctgagaatctcatctctctcagaagtagaagaagaagaagaagacgatgaagaagcgaacgatgtccgcgtggggatcggcgattttaatcttcataatacttatgatcgtcactcccacaatccctcaatctcaggcttaccacaatttcgccgatcaacgctccttcctcggtataaaattcacactcttctctcatcatcatcattttcttcttaaatacccttttgaatttttagggttttgatcttacaaatccattttctcagggattccaaattttttaaacgtcatctccaacttccctttcctcatcatcggccttattggtcttatcctctgcttttacccagaagattactttagctttaggtgcgtaattacatacttcttctttgtgaaatccagattcaaattagttaaagtctctgtgtattgaaacagtttgcgaggtgagaaaataggatggacttgcttttacatcggtgtagctgctgttgctattggatcttcttactatcatcttcacccaaacgatgctactctactctgggatcgacttcccgtacgctcttattctttctcttctcttctctgagattttgtttgctttgtcttgtttttgatcactggtttcgattgctttttggtttagatgactattgctttcacatcaatcatggctatatttgtaatcgagaggattgatgagcataagggtacttactccattgctcctttacttcttgctggtcttgttagcattttgtattggaggttagtcaaatccttaaactatctctagtggttttagcgatacaatgttgagatagagtaagctgacatgagggctgtgattgtaggtttttcgatgaccttaggccatatgctttggttcagtttgttccttgcattgtgattccgttgatggctattttattgcctccaatgtatactcactccacttattggctatgggctgcaggttagtgcttattgttctgttgatactcattccacatattaccactctctaattttgtgacgtcaggataatacttaaaaacgttgtagcaaagcgggagatggcgaagaagagagagagtcccaagctcatcaaaatcaaagacgccattaaactcatcaaccaacaagtcagtctcattggtatcgtccttgaacaaagagaaccaaaacaatgtcgcaacaatggtacttatccaaaaaaaaacaaaatttgagtcaaatacatagaattttgcttgaatctgaatcttagttggtttgttttgtgaaagccctaacatttgacccaacaaaatctgaaagttggatttttttcttagattggatttgcacgctacggataattgatgatacgtatccaagtcctgagctcactgtttatgtatatagtaggacttttggcagccttcctcaaatcaagaacctcgacgacatgcctctgcccactcgcattaaggcccagagagtcaaaattaaacacttgtgtgttttgtggaggaggtaataaagtttggattttgattgt

SEQ ID NO: 29033 - DNA, 1505 bp, Arabidopsis thaliana landsberg
cactttacaatattcgtctcttttgagttaattctcctactttctctttatttctgtgcagaaaatgctttacttgtcgaatatcaaatcaaagtagtgtgagattaaaattaccatttttaaaaattacatgtgtgagtgtgcgacacacatatgaatactaatcggataatttagatttgttcgattaaaatggataaactagtctgacacaggaaaataatatttcgaggaatccttatctacaaagtttggctgccatttattggtattggtaacggattaatcagtaagattacataaaagaatgatgcagttgattaataatctgatagatgatggctcgttgaattttattcgattgtcaaccgattgattaattaaatttcttagaatcttgaccaaatttcgaagtttggttcggtttggtcaaagcatccattttcacatttggccatttgggtttcaaaattataattgaacaccgctacagggaaaactttgttattttatgttttcaacaaatgccacagggaatactatgcaacctacttattaaattaacatcaccatcactctatagaatacatattttgactataacaagttcatgtaccaatgtacgtgtctcctttttcgtttgtttcacaaaattggtgtaatatttgtaaaagacgaaggaatagtctttctttatttatttccgctttcaaagagcagaatttgatagtaaaaacaaaaggaaacgaaacttgtcgtggtcttagactcactaagttaactaagacatatacgtggaaaaaaaaacaagttgttttgtaatagttatatcttgatagcatcatcgtaaacgaattggttacatcttgagcttgagttgggtaaatgtggtcgtcgaattaagatacacatcagggtaaaattagcaaataataaagttgaagggggaaaagcgaaaataaaagaagcacgtgatgtataggatgttggagaccattggaaagaggatcagtcgtggccaggtatatgaatatgaatatgatgatgtcagtgtgtatccatgtgaccttatcatgtgtacttgttacttattttatggactacttttttttgtgctgatataatgtattgaaaattgtgaaaattattgttaaaatagatggatatatatattttttttaaagatggaaaagtaagaataacataaaggacggtaaggtactcgacgcattttttttttttttgaacttctgattttatatattggattttggaagacaacgacttctacaaaaaattacagactcacttaaaacatctccagtgagaataaacgtcttcaaaaatcataacctaagcactttttaagattaaaaaggcctatacaaaaaatagtccctcgactttgctccaagctctcagcttcaaagaatcagaatatcaactggttatattatatttagtggatgacagaaattagatcgagttttcagatctgaagtacc

SEQ ID NO: 29034 - DNA, 1776 bp, Arabidopsis thaliana landsberg
ttgttttggtaactacataccactatctgtgtcatcgtcatgcgtccatggattcttggtttcgacccatcctctgaatgctctgttatctatagtacggtcaacagctccctgaggttttccctcttgacacttgagatcatcagaaggaagacctgggacaaatggctttttaaatggttctggaaactcattctctggacattcacagacactgcaatcacgcaaacgacacattccatcgtctggccagaatgggcagtcacaccatagtttaacctacccaacatttaaaaaaaaaaacagccagccaaaagtcactaactacactacagaacacaacttcatagtttttcgacataatcggattctaaagcatctcactgaccttatagtaccggaaaaatggagttgtgacgagatcttgaagcaaaggattcaaaacctcagtgttgagattgtcaactgtttcataatcacagcaacagtcctcaatcatacctttgtatttacctgttttctgtataatatcccaaaggaaaatcagaaagacgaaaaaatcaaatcctgatcaatacaattaagtccactgaaagagtgaatcttacaacaacattgataatcacacatcctgcaataaatcagtggcacatttcagggacaacgattcaaagctttcgctcaacaatgtcatcaaaagattcaatttttattaccctgaatccattggctaaacaatgtgatcaaaaagattcaatatttattatcatgaatccataagataacaaatatccacaatttttctcaatacccaacaaacttaacatcacgaaaatgtacttgagaatcttaaagtcaaattctttcatctgtgatcaaagcaaaaagattgagaatttaagagagtagaatcaaaaacctgaagtgaacagctacaagaatttcgatcgctgaagaagaaaccgacattggaattcgtcctagagctcacagcaactgccaaaaacacgacaaccaaagtcgctaaaggccatcgccatgtttttctcttcttttcgctctcttcttctttgattgcgccttttcccattatgacaaattacaaaaatggaaattgttttgggacaaataaatccttttacaaataaatataaaaacacgttttttgagtcttccggaatttctcaaaaccccattgttgtgtttgttgtgtctgaagatcgtcttaagcaagcaatgaatgtcatgtaaatgcgttactttcaatgctgtatttttgacatttcagcgcgacgtgggttttgtataacacgcgcgtgttggagcagtttgttatggtctcgtgacgtgcattaaccaataggatccatttgttctcgtagtaattaacacgttgccttttcaacgcttcccagtcaacgaccattcgtttgactaaacgcctcttcggtccacgctgtcgttttattgaaggaattatattttattttaattgggcctgcaggctaaactataagtccgtctgatatgggtcgggttgggcttatgagttatgggtctggtaggggtcaattagcttaatttcgatatgtgccctactctcgacctaacgttttgaacacgtaagagagagtttctaatattgagttgtctaattaactcgataggcttatacaaagtgtttccgcattttaccttcttaataactcatcattcactaactaagaaaagttttactcagaccatatcttccgcttcttgattattggcaatttg

SEQ ID NO: 29035 - DNA, 2367 bp, Arabidopsis thaliana landsberg
aaaattcctatatccaaatctaatctattttcttttgtatttacttcatgtctaatgaaaacgaggaaaaaggtgtccatggtctcattggtagttcatatttggttgattagagtctaaggccttttgaaaggattttcttggttattttttacatccgagtcacagtaaagaacaattatgtatgtatagttgtatacataagctttaaaaatgttatgaaaacgaaatacaaaagttcttggttaatcagaaacactaattattatgataggtctatatcgaacgtataagatgagtgcttagtggaataaacatgagtgaaatggtgatgaattgaatttcacataatagctaagagatgatttggtttcactcattcttcttgaatatgattcagtttttttccagaattaatgaaacttttctccatgtgtttttttatactgtagctggtgaaatataataagaacacttatttacacatatattacgtctgatattttcagctaggcatgggtttttcttttgcttggtctttcttcaaaaaaacaaaacaacttgcatgtcttcactttcaagttttctctttgttgttctttgcttctccataaagctctcttctaacctaaggagcaaaaacatcaattgaagagagattccaaagataacctcactagagaaaccgatcacttttctttacctacctgaaaagttatcttttctcattcggacacaaaaaaatccactcatatacatacaacacaaagagatgagtgaatcaaatatttactctttaccatttactgacatctctctacaatcatcatgccacctttccgttttcgcatcccattcttctcctccaactctccttctcgtatctcttcagggacttcttcgccatcgccaccacctactcctccttcacgccctccttttcgtcctgcaggcatcgctcagccgtcgaagtcagaaacaaagcccaaggcgtctccgtcactttctaggagtagaagtaatgttgcagccctagctgcttcttcgtccgcgtctcaattgccttctctcggtgcagccacgccaactcgcctggcgaaacagactaaccaacaatctggttctccatcaaagaaactggattctctgaggatggaggaacaaaaggtggcgacaaaagagaagccaccgggagaaactgaaaaaatagctgaagagaatatcagtcctgtaaaagagaaacctccgattggagctcgtccagaagagcatttagaacagaaagaaacagaggcagtgcaagaacaggggaggaatacagaagcagcgagacttgtggtgcaagaaaataagaaagtccttcctgaaggcagtgggaagaagtcagcagcaaatcagggacaacagaagatagaagaaatcgagaaaattgcgttacaagaaaggaagaaagttcttcatgacgacggtgtacagaagttagaagcagatcagggacaacagaagagcaaagaaactgagaaacttgcattacaagaaacgaagagatcacttcaggcggtaggtagagaagatgcaacgcgaagcaaaaccacacgacatatggcagcagcatcagaaaccacgagaggaccgagagatctaccggagaaaaagacagaaacgcaaaacagaacagagattcctaccgatgacaatcatcagaaaaccaaaggcgcattaacgagtaatcttggaaatccgagagttacgaatagagaaggatcatcttcaatgagcagaaagattaaagaagacatcagagatggaatcagtaagctaacttggggaaaaagcaacggtgatgataaatcagtgagcgtctacactctcactggagaaaacaaaggagccacaatgggaataggttctgagaaagacaagaaagacggtgaggttcatattcgccgtggctacagaagtaacccagacgagagctctaacaccacagccacagaaaccgaaaaccctaaagacgacgaagcagaggaagaagcgagttttacggcatacataaatggaaacactcaagggataaacaattcaattgtagtcgagagttcagtaagcgagaatgatccaggagttcatatgagttttaagtttgaaatattgaagaaggaagttatatatccgccagagaatgtggaggagaagaaaccggagacggtgaccgtaacgaagaagttaaagaatgagccgagagtaaggaggagatgcttgagagggttacttgcagagtcgagtgagtcggagccagataatcccttgaagccacggagacatggttgccggtttacttggtaagataaagatatagagaacact

SEQ ID NO: 29036 - DNA, 2934 bp, Arabidopsis thaliana landsberg
tagttgatattggcctaaggaattattctcacacttgggattgggagctgatacaatcctgttaccggcgggctaaccggttggtggtgctccgatgggcaacggaaagtttccagataagggaaatgatctaagtaaatcctcgtattttaaagacatgaaatatgttgatgccaatttcaagtacaatcccatcagtgagctggagatgattgttaatacgccaaaaccctactgttttaggttgaattatttgaaagatcaacaaaccattacatatggtgggcctggtccttgcccttattaaatctcttctttttatttataaacaatatgatcaattctataatgtaattctctagtaatttcttatctatttttatgaacaatttgctttcactatcaataaacttgggaattttgttttgtcgggttctgtttagatgagtttgtatgtataacttctcgtagtgattataggtatgtgagaactatgtggatattaaattgtaacactacattttggcttttgataaacgttataaaacacacttttgtttgtttaacgcgaagttaatggccggggtcatagtcttcatggagaccagagcggataaataaccttctttcagagaccagcacctcctcaataagcaatagtccgtgttcgaattcgtgttcggtatgaggccgtgagctatatgcatgctacccgaccaacgaaaaagttagcattgaattgatattattatttataaaacaactaatgtgaaaggtacaaggtttaaatttttttcaatgggttgactaattacaaattgaacagttgacacaaataattaatggtgatatggatccaattatatatcgtatatagcataaacaagtagatgaaaatatatcaaaaataattttgaactattttatgtttcaatgtaagcacatctataatttaagtaacttgaattttataattcacatgcatacgcaataacacaaacttctaaaattgggtttgttacaaacgaaagtttaatcaatggtaaagaattctttttgtttttggatcggagtcaatggtagcataacaaagcgccttatatcttgaatctttttcgtccataatctttaactaacccaaaaaaaaattataatatcaaaatgacaataaaaaattgataaacattgctttcccggcaatatcatcgttatcgtcaatatagtattcactaccaaaattctaactaactgaaatgtcaaatatattgtcaaaatcaaagataaaatcagatattatattgtatatttcttagaggagatcaacgagtggttccttagtagccgttgaattgaaattggtaatatttacgcttataaaatgaaactaccgatacacaaattaacctataagactaagggtaacgaatagcaagatcattctatatattttgaaagaattagaacaaatcttcgaaataattgtgtctttctaaacttttccaaaagaaaaatctgagaaatgaatccaataagaggatgtgcagcttgcaaatatcttagaagtggatgccctcaaaattgtattttctcacctatcttcctcctatggagctaccaatgttgccaagattcttcaggtatatctttatatatcttcctatatactttcttttttctactttatacttcatacatacatgaaatcaatcattctaattaagatagttattagacttttcaaagtcatcggtggacaggagagaagctcgagtttacgtctaaaactctttcaaatattaaaataaacattatttaagtcaatgttctagttgagttgatatattgaagacttcatgcaataaaaatatctaaatattttcgagtgttaatatatatctcctgacttttaaacctccatgaaagagtttggagaaatttaaaaatggttagacatagataaattttaatcgataatttagctgaatatatatatcgtgaaacattttgtattgcatatatttcacactgagatggataaataaacatatggtttgggatgtgattttgcgaatgatatttaacagcaactcccacaagataagagcagcagcagcggattctctctagaatcgaagatactatttatggttgtgttgggattatctctttattacaatccctaattcaaaaaaaaaaaaaactatttgtagctattatctttctatcagattctcctgtttggtcgtatgtttatatcagtttttgtttgatttagtagttttttttttttagttagttctgtgactgtctttttctccaataattgggttgtctactgatacatctaaaacaaatataatgttaacatcaacaatacaccacataaattttaaataagttgtaaaataatactttaaacactaatattttattaacgaaccaactaattaaaactgtggtgacgttttttgctttaagcattaccaaagaatcaactaacttatttcagaaagtcaaaaatttcatgtgttgtacatatgtatctgtctacatatcttcttctactatgtattaaaaattcagaaaattgaattttctcacaaatgttatcattttcctaaacaaaaatgatcccacttgtaattggaatatgatttgttttctacgaatgttatagtttcctttagaaaaaagtttgattccactaataaatggaatgattggaaggttaaatataataataaacgaatttttttattaacgttcttcttttttgaagaatcatataatcatccaacaaagaaaaatcaaaattataaaaccaataaacggtcgccacgtgccacttcaacaacctcgcacttcaccgtcaaccccttatccattccaccaccggcggccaccgttctcctcttcttcggagctccgttctcg

SEQ ID NO: 29037 - DNA, 2461 bp, Arabidopsis thaliana landsberg
tttctttttctgttctcattcttttctctttatgtgacagagatatactaaagacagagttgatatgcgaggatgattcagttaaatcgactgctgctgctgaggagatatctgagctgttacttcattttttgtcttcattagaagtgcagaagaagaaaaaagcatctaaacttttgcaagatatccagaccttaaaggatgatattaaggaggccgagcgaagatattcttcaaatgtatctctggtgagatctcatggagctattgaaaaaagggtgcaatcatctcccctagacgagcactgtacaacttccagtgccttgtttgtaccaactgctaatacagacaggctgatgagtaatatccgtcaacttgaagatgcatattttttcatgcgatcacaaatcaacttatcgagttctgctgctactgcccgttctgacaaaacactaaaggacagggacagatgctctgaaaaccaaaatgaaaatcaggatatgagtaccaaaggaaaatcttcagatcaactcgaagtgtttttcgaggggttgtgcaaatttgctcggtatagcaagttcgaaacctgtgggacaataagaagtggggaccttttaaactctgcaagtgtggtctgctcgttgagttttgaccctgatgaagaacacatagcagcagctgggatatcaaagaagatcaagatttttgacttcaatgcatttatgaatgaatctgtcggtgttcattatccactagtagagatggtcaacaaatctaaattaagctgtgtttgctggaataagtacaacaataaccccttggcctcggctgaaaaagatggtgtagttcaggtacctatcgatgtcaagtttggaatctttcttatttaccatcatatgttgcacggtaggatctataggactagcctcatgtgctttctcttcctctatgagatgtgtacatgttaatcttgtgataagatagagatatagaagcgtctatttcatggttttcacttgccattttcttactgtatggtgctaatgaatgtagatatgggatgccggcactggacaaggattttcgcagtacacagaacaccagaagagagcctggtcagttgatttttctccatctgacccgacaaaatttgttagtggaagtgatgactgctcggtgaagctttggagcatcaatgaggcacttctctttcctttacctcctgatattgcaagaattttcatgtccccgttgtttttattactccagattatagctccataaggcatgattctctgtttatacttgtgaatttccaaatctagtgaaacttatattcttctctgtttggtatgcagaaacgttcattaggcacaatctggagtccagcaaatgtgtgttgcgtgcaattctcttcttattccaatcacttattggcatttgggtcagctgattacaaggtctattgctatgaccttcggtatgtcaaaacaccttggtgcacattggctggtcatgagaaagcggtgagttatgttaaatttatggattcagaaaccattgtttctgcttccactgataactctctcaagctttggaatcttaacaagacaaattcctctggtttatctcctggtgcttgttcattgacatataaaggacatacaaatcagaaggttagtcccaaaaacttttctatctacctttaacatctcatccaacatcattagttagttctgatgtctaatcctttacctgtgcagaatttcgttggattgtcggttttggacggatacatagcttgtggttcagagaccaatgaggtatatatcacatcataaaacaaaatctcaacctttagaatacttaatttcagattatcaaaggtggtatatgtcaatcgcgtttagtttgtttatgaagctgcctaaaattagttgttataacttactaaaaaaactttactttgattttgcgtcttaggtatatagttactataaatctttaccgatgccaatgacttcatacaagtttggatccgtcgatcccatttctggaaacgaatactttgatgacaatggacagtttgtgtcgagcgtctgttggaggaaaaaatcgaatatgcttgtagctgcaaactctactggaaacatgaagctactaaaacttgtttgacaacttggccttttcgctactactgcgggcattggactttttgagtctgaaactaggacaaagcaggtctgactttgaagcaaacgtttttgtcctggaaactatgatcccatatgaccagaagagaaaaaaagttcgaaatcttggagaagttgaagaagcaaaactgtctgtgataatatattatttgattcttcttcctgtaattctatatatatgagatataatttgagataaacttctcagattcttcagaaatgattcatatttggtcggcataacgtgt

SEQ ID NO: 29038 - DNA, 1597 bp, Arabidopsis thaliana landsberg
gttgagcttgctgcaaaaactgcaaatgctgatgaatttatcagaaacctaccagagggatacaacacaggagttggtcccaggggttcaagcttaagcggaggccagaagcaaaggtggggtctggaagactgattgtttcatatattctcttcacgatgcttactgcgtcttgttctcatttggcaaatgtgcagactagctatagcaagagcgctctatcagaaatcatccatactgattttggatgaagcaacatcagcattggatagtttgtcggagttgctagtcagagaagctcttgaacgtgtaatgcaagaccatacggtaaaagcacacatccgattcttccattctaaaacaaccttttaattgaatcatcactgatattattcaaaaacttcctggttccatggctcttatgtttgcattcacaggtgatagtgattgcacatagactggagacagtgatgatggcgcagagagtgttcttggtagagaggggaaaactaaaggaattgaatcgctcttctctgttaagtactcacaaagactcactgacatcagctggactcgtgatttgagattatgtaagtatgatcaagagcatgtacagaccaactgttgtgtaaattaagagaagatacaagattcctctttgtataaatctttccattattgtttaaaaataggatggacaaatcatttgttgagctagaagcctacagagtttttgtatctttccctagttatgcctttttgatacatagcaaaacttctgacattatacatgtaataaacaaatgatcaaatttggtttctagtccatgtaaagaagaaagttgagtcaatgattcagagtttcaccatgaaggagcttttacaactgcacccacccactgcggacgggtttacagctacctgaacaccaaagcattaaaaatcaaatgaaaatcttaaaatggttacttaaaccaacatgcagtttcaagattatgtcttgtctccttttcaaaaacacagggcataaggaagacacgttgcaaatgatagttaagaatcataggcttatggactccaatcagctcaggcaaagcatacacaaatgcttatatagactatctaagcaaaatgatgagaagaaagtgtagaagatggtgactattgagattataagccttgaaaagatgcaaaaaggaaaaaagagggctttaccacgaaagcagcacggatcaattcctcctcataatcaattgtagcacctttcaccaagtcgtatgaaacattatcgacaaccaatttgacaccattcttctcgaaaaccctgtaatattcaagaacagctataactaagccaaaatcaaatcttgattctaatagaaagtggaccagagtacctgtcatcagggttggttctattatcaagctcaaacttatactggaaaccagaacatcctcctgtctctacgcccaagcgaagcattttcttttccggctcactagattgtaactctttcattctctgaaaaatatgataacactcataaaggtcaaggggaggagcaaaataacaaacaatgcctgcttccaacaatct

SEQ ID NO: 29039 - DNA, 1742 bp, Arabidopsis thaliana landsberg
gtatgatatctttcttatccgttatctcttatgttcatgtagtatattctgctgtctatatgtaaggatcaatgatagttttctatttagattacagatttaagaaattcggttacccagatcgtacttgatctatcgggacaaaatgagcatctagtcgttgccaccttgaaactactaactgttgcggcaagatttcaggttgcttcccattctttctttgattttcttgtcacaggctttcagggttatttaaattgctttttgtgctacgcaatttttcttcttgaaatcatttagattctccagtttcatcatactgaaaagttgtttcattattatcttttttcttcagcctgctcttttagtggccatatttgattcagacgaagactcagattctagcaacgtaaaacagtcgcgcaaagatgcctcctcaattcctgactgggcttgtaaatctcgcttactgcacactatcctgcaatatgtagagagagcaaccgattttgtcgataggtacttcgaaggctaattttgtttcgatctgtcttctaattacactgaatttctgtatgagatcttctagatggcctgtaatatttacgtgatggtttcatcttttccagacacacagatatattactgggtttacttgatttcctgaaaaccctttggcaagaggctggccaatacgcgaatatgctggaaccgtttaaggcgtcaaaaaagttgtggcaggaattttccgacattatatcacaggcttctaagataaaagattcgacggttggaagtttaggcaaggaagaaatctcgaaattgttagtgaaatatcagtgtcaggcttctgttttggaaattatggcttgcaacatgtttttgtacaagaagttgctgtttgcggagtcacttaaaaagccatgtgtggagactaaaaagacagcaagtaatggagtatctccacccaaattaacttggacagctgattcagatcccaaggatatcttttcaaaatggtgtgacatatctgttttggatggcattatccagtcagtttcttccttagatggtgaaaaaaaaaaaagtgaaataaacttccaagcaaaggcacgtatttctttgacctggacttcttattgaactatgttcattgagatttatgtggcgttcatttgtagtacttataaagcacaatcagtagagtttcaccacgctttacaccttttgcttaggtgcctccatatttcagaaatagtaattagaagttttaaatgtttctcattttctgcattgataggttgctgccgttttacttattgtgcatttgattgtgaaactggaaacatctggcgcaggagcattgtctatggttttagttgagaagatcaaactcatatcagaaactgtaagttcctctcttttggatcgatctatatctttggtcttttcaatgcacctttcaaggccttgtcatatctgaatctgttgcttgtttaacaatatgctgacagctttgtgctcaacctgctttttctgagttgttggcgcaatattcaaaacttggttataggtaagaccattatttcttacatttttgcttttccagcatttctttgctaattttcaaattcagtagcacatttatctttcttaaatctacaggtcgcagtgcttctccttaatcttaattattcggtctcatgttattccaaagtttaccactgtttcacatttgctta

SEQ ID NO: 29040 - DNA, 2275 bp, Arabidopsis thaliana landsberg
ttgtggactgggtaatgttactgataactctaaactgggtgattttgtagatcttcaaacttttttaattcgtgtactctgcattgtgtggtttgactcatatcaatgttatatctaccgttgcaggatgtccatcatggcaacggaacccaagagatattcgaacaaaacaaatctgtaagctgcccaaatctatgcatgtctgcacatcaattttggagtgttggatgcagtaaattatttttgtgagttaaccttgtttgaacttattactgggagtcattgcataggtattgtacatatccttgcacagacatgagggaggaaacttctatcccggtactggagctgctgatgaggtacctatgcttttctgttttacattgtctcatccagcattcatgagtagatttagttgttggtatatatatgcatataccttatttgtgtgtttggtttgcattatgatttatgtcttaaattttgcgattattttctaatttctgccttgtttccgaaatttgaattttctctaggcggcagaacaattagttgactatgctaattatgggtgcaggttggttctattgttggggaaggttattgcgtaaatgttccatggagttgcggtggagttggggataaagactatatctttgcgtttcaacatgtggttctccccataggtacagagtcgttctacttttccccatttgagtttgttcagttctgtctggatgtgttgataaacgttttggcttaattgatgactaatatgctcaggaagtggaccaaatacatttagctcacttttgaatgtgcactcagtctaattttaactggaaccttctcttgcagcttctgcattttctccagattttgtcatcatatctgcgggatttgatgcggctagaggagacccactaggatgctgtgatgtaagcttcatattcgagctgtaatttaccacttctggaatcagtgtattgttttgtggatatcaacagaggatagatgttctgttctactccttttttcaggtgactccggctggctattctcgaatgacacagatgttgggtgatctgtgtggtgggaaaatgctagttattctcgagggcgggtatgtgttttgcagttttttggagtagcctcttggtttgtaaggagcagcttttgaataatctcctgttttcatttgcagctacaatcttcgctccatatctgcttctgcaacagcagtgatcaaggttagtctctgtgtcaaacttgatatcctttaaatctgcatatagttatggagattcatgatcccgcgtaatctataaaggtgcttctgggtgaaaatccggagaacgagttgcccatcgctaccacgccttcaggagccggcctgcaaactgtccttgatgtactgaatattcaactggagttctggccatcacttgctatcagctactccaaattactctcagagttggaagcacgtctgattgaaaacaaaagtgagtgattcttcccaaaagaaactatttcattcttcatccttctttctgctaataaaatctcactggttttacagaaaatcagatgaaaaagaagcttgttcgggttccgacatggtggaaatggggacgaaagaagcttttgtacaactttctctcagctcgtatgatttcaagatcaaagtgattttagaaagcattcttcctaatccgtcgtaggaattgtctacacttacttgtaatccaaattgatctggtggaatttattgcagttagggggctctgaacaatctttatcacttacatttggtagggttttatagaaagaacccttttaacctgcttaccaaccatcctcatcagacctcttaagctaggccatcggtttcgataaacgaattccttatataaccaaatttatagttcggtttggtttatcttaaaagtattgttgtttaaccaaaccaaaaaaaaaaatcttgtttatttctcgatgtccaaaatcctcattttccaataattccggtatgttcttttcagttttggtacatttcaatcaatttcagtatatttgacacagtttgtaattattttaaaatctttgtaaatcgtttaaaacacttataaaaagttttaaaaaaatttccaacaattttttagagagttttaaaaccattgtaaatccttgtaaaatccttattaagtctttaaaaacatttgaaaatcgtttcaaagacctttaaaaaaatttgttactcttttaaaccctt

SEQ ID NO: 29041 - DNA, 1542 bp, Arabidopsis thaliana landsberg
caaaaaacaatatgttggaaaaacaaatagctgttctatgttttcctgaagctttcaatggttggtgataatgtgtggagtgttgtagggctcttatgtcttatgcttctttgaacaccacgtgtgtgtcttctggtgttattagcgactgcttgcctaaaagttaacgtctctgaaacaaaaatctaccttatcttgatcctttcgcctctgtttctatagtaaatctcacaatggtaatgaggaagaacagcgcgatatcatctgtttctatagcaatctttacttggtaatcacagcattcaagctctattattcagaaaaaacagttgtgaggtaaatagacacaagagaacagacacttctaaagtttcccacagacaataagatgttgtagaaggcaagacaactctacttcatgtgttctgagattaagatgcagggcagatatcctccaaactgtcgaaaaaagtcgataaaacattatgattgagacgaaatgtttttgtggattctctaatgcagcagtttcagtaagaaagaaatccatacctctcccctaaacattcgataatgtcgcttgtgagagttgatctcttatgttttgtaaaggccagagatgcagcctttctgagaaggccagatgcagctatgcatcccaagatagctggattctcagagggactgaaattttgttgggtttcagagattgtcaaaaccactttgcacagtcaataattgagttagaaatgaaagtttgcgcagagccaatataggatgtatctaacctttcaggatcggatttaagctgttgtgcccatgacaaaaacactgcaacactatatgaaaccaaatccattaggcagactatcagtggctacaaaagttgaacttttaaccgtggtaacccgagcaatctaatgatactggatcaaagagtggtgagctcaccctccagagagaatatcgccttgtccaccacagcgccttggtgaaccatatatgcttactgattttactacaaaaatagagataatcacacctcacggtctcaacgtcctctaacggaaagatacaatagctaaaaagttactcacctgtctccccattgcttataagatcagatttccctttcctgagaatcgtgacaccaccaatcctgaatgacacagacgaataacattattatcaccagagtttttggttccaaatcaccagatgagcctggtgatgtgtgtgtgagatacttccatagtgtcctctagatgacctatgaagtcatttttgtacttactgtttggccaaagaacgtaactgatcttcagcattttgttcatctacttcacaattcagtactttttgaaccaggcgcttatactcattcacatttggggttaagacagcaagcggatagctgtggacaagatcaatggaatttgttacaagaaacagcccgtcctgcggaatcgccatagtcagaagattatacaatcaaaacttggaaaaagacaagagcctatcaaatccttacttaatgctatg

SEQ ID NO: 29042 - DNA, 2170 bp, Arabidopsis thaliana landsberg
tattctgaaaatgaaaaagtaaaataagaggggacaaatattcgagatgtgacgtggcagatcgagtggtttaaatattctattagcaagtggtttgtgtaataagcaaatgggtggtcgaacctgaccgtattcttggatctattcaactgtagcatcagtccaccttccttacctcatctttcctaactttttaatacctttgtaatttgctaaaaacatcactactatttatatttgatctctaattactgtttcaactatgaatatttcgcagtgcttatattaatatgctcaaaaatatataatttctggactttcccttgagatgggaatatgaaagaattgcatcatttacctaatcatatgaacacaaatagatattggaaaaaatgtggttttatttttcaaagttttgttcgattatctttatctttatctttatcccaaaaaaaaaaaaaatcattcgattatatctaaaattcaaaatagattacagaaatataatttattagcaaaacggcatgtttaaagcgtttgaagttattaaatcattagtaagaatatataagaatgtaattagtggaaatacatagttagtatcattggtttttgccacatatggtgagcaattttttattttaagaagggaaaatcaatttgtacatagatttatgtcacttattcaattgaataatacagaaggatttaaagtctaaagtaaaaacaggcaaaataataatatgtttttttctttgatcgctcagagtatcgtattaaaatttggattatgacataacaacgataataatacaaactagttggttatgaactctgaataaattattttaaagaaagaatattactatttaattataaaatgactctgcatcatatcaataaggtaacctcgttattataaacgtcacactaacacactgtattagtattttaattacacagtgaatcaaattaattaattactaatctctgtccaggtacataatattattccaagatacggtccttcgttactataaactctataaaaaccaattttcacttccaattgaattgggaacaaaccaaatctctatctctctccattagagcttgaagcagccatagcctaacaaaaccttcaacaatggcttcaatggctgccgtcttaagcaaaactccattcctctctcaaccactaaccaaatcatctccaaactccgatctccccttcgccgcggtttccttcccttccaaatccctacgccgccgcgtaggatcaatccgagccggattaatcgctcccgacggtggtaagcttgtagagctcatcgtggaagagccaaagcggcgagagaagaaacacgaggcggcggatttgccacgtgttgagctgacggcgattgacttgcaatggatgcatgtattaagcgaaggctgggcaagtccactcggaggtttcatgagagaatccgagttcctccaaactcttcattttaactcgctacgtcttgacgacggctccgtcgttaacatgtccgtgcctattgttctcgctattgacgatgaacaaaaagcacgtatcggcgagtctacacgtgtcgctcttttcaattccgatggtaaccccgtcgctatcctcagcgagtaagtccttcttcaacatactcagattcaaattcagatcatagattgttggagaagacgaaaactgagatttgaatttgattttgaacttatctctctttgagattagttaaatacagtataatctcgataaattaatactcgataaattaataactatgtattcacgattagacttagactagatctgattaatcttgagattagaatttggctatatgtgtaattggttactgaaatctgtttgtttttatgtttgatcagtattgagatttataagcatccaaaggaagaaaggatagctagaacatggggtacgacggctccaggtttgccttacgtagacgaggcgataactaatgctggaaactggctcattgggggtgatcttgaggttcttgagccagtgaagtacaatgatgggcttgatcgtttcaggctttcgcctgctgagttacgtaaagagttggagaagcgtaatgcggccgcggtgtttgctttccagctgaggaatcccgaaaat

SEQ ID NO: 29043 - DNA, 1008 bp, Arabidopsis thaliana landsberg
aaagaacatgtaacttatgacaaaataatgtaacatttgttcataatatttttcgtatcagattatagcagattatatatacaaattgctgattataattattattcgctgtttgaccaaaaaataaaaaattattgtttcgctgagaaatgtatagataattatattatacgttagattggtaactaccaaaaatattactatatgttagattggtcacaaaataagaaaagaaaggtagtgtatatcaatttattaatgacgtatttaataaagttggtctcaagcgaaatgaattgttctttactgctacaaggcatataatcctgtaaagaaaatctgggtggtcgaattgttcttttccctttttctaatttcaacatcaaaagttgttccaccagaagaatttgttctctgcagcagtaaagatcgatccgttcttgcttacaagcagaaaagtcatatcgacagagagagatgagacagaactcagcaactggtggtctttcatggcggcgtttactgttcttcgcttcgattggtttgcagttcttcttaggttcgtcttcttcagatctatctgatttcatttcacttttttgtagaatcctcatctgatttagtattcctttgggattttaggttctcaattcgctagatttatgttatatttagctcaacttggctctttctaaatactacagtgtgtttaatctttacgcattaggtcttttgcgatcaggatcgaaacatgcagataggaagattgtatttctcttttgagtagatcttggccaaatcactaactttgtgcttaacatgttagtgaagagaaaataagcaaagaggattttaccgttcaattcatgggtttggccgtggttatagtttcttttactaacttcactggataatagttgtttacctttgtcctaaatgcgagaccatgtgctgattgaagaggttgtctgcaaaatctattgcttttgtgacaagtatttatataat

SEQ ID NO: 29044 - DNA, 1550 bp, Arabidopsis thaliana landsberg
cttcatgtcattaaggtttttacttttccccaagaaaagatgaagactttaattgaaaaatctgttttttttaataaatattccaatgttcccattctttttaatggggaatgagaatctcaagatattgcatcccagctcagtagtagtactcagcaatctaactggaccaaactgtcctcggagctggttgaataccatacacttcattctaagggcattttcgacttttgcgcactaagccaatggcttctctttttgtgtttccacatacttagattttagattagtcctattgactctttgcatttgcatttggttttaatgcttattgagaattggaccgaccagttgacggattttcatgtgaattgtgtcgttttaaaaatatgttatttcagattctttgatcggtgtgaatattggtactgaagtaacaaacatgccaagtccaacacaagtagtagcactcctcaaatcacagaatatcaaccgcgtccgcctctatgacgcagaccgctcaatgcttctcgcgtttgctcacaccggggttcaagttataatctcagtacctaacgaccagcttctcggtatcagccaatcaaatgcaaccgcagccaattgggtgactagaaatgtagctgcatattaccctgcgaccaacattaccacaattgctgtcggatcagaagtcctaaccagcctaacaaacgcagcttctgtccttgtctcagccctcaaatacatacaagctgctctcgtcacggccaatctcgaccgtcagatcaaagtatcgacaccgcactcttcaaccatcattcttgattctttccctccttcgcaagctttcttcaacaagacttgggatccagttattgtccctctcctcaaattcctacagtccacaggatcgccattgctgctcaacgtttacccgtatttcgactatgttcagtccaatggagttataccgcttgactacgcgcttttccagcctctccaagccaacaaagaagctgtagacgccaacacattgttacattacacaaacgtttttgatgcaatcgtagacgctgcttattttgcaatgtcttatcttaacttcaccaacattccaatcgtggtcacagaatctggatggccatctaaaggaggcccttctgagcacgacgcaacggtagagaatgcaaacacttacaatagcaatttgatccagcatgtgatcaacaagactggaacgccaaaacacccgggaactgcagttactacatacatctacgagctttacaacgaggatacgaggccaggaccggtatctgagaagaactgggggctgttttatacaaacgggactccggtttacacattgcgtttagcgggtgcaggggcgattctggcaaatgatactacaaaccagacattttgtatagcgaaggaaaaggttgatagaaagatgcttcaagcagctcttgactgggcttgcggtccagggaaggtcgattgctcggcactgatgcagggagagtcatgttatgaacccgacgatgtgg

SEQ ID NO: 29045 - DNA, 2370 bp, Arabidopsis thaliana landsberg
  unsure (1)..(2370): unsure at all n locations
aaggacttacgattttgaagattttcaggtgttcaggggattggtatcgggtttttgaggcggttcgtgataaggttggcgctattgttgagatacatttagagaggattcagatgagtgatttgggtttaaccgcgttatcgaaatgttcgggtgttgaggttctgtatcttgtgaaaactcctgattgtacgaatgttggtttagctttggtggctgagcgttgtaaattgctaaggaagcttcatattgatggatggaagacgaatcgaataggcgatgaggggcttatagttgttgctaagtactgttggaatttgcaggaactggtactgattggagtgaatcctactaagttaagtttaggaatgttggctgcgaaatgtttgaatcttgaaagattggcactttgtggttgtgatacgtttggtgatcctgagctttcttgtatcgcagcgaaatgtccggctttaaggaaattgtgtatcaagaactgtccgatttcggatgtgggaatcgagaatcttgcaaacggatgtcctggtttaaccaaagtgaaaatcaagaagtgcaaaggagtattgggagggtgcgcagactggttaagaacagttaggcctatgctttcggtgaacgcagacaccatggaacaagaacatgaagaagcagcaagcaatgatgttgtaggaggatcgcaagaaaacggaatcgaattccctcaattgaacagtcagatcatggcaccaagcattgcatcaagtagtagaaaccggtcagggtatttcaaatcaggcattggattgttcagcggaatgagtctagtgccttgcacttcgagacaacgacgggcaagcaggtgattggcactgtgttcattacttgatcaagtagtttcttacaaatgaaattgtatatatatggcagttgtttgttgcattactcagttccataaatcaatctttatgaagaaccaagactatataaaccataagaaaaccagtagcagtagaataaccaagaatcaatnnttcattgagaaagagttttgagaaanntaatcaatttcanaaggttggtttaaaaaaaattaaattttaaagtaagagttaagaagactaaaagaatcaaacccatatatgaccagccgcctcaatgttattacagtttccattacattttcaacatgatttggaaagatgaagaattcgttagcgtgatgcttacctatcgataacttgtcttcaattcctttgattttaactttcttaacactctctttctctaaatcatagtaggaaacatagagtgaatcgcgccaacaacttgacgcacaaaacatttcacccgtatcagttgcccttatagcctcaaaagttgtatctggaaaaacgaagttgtgcttggaccattccactctgttggtgtcatctagaacccatagctgagcaagatcagtgttaggaaaaagcacacctagttttcccttgtagtttattagactcaaaatctcgacgtacatttttatttctacaaaacgaaattcctcagacctaacatcgaagcgaactatcatagcattagtatttctgtaatataaaaccccgttgatgcatatcccattgctctttttccgagggtaatgcggatacgaatattcaatctttctccacgaaagttttcttccagtccctagtgtaagaacttgatgctctttggaggatgttatacacaaaaccttgaattgtttctcgataggatcatacccgaaaaagcttttcgaatgactattcttcactcccaagtcaggcaaaggtatttgctgacccgtgctagggttccatataacagaaaccctatctatctttccctttaaactcagcctattgatcagatagataaatccattaaccaactgaaaactttgcatacaccaatttcctgaaaaacccttatgatagtctgttgccacaacagggaagttctcatcaaaattccgaggctgaggggctgagaagagatgccacttgctgccgtatcggatggtgaacaaaagacgtggtcgaggcggtgactttatgaggaacgattccgtaaaatctgaactttgaagtatggaagcccattgcttcgacacgagacgacatattgcgatggaattcataggtaatcttgagagtatctcaatgatgagatcgatgggaagcgtggataattgtgtgtagcatcgaattcttttagggcgaaccaagaaatcgttcttccgtctattcatggcgtctttacttgacaagttttgggttgcttgacgaatacagtttttttacttgggggaaaagttaaccgcatgataggattttaggagaaaaagac

SEQ ID NO: 29046 - DNA, 2786 bp, Arabidopsis thaliana landsberg
  unsure (1)..(2786): unsure at all n locations
ccattgcgaatcaatatgacaaatcaggtcctcacccatacggcttcctatgccttggtatacacgcagagaagtcgagagtctctctcacactcagctctggaatgtgtagatcattttgactgatataacttgacgttttttctggaataaactctgaaagtaagcaaccattataacttacttttcctccaacctgtagagtgaagataacccttgtgatctttaatatattattcgatgttagttcaacagtcctatgtattttagtcaaacctttacagaatgggaaagtcttccagaaagtgcttgtagaagagtggttttaccacaaccaggaggaccaagcaacaatgtcattctgcaagaaaaccagtacatcttttgaactctgaaatgaaaattactttctagaaaaagctacacaaactagccagtgatctttcatttcttcttccatgcaacttaagggactaaagatatgcctcttgaaaaaattaccttccaggccttacgattccactcactcctttcaagatgcctatcttggtttctttctttgaacaaacgaacttctgtaacatggaaagcggaaaagcgtgaataaagaacatggaaagcagaaaagcgctcgtaatcagatggaagcagcaaatacatttgagtacttacagatagtgagcccttgatagtattccaaagagttgggataggctttccatgaactacttggcattccgcttcaacagagaggtcattgaacctcacttccaccgttggtaactctataccaactctacaatcatatatgttataaacagattaaaaggtcactaacatgcaaacagattaaaaggtcactaacaccagaaacaaaaaaaaaaagagattatgtagtgacttactcgtcgattctctttcttattttcctggtaaacggaggttatcagcttcgatttgtttgacgcgcttttcaatcaacaaccgtctctcagcatcctcaagtttagtaacatcaataatatctgacgagtcatctcctgtgtgtaacaaagcagtagtaacccttttaaaagttggtaatctctcaactgttgcccactgcgaccgaagcttctcctcatcatcaacaccatttccacaagcaaactcaacttggaaggactttgccttgtcaacatcttcacctgtttgagccattgtcaggtaaaagcagccaaagaaactaataacaacaaggagaagcaagcaaaactccacatgaatgaagaagctaatgaagtcagagttttatatatataacttgaacaaaacttacgcatacactaatatcacgcgagctccacgtgatcataaccatagaatccggtcttgtacagagagaaaaactgaacaaaagaacgaataaactagtgaaaaatcaggtaagcgttgaaaaaactggtgattcattaaagtaagtaaataaaatcaacgaagagatcttttagacaatagtcaactcactaaacaatgtcagaactgatttcacaatgtgcgaacggattcatactgacacacaacttattggctttctgtgaggcattccatcgaacactttatgtgcgttttatctgtttcggtagacgaatttgttcctgagatttgtgaatctgatcgaatcgaagctgcagtgaggtagacgaatgaataaacaatgcatgggtgagaaatcacatggataatttcttcaagatcacgtactctggaagatgagatatcacaaaatacttgatgcatgtcagagattaatgagattagcttgcattacaatttacagaggaagaatcatatgcaatcgaatcgttggcgcgcgtttacagtgttattcgctgacgccgacactgtgagaattgatgacgcgacatcagtttcaaaatagtttttggcttttataatattataaacagtccaatcagatgagtttaatcgtattgtttttttgtcacaagtgtgttttattgatattatagagccaaaagtaacaggtcaataattcacaaagactgaaataaacaagcccaaaaaaaaaaaaaaaaaaaacagcccaaaagcccaaatgaataaaaccctaaactgaaggaagagaacaaatgattgttgtgcgccgcatagaaaacacgtgttagtgagaaacattttgaaggacacataggaactggaagagaagggagtcgccgttagaagcttcaattccggccgaaacaccggagaacttgtttaattggcatagctcgcgtcgtcgctcaaaagattaatggcgaaatnnnnnnnnnnnnnnnnnnnnnnnnnnnnnnnnnnnnagtgcaaatcttcttcttcttctttttctttttcttcctcttcttcttcaatcaacatctttttaactttcagggttcatcaatctttgaactacaagcagaagataaaaaaaaaacaaatcaaatctaaatccggtcaaaaaaccggagaaaaaaccggctaaagacgccggagaaaagcccgacgaaacaagaaagagggtatcttgctctcgggagataagccagccaccatcgctaaaagtagccggtcgatgccggaagctgagcnnnnnnnnnnnnnnnnnnnnnncagcgatgccggagtagaagccgaccaaacactgttgataaagccagtcattgccggccaaaaaagctgaaactctctgaaagatgaggagagagaagagagagaaaaccttccaacgtgaaaataattacttttgagtttatatactcaaa

SEQ ID NO: 29047 - DNA, 1095 bp, Arabidopsis thaliana landsberg
cagaactctagggtgtgtggatgatatcatataataataactttatatatatttaaccttcttgttatcttcgtgtctctttttatgtgttctttgttttacctctgcttgttttgctcattggttagttctccttcaagaacggatcagttccattaggagtttcttctcggttttcagaaacggaagagatgctaaagctgttgtagttgtcaatgctactgcttcgtggcttgcctggtcttgaccgtatgttgcttcccattggaaatggttcctgtggtgatataacaacaaaggaaatcatatgaatcttcttttactcactaatcttatgatataatgaaatcacacttgaagtgaaggaagtgcatatggataatgggaaccaaacaagacggaattgtatgaagctttaatctttacctgatcaccagcatttggaccatcagtgtggaagagaataggtcggcaacgtttgtcttcgttcattaagcttgagttctggaaatgggcaataagagctgttttcccttggatacgagcatacgtaagcgttgccaccttctcgctattgaacttttcccactttttgccattaaatgcctgtgaatgtttttttaagagcttttagccaatgctctcccaaaaggacaaaagccataagaaaaagcagcaatatgagactgtaccttaaaaaatgggacaatcttttcaggttcaataagattgatgaaagcatatcccacattgcatttgttctgaaatgacagggtaagattagattagatcgttattgcaaaataccaaaacctctatgtgtctgcttaataagactttcttatataaaaaaggtaggacgcctgcttgccttgaagtcaattggcaaataaaggaaatcataagttcctttacaatgctcgtcaatagcagatagaagcatcttcgaagtgtacctaaaccatagcagaattaaaaaaaaaaaaaaaaaaagagagtcaaagatgaaaacagaatacatctttaactaaagacacaaactataaatagttgcagaagatatagacaagaaaaataaaagagagacactgagtt

SEQ ID NO: 29048 - DNA, 2448 bp, Arabidopsis thaliana landsberg
acaacaccatcatgacaaaagtgctcgagcatgatgcttaaaggctttattgagaaatgttgtagacaggctatctgggaggggaatgtatagccaaatgaataacaaagagttagcaatccgaaacagggttaaaacctaatacagcattaagaatagagcttgaaaccttgagagttctaacaaaagatgtcagtgttccatcttgacacaaaaagtaacttctcataaaaagtgccaccttatggctaacagtgaacccagaacacggctttaagaaaacagccttgagaactgcatccatccgttcagccggggagctcaaagtgaacctagtagcacaaagtctctgcagcgcgttcactgataatatctttctaggcgcatcatgtgctgtggacacacccattatcagaaaaattggaactttgattgcccattcgctgacaagaaaaaatgaaagagcaggtcaccacactctgatatggtaatgacaaaagtggaagtagataaagttcaacatgatatgatgcaaacgtagcaagcataaagatgaactaataccttaatataagaattaaatccgacagtacaggaccacagcatctctctgtatcatccacaattataaccacgggattctcatggtttttgttttctctgtaccatgatgcgagaatggtcacatcagccacctgttcaaaattcgcatagtgaagaaaatgactcagtggatacaattattgttcaagtagcccacaaaactaaaggatatggaaggctatgcagatttactaacatctacggttggcatcacaaactggcgtaacaaacctctaaggcaacctcctacaccactcttggctgagaagtccatagatgaaagcttagccacatgacatccttgagacttcaagtgcaactccagttcttcaaatgtcaataaatcatcaaccatttccagattccctgacaacaatataaaattaccttataagaagaagccaagtaattgcaactggttgcttgtaaatatgaaagtttcgtaacccatcaaaacatcatccaaaagtcataagtcaagacactaagtctttaaaggacttactggtgagaaccattgcagtaagcaattgcttagaagaagcttgagttaaaacaggataagatcgaactgcttccgataacttaagtgctccagatgatatgatcgattcaaatgattcccgtatccaatcatgaatcccactaaatactttagagttcgaatttctcaggacatcctgcaattcagaaaagttacaatgctactttatcatggtgtataaaaacactaactctgaagatttcaaacacactgagagaaatttagagagaggagattgagactgacttcaattgttgtctcgattttcgaccagacagtctcgaaaactttaaagcgaagagttgagaaaaactggccatcttcctcttccacgctttcgacctcagatcttttagcaattttaggtgaaggtgattcgatcctccgcttgcttttcacaatcccagttaatttcccattgtgattaccagacgaagccttgtgaagtacaaaaaatggctgccatgaaaaagaggaatatatcataaccagctcagaacgaaaaattcaaactttgatttttcttctcgcttcagtgaagagtaatcaaacaaaatttgacggagatagagagagagagagagagaagggacccgaatatcattctctgctgtgtcgctggaattgaatgaatcggtggttgaacattgcggaggatcggcgacggtgccggagggtgccatgggagaattatcggttggtggagcaatcgaaaacgacgaagtttcttagggttttaacgcgactgcttctcgtgccgctctttttggcgggaaaattcgtgacccggtcacagatagggaatctcaaaactaaaccagactagaccggaattggagcggtttataaattgaatactacatatattcttctcttattttcatttttatttcgtttttttcttatttttatttgtaaaaaaaaaacatgcatacccttttttaatttaggtgttctttctatgtgagttggtgttctcattttaataggggtgtaattagttggccattttaataaaaagattcaatatcaagttttgtccaaataaagaccacacatgtttttaactagagaaaaagcttataatggaaatgtaatcttaaagtcttcctaaataaatattaaatagcaatttaataatgttcctatatttcttaagatttacatagtaatactttatatattagtgattattttacatattaaatgcacgcagaatatctcagaattatctgagagattagcagagcaaaaaaagaacacttcaaaaagagagaagaaagggataaataagggagtca

SEQ ID NO: 29049 - DNA, 1992 bp, Arabidopsis thaliana landsberg
aagatctaataagttgctgtataaagctgaccttttgcacgttaatttttcagattcttgtaactgggttctttcacgacagcttccaacatttgggaagatcaaacctcatctgcatatgtggagagttgcgtgtccccgccgaatttctccagatgggggtttatcgttgcttccttcctcctcaatctcctggggtggtgaacctttatcttagtgtcgatggaaacaaaccgatcagccaattgttcagcttcgaacaccgctcagttcagtttatcgaaaaagccatccctcaagacgaccagctatacaagtgggaagaatttgagttccaagtcagacttgctcatcttctgttcacttcttcgaacaaaatcagcgttttaactagtaaaatatcacctgaaaaccttcttgaggctaagaaactcgccagcaggacttcgcatctcttaaatagttgggcttatttaatgaagtcaattcaggcaaatgaggtaccgtttgatcaagcgagggaccatctctttgagcttactctgaaaaataggctgaaagagtggcttttggagaaggtcatcgaaaaccgcaacactaaggaatatgactctaaagggcttggagtgatccacctctgtgccgtcctaggatacacttggtcaatccttctcttctcctgggcaaatatatcgttggatttccgtgataagcagggttggactgctcttcattgggcagcatactatggaaggtaaactaacttgcatatttcaaggactatgagatttgctaatcttgtatccgttttatttaatttactttttgaccaagttttattttttttaaagggagaaaatggtggctgctcttctatctgcgggggcaaggccaaacctggtgacagaccctactaaggaattcctcggcggctgcacggcagctgatctggcacaacagaaaggttatgacggtttagcagcttttcttgctgagaaatgtcttgtagcacagttcaaggacatgcaaacggctggaaacattagtggcaaccttgaaaccatcaaggcagagaagtcgtcaaatccagggaatgcaaatgaagaggagcaaagcctgaaggacactctagcggcatacagaactgctgcagaggcagcagcgcgaattcagggagcgttcagggagcacgagctgaaagttaggtcaagcgcagttaggtttgctagcacggaagaagaagccaaatacatagtctccgcgatgaagatgcagcacgcgttgggcaattgtgaggttcgtaggaagattgcagccgctgctcggattcagaataggttccaaacatggaaaatgaggcgggaatttctgaacatgcgaaagaaggcaattaggatccaggtacaagcgaaagctaatctttctaccgtctttaagaaaagaaacgagaaactatctgcaaccgtataaaactgttctatggttttgaatatgacaatgttttgcaggctgcgtttagaggtttccaagtaagaagacagtaccagaaaataacatggtcagtgggagttcttgagaaggcaattctgagatggagactgaagagaaaaggattcagaggccttcaggttagtcaacctgacgagaaggaagggagtgaggcggtggaggatttctacaagacaagccagaaacaagcggaggaacggcttgagaggtcagtggttaaagtccaggccatgttccggtccaagaaggctcagcaagattacagaaggatgaaactggctcatgaagaagctcaggtaaaaatcttttgctgctttctgttttctttactcatttcaagtatattcgtaatagattaaacacaatttcacttgcaaaattatgataattggttatggtaaattataaaatgtaacacagctggagtatgatgggatgcaagaacttgatcaaatggctacggaggagagctgaatggaatta

SEQ ID NO: 29050 - DNA, 1755 bp, Arabidopsis thaliana landsberg
tcaatcacgtaacattcatgctattcacattgttgatctaattagttaacagtgggaatcacatacaaatttacaaatgaaaacaatatttccttctctcgttcaacatataccaatttgcatttcttataccaaccaaaccgttccaaaccttaaccaccaataaactaaagaagaagaaaagcctactttttaagtttcattttctattttatacttaacatccatgaaattttattgcatgatcaaacaaatgaaacaaaaaagactgatcttaatttgtttccaatctcatcacaacaacttaacaagtacagtaaagcaaaactggttaaatacttacctatgtggagctaatacccaatcatcagaatctccgacacatgaaccaatcactcctaagaaccaaacagtataaagtttctttttttccttcttggatacttagaaaaaggaactctttgtttgttcttgtgtttccaatcgatctactcaaaacacagtatgaaacagaggaaaaacagagaacagagaaacgttgagactctgaaataagtgatcacagagagatctgagacagagcacaaagagagagtagtttgctaataagtagagtagctcacacttaccacccccatcctataaaccaagtccattggccgatggatcttcttttgccccgttgaagatgggatacggattttctcatcctaactaatccacacgctctctatcggcgcgtgtttctcactccctcccacacatgatcatcttcttactgttacgatttaggtggtgctctccaactctagtctctctgtggataagactcatagacagctcaccagcattctctcataatgggctttcctctcttcattatatgggccgaaacctaaagcccataaggcttcctgtccttcagcccaaaaaatctgttttagcttgtagactaagtgattgcaatctagtgaattcgttttatttgtgcatataactcactgtattaaaaaaaaaaaaaaaaaaaaaaaacctcactgaattattcatactacgactatatgttagaattgatatataattcgatcatatgaacttatttgctgagaaatgttgtactgaactatataccccaacgctttaagcacacgattggtgatggacgcatgtcaaaatgattggaatttgaaataagcggtgatgtaattaaatgatattctagactttgtatttcctaattgtaacatttcaccactctccaacgcaattgaatctatcgaactgcttctctcttaacaatttttagcctagatatgttcattttatatacgttatataggatatgccaaagctacacgtaaacaacaacttgtaatgtacgtttgatttttctggctgttacctcaagatcctaaactacatattattgaaagatcaagagcttataatatacctaatgtcaagaaatcacaaatttttatcgttgcaaactttttatagcgattgagctcaaattttcagtatgcaagttgttgaggaaaaaaattaagatctaacataactgagatgaataattagggagggggcagttgcaagttgtttaaaaattgaaaccaactcgtatcacgattgtgtcatctctagatttcgcctcacgcgtaccttgttcaattttgaagaatgaagactttcaaatgaattgtacgacaaaatgttatgtcatattcatataagtaaataacagggacttgtaag

SEQ ID NO: 29051 - DNA, 3973 bp, Arabidopsis thaliana landsberg
  unsure (1)..(3973): unsure at all n locations
atatggaaaaaataatcgacaaaatattttaaaaattgaccaaattatagtcttaaacattaatttcaacgggactatttcgaaaccgtttttaaaagccgaagtcttattaaatacaaacgaaaaaattaactttgacattgggtatattataatgcttgtcgataaaataaagtgtttttttacttaaatgttacatttattttagtatgctccataagtttgatatatcatgttatccttgttaattataaatgttaagcttgaatttgttgatgattccttcctaatttttttttttatgatgtaactgactaacaagttttcttttgtttcttaactaaccagggggttgatttaatttatgaagttaacataaaaaaaaaattacatgaccatggaagccacagtcaaaatatttctattatgcaagtaaattttttaaaaatgtattttctttagtaaataaaaaaaacgaaagcgacaagagtagaaaagacattacaagagtatattagactaccctatgttaataagttttatgttccacacgctatttcggcaaaacttcacattatgattactctacttaagcatttcattaatggtaagcaattagacgttaacagagtaattaataaataaacagtggtagtgcagctactgccgtccaaaagtcaatggtcagagtggcattcaagtaaataatccacataaatgggggcattttattagctccaagagagtcatgacaatttgcacttttattatatctcaatctccttcttcttcctcaagctgattcttgagtatgcaaggaaaacttctcttttgtccccttgtcaacaaaaatctcccattcaacaaaatttcttcagcttctctccttcaaaaggttagctttcatggtgatctctgtagtcactttctcctttttattttcttgtcaaaacgattcaatttcatttgtttctaaattgaacaattgcttcttccttagctctgctctcatctggttttaagcttttggtcctaggggttaggaatctgagcttatatgtgccttttttgattgtttgtttttgaaaggatatgacttgtttgatttggttttggcgcaaaaagcgattattccctgtaacccaacatcgatttgtctacctgtccctttgtttgccttgtgttgattcaaaagtactaaactttatcctgatgattgtgtaaaaatcttgacttggagcctaggttttaaagctttgaaatcccttagtttaacctgattctggtaaaaaaccctgctttagggtatgactccagccttcgaatagatgtaatttcttctgtagagagagatatatagagagtgtaaagcttccattttttggggttccttttatctggcaatagaaatctgaaggcagtagtaaaaaccgatatatgatttctgaaagatgtcagatctgttttctgataaccctatgatgacttgagtgattgattgtgagagcagactttgtcgcatatgtttgagtttgtttagagaaaaattcacaactagaccttttttttcttcttctatcacaaatcacagtgtctgtatttagttgctttactctgttgtagctcacttgttgtttttggatgttttcatggaggcaggtttttattctccttggtttgaacaagttacactgtagagagtgatttggctaatacaagattgattcaggagctgtgtagtgtattgctggggtttttccaatgcaaacgtctcagaaacatcacagtgcggctggactgcacatgctgtatcctcaagtctactgttcacctcagtttcaagcgaaagacaacaaaggcttctctgatatcccgtccaaagaaaacttttttaccctcgaatcctccactgcttctggtagtcttccttcgtatgactctccttctgtgagcattacatctggccggagcccgttttctcctcagggctctcagtcttgcatctcggatctccatcattcccctgacaacgtctatggatcacctttgagtggggtgtcatctcttgcctatgatgaagctggagtcaagagtaagattcgggaacttgaggtctcgctgctgagtggtgatacaaaagttgaagaattctcaggttttagccccgctgctgggaagtcgtggaactgggatgaacttttggctttgactccacagttggacttgaaagaggtgctggtggaggctgctcgggcagtcgctgatggggatttcgctacagggtatggattccttgatgtcttgaaacagatggtgtcagtctcaggcagtccgatccagcggctaggcacttacatggcagaagggcttagagcgaggcttgaggggtctgggagcaatatatacaaatccttgagatgcaatgaaccaacggagagggaactgatgtcttacatgagtgttctctatgaaatctgcccctactggaaattcgcgtacacaactgcgaatgttgagatcttggaagcaatagctggggaaaccagagtccacattatcgattttcagattgcacagggatcacaatacatgtttttgattcaggagcttgcgaaacgccctggtgggccgccgttgctgcgtgtgacgggtgtggatgattcacagtccacctatgctcgtgggggaggactcagcttggtaggtgagaggcttgcaactttggcgcagtcatgtggtgtcccgtttgagtttcacgatgccatcatgtctgggtgcaaggtgcagcgggaacatctcgggttggaacctggctttgctgttgttgtgaacttcccatatgtattacaccacatgccagacgagagcgtaagtgttgaaaatcacagagacaggctgctgcatctgatcaagagcctctccccaaaactggttactctagtagagcaagaatccaacacaaacacctcgccattcctgtcacggtttgtggaaacactggattactacacagcgatgtttgagtcgatagatgcagcacggccacgggatgataagcagagaatcagcgcagaacaacactgtgtagcaagagacatagtgaacatgatagcatgtgaggagtcagagagagtagagagacacgaggtactggggaaatggagggtcagaatgatgatggctgggttcacgggttggccggtcagcacatctgcagcgtttgcagcgagtgagatgctgaaagcttatgacaaaaactacaaactgggaggccatgaaggagcgctctacctcttctggaagagacgacccatggctacatgttccgtgtggaagccaaacccaaactagattgggtaagttatagtgatgatggttacttgagtggataaagaagagcacaacaaaaacacatctgtcgctgtaaattttttaggatgtgcaatgatgttttaagttgtaacacaacctaagttatatatgtatacaaaccaaacctggtggttgtttttctcttgtaaattgtcatgtggttgtgggtgggttgctagtaatgaaatataaccaaaacattgattaggtcattttatgatcttcttctatatataccggtataagtcaactggcggctgaacaaaggtcgtgaggtaacaaaatatgaagacaaaatctacaggtcagattgggttctgaattctgataaggtcttaaaaaggagctcaccaacccacaaaaccatggattgaacaagtacaggtcattgccttcattttattctttacttttctaaggctcaagcttcctttattgcctttaataacaatatactaatgagtattttgcactcagtaacaaaattcagnagagtaattgtttgccctaacatgttacttctatgtgttaagagtttaagattttggntctatgattctagtttttgttagggaatcgtattcatgtgaataaaatattg

SEQ ID NO: 29052 - DNA, 1021 bp, Arabidopsis thaliana landsberg
cattagtttgattctgaacacttaacccaacatatcaaatttaatctcaaaataatcaaatatccaaacaaaattgacaaaaatgtattgagccagaaaaacaaaatctaatagaccaaaaaataaattgtgttcgaaattagatcaaaatgtattgggcttagttgtaggtttgtagaaggctaaccaattttttttggctttgtatggatactctcgtactcatggatatcagataataaccaaactgaagtgactgatatccaatcattcaatgggtaaatgtgactaagaccatgtactaaggtaatacatttagagtatcaagagatataaataattttttaatagatcagacaaggcctgatcctttatcagtgcaatgattcttttgatacccagtatcagttgatatggagtctcatgattcgtatgtaaaactcgttttttcctgaaagcaaaaaaaaaaaaaaattccattattctctccgatagtttttctactattttagctaactaaatatatttttcgcgagtgagtaattttgcaggcttttcgtgattatgcgacataattttgcagtaattttgtaatcttatgtttttatatatttattttttgattttgcaaataattttttttttaatgatatcaatatcggtctcaccactagaaacatatttattatcagtatcataaaaaatctcaaacattaaattaacattaaaaatactaaaaaaatgatacatataaagtatcaactatgttcatgctcttagaccatgtccatcagtgtttctaatgggtttcttatctgaaatcctaaggaataaaagcccaaaattaaagaaaaactcaacaaaattattaggatcgatcctaattttaggttttttagaagtgtttagaaactcagacgtggccgcttttgagggtgaaaatttaggcaaaacaaaaaaaaatcatgctccgcgtgtttctctttccatttctcctatctcttttctttggttactctga

SEQ ID NO: 29053 - DNA, 1197 bp, Arabidopsis thaliana landsberg
  unsure (1)..(1197): unsure at all n locations
agctccatgtctttaccaaaacttcattatttagtttcatccaaagattattattcggatcaaattacctaaagttaaatgtttgaaaaatgtcttacacatgttttttttttttttttggatcagatgatgataacagaagaagaaaacatcatacttgcatatataatttgaaaaacatgtttttgtttagtgtctaagttatatatactgctatactcaaattcattcattcaaaacgtatgaactaaagttttaatgtcacattatattttctactagaatataatgtcaaaggaaaggaaaataaggctttagtcaacaaaaggcttctacatgtaacgagacaaatatgaaataagagaagagaaaaagcgtgcccctatatttataaaaatattacacaacctgacaaccatcaaagtccacacaggccacagccttggtaaggttttttttttgtcacctttctataatatacatgcgtcaattagatctagatctacgtgtgagttgtaattgtaaccatatacaatcatttttttattattatggtttcttaggtgttaggaagattcatattgtcacatttcagacgaaatagaataaaatatgattgtctatgcgtatntaaacccccctttgtagttcttttactcactcacaaaattaattcttcttctcttttcttttcttaaaagagctcaaaagacgccaccatgtctacgatgtcctgttagcttcttatctaccgaaatcatgccaacatcagcaacagcggtggctccatcaactggatctgtccagaaaaaagatcaagactggcgtgcgattttgtctcccgagcaatttagagctctcagggaaaagggcacacagtaagaaaactctttaaactgactgcatgtgtcttgaaaacaagtacgggtgacataatgtcatggacatattggtattagttcggagagttagcaaatacttatcaagatgaccggctcaataattctacaagatagataaattttgtatagtatgtcaaatgtcatgcctatatgaagttactataaaacggtcatcctgatttttttaatggttttggtataggaaccggggtaaaggagagtatacccaacttgtcgacgacggaatctatagttgtgctgggttgtgcaactcctctttataagtgcaccacta

SEQ ID NO: 29054 - DNA, 3060 bp, Arabidopsis thaliana landsberg
tatgctttttcgggagtttttagataattaaattagagaatagggttgttcatattagtaatccattcgagttcgggtaggacccggtcaggtttgggattaatgggtatatgatttacccaatagaataattctaaatatttggttctggttcgggtcggatccagttaggtttgggtcagtttggataaaaagtttcagaccttaaaaatacccaaaaaaataaaaacgggaaatttgtacgtagatagcgggtctccaaacaaaaaaaactttcaaatttgttaagttttaataaatttaattatatttgaatatattttactaaatttttacaaacataacaataatttttgaatagtttagttgttttggatatttaggtccaaaattaattaacatatttagatttataattataatcttagataattagataatattatgattaaatataattaatattttggatattaaattaatgtttgggtttttgaatactctttttagataacgggtaatttccggtccaatcggatatccacgggtttactaaaactctacccaataaggaaatttcctaaaattttaacccgccctaacccgattttttggttcgagtattgagttggttatcgggtccgttttttcgtcagccctattaaagataatctaatataggccccaattaggtccacaaatataaccaaaatactatacaaaaactaattctaaattagaccaaaaattagatcctctaatacaaaggaaacatgtttcttaccaaaataacttctatacaaattttacacatttacttaaaactacatatgttgtatttattataacaataacatttttaaacaaagtcaatctaatgcattatatgtaaatagtaaaacattgaaaaatattatggcattacttttatactatactattttttatgtaattcaaacaaagtatacaatttaatttatacaaaatattaatgtccgtgctgtataccacgggttatggattagtaaggtcttgattaatagcgaagaaatgaaattattcctcaacatctttctaatgcgtttttacgtaattatttaatttacaaaaaattcgaaataatttcgttattccgctgttttgtgaatcacaaaataaactatatatggttaactaacaatttttagagcatgcacatagttgatacactatgaatatcattaacaattttttaatattaattttaatggttatttattatttgagattttttatgatactgataataaattatttccagtggtgataccgatattggtatcattaaaaaaaaatatttgcaaaatcaaaaaataaatttataaaaatataggattacaaaattactgtaaaattatgtcgcataatcacgaaaagccgacaaaattactcacttgtggaaaatgtagctacttagctaaaacagtagaaagactatcagagagaaaaatgttttttttttccagaaaaaaacgaattttacagatgaatcatgagcctccacgtcatccgatactgggtatcaaaagaatcactgcactaatacagtatcatgcctaaatctattgtttgatctattaaaaattattttgtgactcttgacactataaatatatcacctatgtacatggtctaaaagcactaaacttgaggcagaaaaactaaaaatactaaacaaatttggagaatgaaaaagcactaagcattggttcttcctttaactcccaaattccaattattttttcctaatggaagatcagtggggcaccttagacaaaagtaactaccatgatgatgatttattgtttaattattttaagtatattaatactactttccgatactcttggtacagagaatttatacaatactccttaaaaaaaactcagatataaagttataaacatttgtatggattgtggatccaatttatgtttttaaagttatgatatacatttgtcaagatctctcacaactagtaaactatttagaactctaggaatccacttgtaacactaaaatctacaagaaaacaacatcaaccctgaggtcatctacgtggttttctcaagaccaactcttcacgacttcacgtgcatatatatttccaagttttataatttagctacaaataataaaatcagccaaaattcaagaatttcattgaccgagtaaatctctgcgtttttagttactttttctcagtgagaacagaatcttcttctacatatcgagcccacctaaatcaaagcagtagtagtggaaacaaataaagcagtaaatagacaccacagcttttttgttcttgctctctacacttcacatttacccaaaatctttataatactatatatttaaaactttttatctttttgtattttggttacaaagagacaattatctctccactgtctttatgttcttctttcatgtaaccaatctaaggcaaaacaaaaccacagacacaaattctacaccaaaagcttaaccagatttttcccaagaaaaaacccatccatgaaaccatcatcagcttcaagattttctttaactttctcacactttctcacactctactgtcttctcacacaaacacatgtagctcaaggatctcatcaatggcaatcaccaatcaaaaccgtcgtcgttttagtgttggagaatcgatctttcgatcatctcttaggatggatgaagaactcagtaaacccgacaataaacggtgtaacgggtcaagaatgtaacccggttccgaattctacacaaactatatgtttcactagtgatgctgagtttgtggatccggatccgggtcattcgtttgaagctgttgagcaacaagtattcgggtctgggccgggtcagatcccgtccatgatgggtttcgttgagcaagcgttttccatgccgggaaatttgtcggagactgtaatgaaaggctttaaacctgaagctgttccggtttatgctgagctggttaaggaattcgctgtgttcgaccggtggttttcttcaatcgtt

SEQ ID NO: 29055 - DNA, 2838 bp, Arabidopsis thaliana landsberg
aatgtatccttccaacttccgatctagattcactggttatgctttttctccgaaaaagagtaataacgggagaatctggttttttgatggaaaagtccaagaatctagcgacaacatgatagagctcacaggcaactgttttcttagtcattatgctagtaagaaatctacttaaggccagaatacagaacaaaggatatctactcacattcttctcagttttcattttctttttaggaggatgctcttcaaaagaagggtcagacgacaaagtttcaaaatggcacaaaaccctcagagtcataagacggatatttttgttcggatgacgcaaattttcagaaaatatttcaaaagcatctccagccttatttgcttgaagttctggataaggcttatacctaccatgagctaatgcaggcctacgattcaatatagggaaatgaatcagcctacagtcacagaatcaccaaacatggagaaataactgaatagccaccaaaacagacaaactcacctgtgcataaattccaaaacatcggccaccggggacaacacttgctcacatgacttgtaatctttagcaaaagacaaagcttcctctagatcactgtggttgattcccgtcattttgtaacatgacctcaaagtagtaccaagtaagctctgccacattaattctgggccactgcaagtgtctactgaaaagaaattcgcttgtataagatgttacacggcaaagatagggtaagctgaaaagaaattcgcttgtatatgagaactatttggattgtgtatagctgaaggcccagaccatgaatcttcatctgtttgaatttactgatcgagcacataatttgagtggcgtcttaagaggaaaaacagcataaaatgaaaataaactaacatgcaaaaaagagtgaatcatgaattgatacttaccatctgacactgccaaatgctgtctgagagttttcttaaagcaaatcaataatgatgaatccactttaaaataaggataacacttgacaactccccaaattgcagccaactcggcctcattaatttgagctaatccagcattctcaatattctgttgaacctttttaatctttgcttccaagaactcatgaattctctcgtatctactctcaaatgtttgacttatgctgttcacgacgtcgtgacttgtttgttgtgtcttatgctcttcacacaatgttagtaacagaggaataacttcctcagaagactcccaaatcatgttgttaattgcactgcaaaacagaatttagtttactaagacagagaggtaggagaatcaaagaggagttgatgaaaaagactatgacatgagtcttaccataatatattctttgtaaaggctttcactactgattgatctttctttaggaactcccgcaaaaaagtcagcaaactgaaaataaacatgatcaatgtcaagaaaaagacagaaaaaaagaaggtttagaagtataaacagatagatagtagagaataccttgaactcttcaaggcaaaaatgggagcccatagcgaagcaacagtttccatttcattgaccgtgttgattgtgcataatatcaattccaaaacttcatcaaggacagcagataagttatccccttctacagcggtctcagaggaagtgaaaaaagttgacacaatgcggctcgcgattccaatcagtggtgggatatctgttgcacagtggcagtagacttaagttggcaagacataataatgttgaattatgtatgttggtatgtgtagcccaaagagactggggtagaacgagagggtgagggagaggagcaaagcggcaattgaatcactcaccgtgaaccttgcgaccttccttaatcttaacaaccgccataagcacactcaacagccggcttagatgaactgatttcttgtttgagattgatttgtttattttcttatacaagtattcccacataacacttaatttttctgcttccaaatcctcgcatattctctgcaaaaccaaactcacaacttccacgactgtacaagggcctgtaatgcaatagaagattcaaccatgataagaaggaaaggagattcaaattgtgaaaaccaggttcagggtatcttatcaagttatttgatataaatgattaacatcctctacgaagtagaagcattaatcccctccagcaagaaaatgaaagcagtttaataaggattctcacctcccaccaatatattagcatcattaaaccaaccacactagccttaaattcatcacggaagaccttaatataaatgatatgcaaagataagaaaactctatgatactactcattctcctctacactaagaattaaaatcaagatgaggataaatcaaccacactagcgttctaaataaagtacacttctaaatgaaatactaaaacatctctttagaaagatagaacttgccttgaggaaaattgtccaaaaaagataatgttgaatctttcagcaagaagctcaaaactctcccggcttttgaatggagtcttccataggtacccctcataacattatatagtactccaactcctccagcttttttggatggatgtgcaacttcagaaaggatcatcttcatacctgtaatttttaggttagaagaatcaactagactgtgtatcaaggggactatccataacgtagacatggaaaaacaaatgaccagcaatttatcacctttttcaagtagcccatcctgtgctttcctcaacaaaaatgacatgagaatcagacataaattcactgatattgtctttggggtagtacctcaatt

SEQ ID NO: 29056 - DNA, 5006 bp, Arabidopsis thaliana landsberg
gattttgtttgttgcttttggcttaacttatttaatatttaaagaaaaaaaaaagtattttttgttcacatgttatgtattatcattgattcatcattgagtcccatgttagtatatttaccggtttcaatcggactctatcatttgcatatctgttttgagtgtgaatgtgtgttgttttatgtaactctctactctatgggacttaattattctactgtgtgactggatttaattgatgtaaaaactgtgttggtttaaaggtcccaatcctcattttggtaggtttgactaccaactagaaacaatatcatccataatatgcttctttgtgctatcttattaaatgtaaaccaagaacgcagttttattctccaattgtgttcataaaacaacaaaagaacagaatcacaaatttagttaggcgatgcgagtaacaacagcatgtatagcatcagcgagttgaggcactgtcttcgaacttagacttgccatgcttatcctcctgcaaatacataattttcattttgaagctaagttttttcatgaaaacagacaaagaaatataactcaatttatgatatgagtaatgatcttaaatgctttgtgtcattctcatttgggacttcaaatagtagtcatgcacccactagactcttttttcctagtggtttacatgaccactattttagtcccaaatgggaatgacctaatcagaaagtatatggaaaacgaattatattctttaactagactagaagacaaaataaataaagcatctagcataatctgaaagtaaatggaaaaagaattacattctttgaaaagtttaaaaataaatttggaatgaaataagttaaatgccagtattcattttaattagttcgcatatcaaacacgatttatgcgtttgcactaattgagaaaaaatctacttttttaactcacaattatgaaatagataaacgtttgcgcttacaattaacaaacgaaaaacttgtttgaaagagcggtcatggtctcatatgaaaaaaaaacataaacatctaaacaaaagtcctaaatatgtatctccttgcttctaataatcatgttaagtgttaactagtagcctaaggattagtagtagtactataatcatttgaaaagactagatatttcccttacccatcataagtcatgtaaatgtgatattctttggccatcaagcgaacttgctcctcactcaatccggtaaaagtaaacatcccaatatgtttaataatgtgactccaatcaccaggtgttcctgaccaaaactttttttaaaatgttcctgaacaaaacttatatatgcatgattcatatctgagaagaaagatttaacaaaaaaatgaaggaaagaaaagacactaaatggaacctctagcttctagagctgcatataactgttgacgcatgctaattatgcggtcagccattcctttcagctcaatggtccagtcattgtacatatcactaccaagatgtatacacataaactttgagcataaccaaaatctatataaaaatttcaattatagcttttttcttatagtttataatacattacctgttttttagaattgtggcaacaatagatgcaccatgaataggtggtgtaagatacataggcctcacaacaagtagcacttggttctcaactttcttagcgacatcttctgatgtgcataccttcacattagacccatgaagattatataatatggcgtagactattggaaactgatccatttctgcgtttgcgtatgtaaagaatttagaagaataatgtagattttcaatatacatcattttcagtttattttctcatataatatgtttggaaaatgcatatgtaacgctaaaatatccttcattagatctaaatgcttaggcaaaacaaaaggaaagcaattgatgccaagatgttatggttacttacgatcgtaagagagccaatacgctccccataaaggcccatatttttggcataactttgagctatcaaacattcacctccatcggctacaaacatacgaaccgcttgtgcatctgcgtcaaggctaccactagcaaaaccctgaaagtgttaggggaagatgagttatgttacttttatggcttacctgacgacgcttaaagaaaaacactataacagagtctcatttgttgtagaacaaagcaaccaaaagaaggtacttttatgacttacctgatatgcactatcaaagaagggtaataagcttttcgaactcactagtcgtcgaatctgttcccattgttcgaatgttgggtcaactcctgtgggggttatgcgcacaagcttaaagtaccactaatagctccaggaggtgcagcgccaagatcctcgagcaggcctattttgatatttattaagtcattatttgaaatcatgattggtatatatatgtacttaggaattaacatcaactgggtcatattaaaaaaacatttggtgaaatttggtgtgattgggtcaatcaaacaaaattaagataaagtgcaacaattcaatgtgaaagacagagagtttatggacatagttataaaactacctttgaaatcgagtcctcggctcttcggatcatagtaacggaaatactcgacagacaaacccgccaaagtaaaaatacggggatggttcccccacgttgggtttggaacgaaaatgacactctgaaacaaagagaaacgaaattagtgacaaatatgttgcaatgtaagtagcaaatgtttgtatgctaggaaaatttattacaaaatttgttagtatatactatattgtagaattgttgtatgtagtatacaattaaatcggtatttaattttaccgaattctaatgaccattgggaaagctaagtagagaacaatttacttctttgttgtgtgctgctagaaactcagctccaactctcaaagaaccagtaccagacaaacattgggttgtaacaactctattctctttcaatgcaggactgtccagaaaaaaaattatagcaaaattaataataataacataagaaaaaagatgaaagaaaatagcagtgaatacattacctatcatcacctaagatgagcttggtacttaatttattaaattcaggaagtccattgaggggaagatattccttgtccctagaccttaaggtaaaccgtaaagcagagaaagcatagactaatgatttacaaacacagaaaaaagatttggaaaattacattttgttcacggttgcgttcgtgtttacatttactatatttatgttctcaaaattaggattaaaacgagaatatctttttttaatttataaaaaatattttgtatttcaaaatgtgaatcttttttcttcatatatacacaaaagttgcattatgatataaatattgattaacttacaggtcgttggctaactgttgctctgctcttctcacaacatcaagaacaagaggctttccttccttcgcagcaaaaaaaaaaaaaaaaaaaaaaaggaacagggagaagactaatctaatcaaaactttgaactcgcaaaagggctaattaacttaaatcaagattatgaagatctgaaaattacctcagttcgataggtacctgcgctcaaattcaactaaaccggactaggatcatctctacaagcaaaaattacctgtttccataatcataaatatatatattagaaaaagattaacataaatacacatttggtcgaagaagtatataataaatgtttatcaaaagaagtatataagaaatcaacaagaaagatataagtgaaatcgatgaaaagcctttagagtatacactgagaacaggatcttcgggagcaggaaggacgcttgacaagatggaattcatgagaattgattcaatcagttgaaatgaatttgaccccaaaattcattaaaaaaaaaaacacaaccaattattgaacaaagtgttgagaaattaaagcataattaggttcaccaacctgtccaaccacatgtccacatgaatcatactatgtattgattgtgattttaattatttatttaccaaatcagttcaattcgcatattttaattatttaggtaaataactaaaaattaagcatattttaatttaattaagacaaaaacttaacaagaagaaaagaaaaaacgaagtaacaaagcacagttgcatacttgcattgaaggtcttcgtaactggaatagatatcacaactaaaaaacaccaaaggagcttctatcagtcgtcagaagagatgatagtcttcttaccgcagaacagggattttatctgctgtctttccggtctttcttgttgaaagtcttggtaacaaagcttctttacaaggttgtacttgagtcggaaagggtctggagccatctcagccacgtcaagaataatcttacgactgtaaaaagtttcacccttcttcgtttccaacgccttctctgcttcgttaagagaagcaaactcaacaaagcaactgcccgtatgctggctctacaataactcgaacacgaacaacttctctctgaagaaactgaagatttttggtattatgttacgtcggggatacagatattggacgttttgttattattgcaaaaaccggcaaataaacttcaacaagtgtttggctacaccggatatttgatcttctctacttgtatactattagagtattagtcagaacagaaccggtcaagatgaagcaaatggtctacagaccggtaagtctttttcgaagaaaggagcagacccaagaatcggattggattcaaagaaattggctggtttaagttcaaagctagccgcaacggttggcataaccggataatcttcttgacaaggtacgtgatggaaccctagtgtgtaccacagtactatgtccttgttttcgatcgaatggtccctgtttcaccacaaaacaaagatatcagagaaatgtttcaaaccataaacagtatg

SEQ ID NO: 29057 - DNA, 1112 bp, Arabidopsis thaliana landsberg
gcggccgcgtgttcggatttattttggagcaaatgagcaaccccttgcacaaatttacaagattcagggggggaaactatacttgcattttgctagaatttagaaatagcgattctaaattgatgcaatgtatttggaagaataattatgtattttaggctttgttatatcattatagttcattgagtatatatatgcttcaaccgtgatataatttgaacggaatggctgaaaaaaagaaaaataacaaatttaacgttggcagattattcattttgtttttacgaatttcaaaaactaaactcagccatctgacaaaaaacaaagtttagcctagaacaattcatatatttcgcccagaaagtaatatttttgaatttcttggttaatggatatcccatataggaatgttcacccatttttatatttcattatttattcattcattttcttttttcttttcttataaaaaaggttcacacgttgaaacaaagtttccttgttaaataatacagttgaattgaagaataaaggtcagcatatatataaagtaatgttaatctgatttgtaatgatgaccctataatcgtgcaagccaagaaagtctgtaaggagacgtaatgagtccggcataagcagcctttgcaaccaccatattggctgcttctgtgctgtggacattgtcccagtacacttagtgtgtttgaaaaggccagtgcggttcatttgtcgcacaaagttcttcccgtggttttaccgtacaacaacttttgtctgttaccctaaaccctacaaaaatatatgtgataaatttatgattaaattataggaaaaaaatcgaacatagcatgtcgctaccttgatggattttataattgatatctgtgccaaaaaaataactcttatctttatgaatttaagaaagggactatagcttaggtcaaatgtatacagagtttacatgcgtaacattaagttcgcgaaaggactttggccgcttaggacatcaacgaaggtgagcttagcatcagcaaaatctcggttgaattcatagacaagagctttgaggttcttattgaaaggttctacagctttgttcacttcagcggcgc

SEQ ID NO: 29058 - DNA, 1643 bp, Arabidopsis thaliana landsberg
gacaaaagctagtaagggtcgatgaagaacttatctcctggagaatacgaggtggctacaataccttccatcattttgatagaaaacaactgaagaagaatcaaaacagaattaatgtcagaaacctctagtttgcttacaactgaaagaagaatagagaacttacagattcattaattgggccaaagatttcatctactttcccaatctgagtcttgttctctaggtagatcggagcgttaaaatgaggaatcttctcctgtgagagtttagtcacagcatctccctcgcaagcatgaacgaaagttgcaacctctgtaaaccaaaagagagaaacctcatcacaaacgaacaaaaagaaaagcagtcagggaagtatatacatcaactagcattaaaaaccatatatactcaactcaaagctgaaactcggaataaaagacacacaaacccgtcaaaagcatcatacttgtaaactagctcaagggtaaaaaagtagcatgatacgattcgtcaatgagaaatcaatgataaaaaagaaatgaactttagaacttgtccattacaactacacattcaagcaggaacaagctcattcatttcaaagctccgactacaaatcgaacatctttaatagttgctttcaaaaaccaattaacaagtaaaagctatgtcaagtaaagaaacgaacccacgacttcgctaggaggaccttcgtctctaaaaccaccaaagcgaccgcctccaccaccaaagcgtcctcctcctccaccgaatctaccgcctcctccaccgaacctaccgccaccaccaccgtctcgtcctccccttccacggaaacccccgccgcctctcattggtggtctcatcttttctcctttcacagattccgcaaagactgcgttttttttctctctgcctctcttctgtggagggttttagggtttaattgagagcgacgacgctcaaatggtagaagactctgggtatttagggtttttctgtaatcgttcgaccgggtttggttagttgaaccagatatctatctaacattgaaccaaatcggttctccatctctgaccgttacaagtgcttcttgaaatttgttgtttttgagatccctattttggacggtctagatctgatcatacttaaaatgggccgttaaaaccaatgggcacaatgtatactcttcctgggactagcccattaaataactccatagaatatagccgataattatcatctcataaaacgatatcgtttttagtacacagtaaccgaccttacttcacatttttataaagtgcattcattacatacccgctctgtttcttcttctctttccctcacccttatcgccgctgtttcgtcttgaacaatcaggtttgtttctctctccctctttctttctttcttctttatcaaggtccgttaatggcggaatttatctaccttgtaaacagtttgttacagatctaaggtttataattttttttatcttgtttcatcttctttagtcttgtgaaaaatttctgtttttagtatcgtcaatactttgtgtattctatgatatctatttctgtgaaattggtttcttttagtcaatgtattagttggcatttctgcttctgaacacccga

SEQ ID NO: 29059 - DNA, 2557 bp, Arabidopsis thaliana landsberg
  unsure (1)..(2557): unsure at all n locations
gggcccaatcgtaggcaatctttcaggactcaaaagtaaaaagtaaaaaagtttaagatgttaatggatcatgcccataaattatgtttagataaaatataaatctaaacataatttatggttattcaagtctgatttaaactatttattaagatcttgtgtttactaaattttgacatctgcaaattactatgttttaaatacttaaaaatatagatttcatatatttaaaaatttgatgtgatctaaaataaattaataacgccattaacatttcttcaactatgtaactccgactcttgcgatataccaaaagccggaaaaacgcaaatagaaataaaaattatctaaacaattggtttaggattacaatatttgactttcaaaagctcaaaaaatatgttaatcggtttataataggctacgtaaacgcttctcgagccaccactttatttgttttggnnnnnnnnnnnnnnnnnnnnaccatccacgtgtataattcctgatccacaaccacaagccttgaccctttatgaaatatcttctcctccactataaattggccacgtcgtctctctctcgccatctccgcttgtgcattctcgcaaccgttggtttttgtttaaagccttgttggccgttggatcttcctgagattccaaacttatagtttagtttatttacatcttttactcttatctttgagttatttgcacatatagctaaatacatttagatttactcttacatttacgtaaactttctttaaaaatgaattaaaccatgattgaaaaaagactaaagtaaattttgacaaaaaatgtaatctaatcaataaatacgatagatgtgttgattaattttaaattttcaattataaaataatttagacaataaaagttgacaaaaaatcaagtaaatatatagttcacactaaatgttagaatatatattcgatttttaataacatcatgcaatccaataataaaaaatgaacatgtttcccaaaagtattcaagcagtagtggtaaaacctatagttaataacttaaactaaaaaaaaatgaatttaataatgtaatctctcaagctcggatgctttacatggtgtgatggtagccaacaagttaacacacccatcaaattagttagaccttacatgttgatcatttattagttagtatcgtttaagtataaaactcttttaaaaaaatagtaataaaatgaaaagtgtctttaattttagatttgtatttttttagaaacattaagaccattcacatcagtaaattttataaagaatctttaaatataatttaatattgatgctgacatgtaaaatgtctcaaataagcaaaatatgtctttcaaaagagatagtttctcttattcactctgttgtatctcaacttttagtatatctaatgttaaaaactcttattttttgtgatacgaatgttttaaagacacacatgaccaaagagtgtcttcaattttaatactagttaatgtttaaaaaacgcttatagagttgtgggatgaggatgcacttatgctaggtacagatcaataacaaggaagagggtagttcggaaacgtattgtctagctagaaaaggggtttaaattgattaataaattcttttgggggtttataaacagattccaggaaaatacggcgtcacattgttattaatctgcggacaccataatttacgtagttcattgcgacacatattttcgtattccactccaatttttatttttctctacttctatttacaacctcgtgaaccagaatctaaaatcgaacgaagattctcttgctcgaacaaaaaaattctctccgcgattcttacaaaggtacgccaaaagcgatttcgaacattaacttcgtcttgattagatctttctgtgtaaaatttcattcaatttatgatcagttgttgctcacgaaagatttcgactttgcatttgaattctctgttattcaaaggaatctgaattttgggttttcccgatcgctcttaaatttttcagtttcatgttgaaatgttgaatctttgattgaaagtttcaatctttcattttggttcctctcagtgttcatattagagtaagttagttatatctgctaaagttagattcagatcagtgttctgtagtaaaattgatgcaagttattgtcaacaacctgagacattttttatacttatatgagatatgtttctgcttgcagcacaagtgagctagctttgagaaagattcaatttttgagccttaagattgtgatgggagttgtgtctatttcaagttcagctgcaagatctccactcgggttgggcaacgatcttttgacacatcggtcttcacttaaaaagccatccattgttgcttttaaagccgatgattccagcaattcagctttgatcattcctcctcgtgaacaagttttgattcctgctgaaaagcataatgagaagaagagagaagtaaaaaggaaaaagccttgtaaaaccccgaaaaaaccgctttccttggaacataattcggctcct

SEQ ID NO: 29060 - DNA, 1816 bp, Arabidopsis thaliana landsberg
agaatgcattacttaaagtcaagaaacatcttgaggtaagttattcccttggtctacatattttccattgactatagttaccaacgaaaaagtttaaaattagagatttgttattgtccaggagcaagtacttccacgtacacatcatgaatcgaaagacaaggtgtttacttggattatccttggtgacattctcagaataggaaattttcacctttttctacattgttttcacactatttggctttgttgttgacttgaaggtttcagcaagcgcttctgatggggattgcaaatcctttcaggtgcatgacataaaacataaagataccaagagaaagcgaacaacaaggataaaatgtaaactgttttgcctaatttcattgttgatcctagaaatgcttcgcatccttactctatattgtttcatcttcagcttcagtaagtgccgacgtcaagccaatacctgtgaatgattctaacagtaaagctaaccgtaaaaggtcctaatctgctttatgttttatccatgttttctgtgaaagattttggcagtcatgtaaacctgaattgttattgtttcttttgtagaagagtttctggagtaatagatactactggtattcccgaagagatctgtcagactgaagatgacattgaaaagggggttgtctctcgaggggtaaaccaagatattgacaatgtcgtcaacaagaagtttgttcctgatgcagcaaacccggtaaaagagagtgtgcatcgcaagaggttcttattcagtccaagaagtacattttacatcaatgtctacacgaaagcagtgggaatataagtatatctgatttgtactttttatcttttcttggtcttggttgtttcgttgtaggcaatgtacacgacggcaatctaccagatttgatgttcaagaaactaaacaaacggaaaagttgcttgagatagatgatgccaaagaaagtaaagaaaccgcaaggttattagtgttttttttccctctttccactttaattactgactgcaaactctgaattgacaatagcgtattgtgatgatactttctccgtttcgagcagcttctctttgagaagacggtctgctcggttaaggcacgaagaagctgaaccatgtaaaagcttacatgagggagacgaagtcagggagacaatcaagaggagaaggtttgtaagaggcctgaattacttcatatttacaagtagtatccttttaacagatgttactaaaaatgcgttagaggtcacaaatttcctgtataactgtgcagagtctcttcaagactgtctgcaaggtttgatatacaagaaccgcatgtgactgaaacctcgaatgctgatgatgcaaggtttgttgaatcaaaaatttaaaatttttcttaatcccgtcgactgataacacagaaattgagtttagctaatgccacttgtggtttccctcctggataatatcttcagaagcatagtaatcgaagaatctgctggatcaagatcggaatctgtagaaccatccgaaagcaggcatgaaacaaaagagataacccggaaacgcaggtttgttagtgacagggaatttcctgcatttccgctgatgaaaatcaacttttagttatgtaatgtgactgttatctctgtggtgtacttgccagtttctcaacgagaagacaatcaacaaagggtaaatctcaaaccgatgaagccattaaagaaatagcgacagacccatctttggtcaacacgtatagttcaagagtgtgatcaggaaacagaatcaaaggataagcctt

SEQ ID NO: 29061 - DNA, 3140 bp, Arabidopsis thaliana landsberg
  unsure (1)..(3140): unsure at all n locations
tcgagtggcttctgctaaaatctgatggagaattttctattagtttcttcttagaatgcttcaatgacacatgggatgggtgattttacaggcaaaagttcacatcaccacagttaaaatcaataacgaattttcaaatcgacatagaaggaggaaagttggtgcatctacctataggctttttttttaataccagtaactgcagattatggaataactgtacctatatacccacctgccaagtcttttcacaagctgaatcattgtttgttcttgaggccctaaacagaagaagttgtttccatggctcttcacttccataagatacccactctgatctatctggcacaataccaagagatgggtcacatggatccttagcaacatcgcttaaccatttcaatgtctccaaaggacattctcgttttctcttcccaggagaagagcattcctgagtaactgattcaaggatcattatctgctccagtctcctctccgccaattttgatccctgaaactctttcacagcatcattcgaagcagactctnnnnnnnnnnnnnnnnnnnnnnnnnnnnnnnnnnnnnnnnnnnnaaaccatttaagctctgctcctaactcctttgcaggtctacctttcctcagctcatatttctttttcacttcagataaaaaaccgttaagtctagccaccaaagcatcagagattccagacaactccacgctactaacatcagtatctcctgcaacaactctgttcaaccatcgaccaaatgcatcaagatacttaacatagatcaatttcgcagatgcagagtcataagactctaatccagactcttgaacaacttcatcccatgacccattctcagaaactgcatcgaatccgcctttgtgagtcacgttcaaaaagagattgaacaaatcaacggtccttccttcaccggtcatcgcaggaagaggtagaaaaccatccgccgaacaaaactcagcgagaaaagaatcaagcaaaggtcggaacaaggagatgagttctttaatcttcttttcaaaccctgtagattctgggttaacgctttcaggagacctattcgcatcgagactctttggagtcttgctataatcgacggcatcctcgtcggctaccatcgaccaacccgccattaacaacgaactacgaaccctacaacaattaacagatcccatttctcgttatctctaacaaacctaacaaaaaaaaggaagaagcagtcaatctaaatttgaaacgaaaaatgaaatcccaagaagatcaaggaactaaagaatcacgaacttacgattaagacctcagagattccatggcggaattagggtttttttaagcgggaaacataaaaaaaatcgaaaatttttaaggaagttttttccctttggcaaaaccctataccggcttccccacttgcccttggcccgccatttctctctctctctttcgaggtttgggtttcgatggatggtgaccgaagaagaagtttagggtcaaaaatcaaatttcccacagatacagacccttcttcctcaaaaaatcgaataaactaattttcccccaaaattagggttactaaacaatgtgaaaatacgaaacttgcaaacgaagaggattagattataatattgcggaatcactaacctttttgtctagtaatttttttatttatataaatcttctttctgtagtttctgctggtattaagaaaatgtagacaaaatgggttttattgaatgaagcagcacgacggtttatatataaagagactcattggaaaatgagagagagagagagagacccataccatcaaatatatattagctgtcatatgacgttttaactctagttaattatttaacccaccactggttgagttaatttttttttgcaaaccaaaaagcaagagacattgagaggttgcaccttgtggttttattggctctttttggggccttgtaacatgtttagattatttttataatgcaaaattaaaaaaaaaaaaaagattttgatgtacatttgaatagtcatttacgactgcttctttagaaataataatagaatgtttaatttacttcttaatttctgaaaaaatactgttaaagtcttaaatataattattggataattaatatattctttttaactcgcttacaaaaaaaaaaaaactgaacgaatgaatagcatttcttgctaagaagtgatgatagcttaagaaactttcagtttgattaattttatcaaatcaagtttcaatgcttttacaacttcaaatgtacttctaaaagatttaatcgtctaatttatcttaatattaaaaatcacttaattaaattgatactaattttaacatcaattatttacaaatgatgtaaatattaacgtcaattatattaggtaatgcgaaatttacatcatcagttatgaaaatagatataaaaaaattcaactcttatagaatatagatagagtcacttattattacagtgatgtaaaaccaattttcccaccacgccgtctctttttttttgtttgagagatgcgttttacattcctccgatcaactcggatcttccttgcgaaccatcagaaccacttatcatccttgcaaaacattagaaccattccttcttcttcttcttcacctgtagctatatcctctgtatcgaagttatctgctagcttggatcatctctctgacgtgaaacaagaacatggtttcatggtaaaacaagggatttacaattctctgtttcttcaaaacaagctcttgcaagcttacacgaaaatcagagaattcgatgatgcagataagctcttcgacgaaatgcctttgagaaatattgttacttggaacatactgattcacggggtcattcaacgagacggtgacaccaaccacagagctcatctaggtttttgttatttgagtcggattcttttcactgacgtgagtttggatcatgtgtcgttcatggggttgatacggttgtgtactgattcgaccaatatgaaagctggtatccaattacactgtctgatggtgaaacaaggtcttgaatcgagttgctttccgagtactagtctagttcatttctatgggaaatgggt

SEQ ID NO: 29062 - DNA, 1544 bp, Arabidopsis thaliana landsberg
tctcaactcactgtaagacttttccgtttccagtttatactttctacgggtgagttacccaattctccggggtaggcaacataaggcattccacaaccgacttatacagcatcaaattaatgattaagaaacaggacaactaatcataaaagctcttgcttatgcaatgctgggattcagttaaagctcagatgagctgaagcacacactttagccgaaacaatctcaccagcattattgtacagaatccctcaaaactaaaatacaagctttcacaatgacaaagcataaatatccaaagcaacatagtgatccttagaaatcaaaatctaaactagaagacgcggcaaaacacaaagctgaagcaaatataggtcttagaatcacaaaccttcgactaaaatacccatgagaatggcttcggtcccggtacttggatacttgagcttcctagcctccaattctcccattgcaagtgactttatagctctcgccgaccatctaaaatcaaacaattaaaaaaaaacctcaacaattcaaacatataagctctacaattacaaattctatacgtaatttggagtgagactcactttgggatcttatccgaagaaccattctccggttgcctgaaaaattcaaccttaacaccctaagcttcaatatccgtggtgaaaggaaaaccccagaaatgataaagatgtaaaagagctgtcagataaaaaaaactaacgcaatagggacgtttaagaccgtgctggccgaggtcaagcaccggagcttggggacgaagcagcgatgcgacggttgtgtcgccagaagcttcttacctaacagagaagacgttagaggaatccgagaagaagacgaggaagatccattctgtctcgaaacaaagatccgaggattagagagcgtcaaagggataaaggagactgtgtacgacgccattttcactcttgaggaatcaaaagcttttggtcgggctttgggtgagtcagtgagataggcgagtccttattactcagctattttgcaaatgagccccccccagtttatataatttatgaaatttcgactagtatgaataaacttgaactcataactcccaaatcttaaatttcaatctcaggacaaacgaaccaacaagtatagtggaacaaattctaatcctaactcaccgtgcctagcacaaatctacaagtgagtttatctttgagtttatcagtaaccaagaatcagattaatagtataagtcgtgtaatatgctctctcatcctttgagtttcaaaccaagtcaagttgatgagcttttcctgtctctccttatgagctccaagaccatttcgttccatgtatcgactggtcctggcatgcaccagtgcaagcagtcctgaggtggaggccgtccgtctggtccccgtttagtgatcttgttagggtcaggacttctgaatggaccaggatgacaatcatggcgatatccaaatgcctctgtgatatccatcagctttagttttagcttcaaattctccgagacttta

SEQ ID NO: 29063 - DNA, 2276 bp, Arabidopsis thaliana landsberg
catggaagattgggagaagaattgtaaggcgtagtaaaccgggaggctttagctaccgagatacctcttcaattcctcgaagctctcgtgaggatttctctgaccaaaagtcgacgtatccagtccaagatacggtgtttcttcggtgtgcggtagaagaagagagatggaagatgcggtggcaattcatccttcattttcttctccgaagaattcggaatttcctcaacactactttggtgtgtatgacggccatggttgttcccacgtacgactccgttaccatgcattcttacgttttccgaaattctatgttttcagttttagctgatacgaaatcttttttttttccttaggttgcagcaaggtgtagagagaggcttcacaagctggtgcaagaagaactaagttcagatatggaagatgaagaagaatggaaaacgacgatggagcgtagcttcacacgcatggataaggaagttgtatcgtggggtgattccgtcgtgactgcaaattgcaagtgtgatctacaaacaccggcttgtgattccgtcggatcaaccgctgttgtctcagtcattacgccagataagatcgttgtcgccaattgtggcgattccagagcagttctctgccgcaatgggaaaccagtccctttatcaaccgatcacaaggtcagttccgttcaaaacatgttcagtttcatttaagcaatgattggatttgtggattaacttggagattgtgttctttgtaatgaaacacagcctgatcggccagacgaattggatcgaatcgaaggagctggtggacgagtcatatattgggactgtccaagagttctcggagtcttagcaatgtctcgagcaatagtagacaactatttgaaaccttacgtgagttgcgagccggaggtaaccataacggacaggagagacgatgactgcctcatactagctagtgatggtttatgggatgttgtgtcaaacgagaccgcctgctctgtagcgcgtatgtgtctccgtggtggtgggagaagacaagataatgaggatccggcgatttcggacaaggcttgtacggaagcgtcagtattgctaacaaagctggcgttggcaaggaacagtagtgacaacgtcagtgtcgttgtgattgatctcagaagataaggacacgtaagtggacactagtcgaagaggaagacaattttgctttaactttctatatcagttttgctttttggttattcttggaatacgttggttgtatacaaaattaacccgattttatggaaaccccgaaaaagggttaattaatagaaatgataagaattattcttgtcaaccctaatcctgtttcgtgtatgcttataatcttaaatcaaatcaaattaagaaggtcgacatgtaaaagcattttgctttaaaaaagattgtcagactaaactataccttttacttttaggcattaagatacttttaaaggtatttagtctctgtcgctaggcaaagacatcagagtagatcataggttccccaggcaattatgagtattagcagtgtctaaagaataagaaaaacagtaagcagtagtaacaacaagtccaatagaaacgaggtcacgtataaatttcaacatcgaatcgacttcagactagcagctttgattgtacaacccaaattgtagcaaataatgatgttcttatgactaaagttgaggaaatggtagagacaaaacaaaagaaagaaggttttttgagaacaagacctctctcgggaatcgaatttcacgtttgtttgttgtcaggtttcttttagggccttaagttttctgtaacctttatcggtgccaaagatcctgaagtaacatagataaacatatttacatgtttattatagttatgacttctgttaaagtaagaaacagagttcaataatttaccagtccatgtaaacaaacgttgatgagtagttgccagactttgtgtagagtaatcgatgatggtagtcatggaagtcagcactgtaagcaaatgattcccacattaatattaaagatctgttaggtttaaggtgttgctctttcaaggcaatcacaggttagaagtctgatcttacccgccgtatagaggaagaaaattcgaggggctccatgggaaatgataaccacaatgtgcctcaactgtctcaataactctgagcatcatccataaccaaagggtgatcaggtgaggcccggtgagagccggaccaacaatggtagcaaacccaaggaac

SEQ ID NO: 29064 - DNA, 943 bp, Arabidopsis thaliana landsberg
ttcaagagtgttttcaaaagccagggaaactggtctaatgaaacaagggtatgcctggatcctcactaatggagttatagatcatctggttttgatgaatggaacagatattgaagcaatgcaaggggtaataggcataaggactcactttccaatatcggaagagcttcaaacatttagatcaagattggcaaaggcattcccagtttcggagttgaacatctacggattgagggcttacgatgctaccaccgcactggcaatggctgttgaagaagcaggaacaactaacttgactttcagcaaaatggatggaagaaacatatctgacctggaagcacttagtgtctcagaatatggtccaaagcttatccgctcgctttcccagattcagttcaaaggactttctggtgattaccatttcgttgatggataactgcatgcatccgtgtttgagattgtcaatgtgatagacggtggaggaatattggtaggattctggacgcaagataaaggactggtaaaagatttgagtccaagttcaggaactacacgtactttctctagttggaagaatcatcttaacccgatcttatggcctgggattaccttaactgttccaaaggggtgggagatcccaacaaacgggaaagagctgcagattggtgttctctgatggtactttgcctcaacctgtaaaggttacagcggatcctttagacccatgaaaccatagtaacagggttttgcatccacttctgtgaggctgaagttcaagcactgccgtttgatgtctgccacagattcattgctttcggagatgatgatggaaccactaacggtaacttcaacgacttatagtccctagtgtatctgagggtgagcctgtgactgtacctcaattattttcattctctccttatcataactcaaccatcgctct

SEQ ID NO: 29065 - DNA, 4590 bp, Arabidopsis thaliana landsberg
  unsure (1)..(4590): unsure at all n locations
gggcgcggttattggatcagttatctctagtatcttccttggtgcttatgcaggagtagtctcatatcaagaatcatctttttactatggactctgctatatagttgcctctgtctccatttacgacgagtatagcaccgatatacttgacttgcctgaaggatcttgttttccaaggccgaaatatcgaagaaaggacgaggaaccaacgcctttttctggtcctgtaccaagactaggctctgtcaagaacgcgtcatcgatgagaggaggatcagtcagagtccctatgattgatattaagcctctcgatgtaagcccacaccttatattcaccaaacctaatgtgaaaaatcaatcttttgtcgttcttgactttgatgtctgtatgcagctgttgaatgagctctttgtggaatgtagaagatatggagaagttttagcgacaaaaggactgataaactcgaaagatatcgaagaagcgagatctagtaaaggcagccaagtgatcagcgttggtttaccggcttatggacttctttacgagattcttcgctcagtcaaagccaattcttccggcttgttactaagtaaagtttcgatctttgtttttttatttcatatagcttatcaagaaaccaacaaaaccgagcaaaggagagatttttacttggctgcatgtttgtgtaggtgacggtgtaactgaaataactaccatgaaccgaccaaaagacgtcttctttgattggtttctgaatccgtttttgatactaaaggagcaaatgaaagctacaaacttgtctgaggaagaagaagagtacctcggaagattagttttgctatttggagatccagagaggctaaagagctcgaatgccatttccgcgtctcctcctctcaccgaacgtaaaagagccgaactcgatgcctttgctcgcaggtaaaaaaccgctttaaagtttcgattattttcgaacaatttggttttgtttgtaaacaaaaagttccatgtctttgtgtgttttattaggatgcaagggctaacgaaaacggtatcaagatatccaacatttcgtcgacattttgtggcattagtgaagaaactatcggaagatttggacttgaaagacaacaattcggctaaggacgaatcgataacagaaccgccagctccggttaagatcatttcgcggatattcagtcagagatcgttcagaagaaaaggaagtgtcaatggatctgatcaagaatcgcaaaagggtgtctcaaggaatgtagatatagtttaaacatggaacgtgtggtgtggatatttgaaacttaaaacgcatttagttctttgctttataaactttgtcattccttgtaaagatttttcagacgtttttatttatttatagaacagtgtatgttttcgtttatgaaactgctcaattttgttgttggttatcaaatactatcaagtaaacatcattatgtaacaatgataaaaactatttttaacttcgcagatatattggtgaaactttccataaaaagcattaccataatcacaaactgcactacgtgtttctcttctcttaccaaacgggacgcagttcttctcaagttctcctcaagttaaaatatccaaccaaacaaagccacgtgtattacacttttcgagaagaccacgcgccttgaaatatccagtggtgtgttcgccacgattgaccttaagtcggtatccataacgaacggtcacaatgattcagaacattacgtgttcaaacgatcaacggcacttatacgtagatgaacctaagcctcacatttacaaatatgcacacgtagctataatcccctgtgtctctataaatttatattttatattccctaaatcgtcaatttcggctaatttcaagttattataaattaattatcttctgaaaaatataaatacttgaattaattttttagccattttcagatttctccgaggaaaaaaatggcgtctggtttgatcggaagattggttggaacgaaaccgtcgaaattagccacggcggcgcgattgattccggcgagatggacatcaaaaggagcggaggcggaaacaaaagcttcaaccggcggcggaggaggatcgagtctgaagacgtttcagatctatcgatggaatccagataatcctggaaagccagagcttcaagattacaaaatcgatctcaaagattgtggtccaatggttctagatgctttgattaagatcaaaaacgagatggatccatctcttactttccgtagatcatgccgtgaagggatctgtggttcatgtgctatgaacattgatggatgtaacggacttgcttgtttgacaaagattcaagatgaagcatcggagacgacgattacaccgttgcctcatatgtttgtgattaaggatttggttgttgatatgactaatttttataatcagtataagagtattgagccgtggttgaagaggaagactccagcgtctgttcctgctaaggagattttgcagagtaagaaggatagagctaagcttgatgggatgtatgaatgtattctttgtgcttgttgtagcacatcttgtcctagttactggtggaatcctgagtcttaccttggtccagctgctttgctacacgctaataggtaagtgggggaaatgatagtgtttgatgattgtttcgagaatttgcttgttgataatggatatagaagttggatttgtttggagggattggttgcaaaattgtaggactaggaagctttaagctgcattgatccatatatgttgtttattcaagtctattttgctgtcttggtaagtgaaaaaaagattgtttgaaggattggtatgttgaaaatggatatagaagttggctttttggggaattgaattccaattgtaggactaggaaacgatttatcttgtagtctgattttggagtttgcatggatggttgggaagattttgtatatcttgttgtttagctgcattgattctcattcaagtctattttgatggaaagtggttgcaaattgtagaactaggaacccttcactcttggaatttgctttcagaatttgcatggatggttgggaagattctcatatattgttgttagctgcattgatttcacttatgtggttcttcactactgtattactgtctgaattgttgttttggtttaggactatatatggggcattcaatagaaatttgacctttcgatgtgtttgtaacaagagacttgttggtatgtgtaggtggataagcgacagtcgtgatgagtacactaaggaaagacttgaggctattgacgacgagttcaagctttaccgttgccatacaatcttgaattgtgctcgtgcctgtccaaagggtttgaacccaggaaaacagatcactcacatcaagcaacttcagcgttgaaacagctaagtttgtgtgcgggatccgttgggaaactcatcagtcttaacgtttgaagctaataatcttcacaaaacctcttcggattttcaattcattcttgtattgttgttgccaaatattagcgccttaaaaaaactcgtttgcaagtcttcccaagtagatgagctttgtggttgtatcttgctgaaaatctcctctttaagtaataaaactcgagtaaacttaaacctcatctacttatcatctactcttttgtgttccctctgcattggcctatgataaaatcatttcatgtacttgtgtctctgccttctgtacacatgaacacaacgtgatgtattatcaatcatagcttaatcatagaaaagtatcaatcataacttccttgacatttatgattgactgcgtaagtataactgcaagtactgatcacacaacaaacaagaaagatgacacctggcacactagctatattctttgtctctttggttactactggaacagcaaccgatgttgctccagcaactaaacaacagtttgaactcaaatactagttctagaaagtaaaaacaacgataatttttttaaactgtggaaggtaccattgctttttgttgttgttcttcacgtgcaggctgcaacaaccattgcctaacagcttgctgtgactgcaacatagaaaaacagcctcccgtttgtgttcagtgttgcccgatttgagccttgaactccttatgttcatgtatgtttgaagactagagacaatgtagaagatttaaaacacaattcaggatgtcaaacttgtgaaacagaggaagcttatgtgatattttataagtaaaaaaaacagatatcacaaatagagagagatcagagtttgtattgtaaaagcctacaaattttcgcaatctgttgnnnnnnnnnnnnnnnnnnnnnnnnnntaatatcaaagatgaaaacacttctgtctcactcagagtctttggatcacaaacaccgttacacatcgcaataattaacacgtcatcataaatatcccacgtgtagaatcctcgacaactgaaagaatcactctgattggttacttaacatacgacgcagatagcaaagataaaaccaatatggctgataggcatctgcac

SEQ ID NO: 29066 - DNA, 1508 bp, Arabidopsis thaliana landsberg
gataaaatgtttggatcgctcctccagctcttatgaataaaaagacattcaaatcctataagatcctgagtattcttaattagaaaaaaattaaaccctaagagaaaataaggaacccaagcaacaatttataaaaaattttagttctagttcgtaagtttaacgaaattattaataataatggtgtgattcgagggaagatgtttgtgaagttgatgtagacaaagaaataagatgtgagaggtgaaagataaaaagtagtcggagaagatcgcatgagcttagaaacgaagtctcggagaattcctataagaaccacacgacggagagagggatcaaaacccagtctcagatcgccgtgtcaagcaccagatctcccgccattgataagtctcttttaacggtctcttacctcaatccaatatcaaatcgagacacaaccaaattggaccaatataaccgaacttaaaccgaagaatcagaattcgatagaaataaaccgaattaatttcggttcggatcaattttatcaacccgaaccaacaaaaacccggaaacatttacagctaaagacttctcatgtctcaaacactcaaaagctggactcgaaaattcatctctcaaatcctctgaaaccctaattcctctctaacgtcaattttcttccggagaacagaaatggcggaatgtccgacggatctcatcaacgaaatgtttctccgtctcagagcaactacgctcgtaaagtgtcgcgtcctctcaaagccttgcttctctttgatcgacagtcccgagttcgtctcatctcatctccgtcgcagactcgaaacgggagaacatctcatgatcttactccgaggacctcgtcttctacgcacggtggagctagactcgcctgagaacgtctccgacatccctcatcctttacaagccggaggttttacagaggtttttggttcatttaacggtgtcatagggttatgtaactctcctgttgatctagcgatctttaatccttcgactaggaagattcaccgtttaccaattgagccaattgatttcccagaacgtgacatcactcgtgagtatgtgttttacggtttgggttatgattctgtgggcgatgactttaaagttgtgaggattgttcagtgtaagcttaaagaaggtaaaaagaaatttccttgccctgttgaagtcaaagttttcagcttgaagaagaattcgtggaagagagtgtgtcttatgttcgagtttcagattctttggatttcgtactattaccatctcttgcctcgtcgtggctatggtgtggttgttaacaaccatcttcactggattttgcctcgaaggcagggagtcattgcctttaacgcgataatcaaatatgatcttgcctctgatgacattggagtcctcagtttcccacaggagctatacattgaagataacatggatattggtgtgttagatggctgcgctcgtatgatgtgcttcgacgagtatag

SEQ ID NO: 29067 - DNA, 2104 bp, Arabidopsis thaliana landsberg
gacccgggagtgtatttactcaaagaacagatcagggactcttctaatagctcctgagctagctagttctttttttattgcttcacttcgagttttcagtaagacatgaatgaactccacaatctaagacaagccatcagcaacacaaacgaaatcagaaatatattacacaacagaaaacacacacaagacacaagagtatatgttttgagttagaactccgtacttgttacatgtttgagtgttatgttttatgttgaatttaactaaaatgcagacgttagtatggaatgggcttcacaaataaaagcccaatagtatgtttttttggtagggagcccaatagtatgttggttcacccaaatatcatttctttctctgagagctgtttattatattcacacaaagaagaccaacacgaaacagagttgaatcagttctacaatgatctctgtctctcgattcttgtcgcctcaattctacgcaattccaaggttttatccgacaaaacccaatcttttaagtctctcctttgttcatttctgtaatcgtggcgaccaaactcaatctcaattgtttcaggagcttcgtgaaaatgtctgcttcagcgactcaaacggccggagaagtttcaatggggatcaagcctccttcacaccctacttacgatttgaaagctgttatcaaactagccctagctgaagatgctggtcatacaggttctctcttcaccttctaaagtttcgatttttaatttgtgaaattgagttggtcaaaaatatatgatttgagtgaaggagatgtaacgtgtatggctacgataccgtttgatatggaagtggaagcttatttcttggccaaggaagatggtattgttgctggagttgctcttgctgacatgatttttgaacatgttgatccctccttgaaggtgtttccatcatcttacttgaagtcttttgatttgttttgtatgtgtcttttagcttgaagtgatttagtttctaatatctcaggttgaatggatgcgaaaggatggagattatgttcataaaggattgaagtttgggaaagtatcagggaatgcacataagattgttgttgctgaaagagttttgctcaactttatgcagaggatgagtggaattgcaacccttaccaaggtcttttttttgtgtctctatagattctctctagtgattggtgtggttgcattcatattaacttagtgagcttatatcttataatgacaaggctttgttggcttagtacatggtttatagtaactcaacagtatccattccttatttcgttctatagtacagtgttagtagtgaactttgtccagctgatgagtctgtttcctgcagttaatggcagatgctgcatcccctgcatgtatactggagacaagaaaaactgctcctggtttgcggttggtagataaatgggcggtacgttccacactactgttatacctatttcaaacccaacctttgagagttgagacacatttgttgctatatttgtctcatctttggaatattaggattatgatacacctcaagttttcttgcttagcttaggtactgattggtggagggaggaatcataggatggggttatttgatatggtgatgataaaagataaccatatctcagctgcaggcggtatagtaaacgccgtcaaatccgtagacgaatatctaaagcaaaagaatctcgaaatggatgtagaggtaactaatctaaagctttcaaaccgttttgtggctgcaagttaaatggcaaacaagttgtaatcactatatatctttacttaaaggtggagacgaggacgcttgaggaagtgaaggaagtgttagagtatgctagtggatccgagactcggttgacgagaataatgctggataatatggttgtgcccttagagaatggagatgtcgatgtcacaatgcttaaagatgcggtagagctaatcaacgggagattcgagacagaggtatgtgtgagttagaaagagagataacagatttcttttagtgaaactcagactctaaatctcatgatgtaggcatcaggcaatgttacacttgagacagta

SEQ ID NO: 29068 - DNA, 1513 bp, Arabidopsis thaliana landsberg
actctcgccgcttgtccagcctcatcacgaatatcgttagctcccgttataacgtcagctaacggaaccgttagtttactcgccggaggatcagtttccggcgatattatgtgtattcacggacgaatggagagtccaacgttctggttaggtatcgtcggattcgtgatcatagcttattgtttggtaaagaacgtgaaaggagcgatgatctacgggatcgtattcgtaacggccgtttcgtggttccgtaacacagaggtaacggggtttccgaacacatcggccggagatgcagctcatgattatttcaaaaagatcgttgatgtacacgtcattaaacataccgccggagctttaagcttctccgggataaacaaaggacatttctgggaagctctggtgacattcctctacgttgatattttggatacgacgggaacgctttactccatggctagattcgccggattcgtcgacgagaaaggagatttcgccggacagtatttcgcgtttatgtctgacgcgtctgcgattgtgatcggatcgttgcttggtacatctccggtgactgttttcatcgagtcgtcgacggggataagagaaggagggaggacgggtctaacggcgattacggtggctgtttatttcttgttagcgatgtttttcacaccgttgctagcttcgattcccgcatgggcggttggtccgccgttgatattagtcggagtgatgatgatgaaatcagtcacagagattgattgggaagatatgagagaggcgattccggcatttgtgacaatgattctgatgccgttgacttactccgtcgcgtatggattgatcggagggattgggagctatgtagtgttgcatctatgggattggggagaagaaggtttggtgaaattagggtttttgaaaaggaaagttaaagaagaggataataataatggagttgtcaaaagctagtgagattgatactaccgtttaggtttttctttgatttgattttacatttttgttactattgattttttagatttctttcttaggatgaaaggacaagtgattgcattattgatttgttgctcttgtagattttttgaagagaaaagtgtaaaaatgttggggaaaaataaagaaaactgttgaaatttcgagctctattatgctttttgacattgacactagtagaggttaagcacttgaatttgactttcattgaataggaattgaaaggttcattacataaacaaaaagggaagaccccaaaaggagtcaagagggacacttaccttctcttaagttaatctgaatcaagaaagtaacaaaagaaaaaagcctatggaaactttgtatttgatagaacaaaaatgacttctcggtgatcgccgttatgatttttacgatctagctctcggtttgctctctcaaccgcctgatggtactcctaacagtcacagcactagccgtgttcattgtgtatgcatcgcctgctttcactttccgg

SEQ ID NO: 29069 - DNA, 2539 bp, Arabidopsis thaliana landsberg
cagattagcttctgtgttgaatgatgattttttttattctatttaagggaagactaagcatgaactgtggttggggttgtgtgagcttcttgtgcatcatgctaatgtgatttcgggtcttaatgttgatgctattataagaggaggtattaggaagtttacggatgaagttggaatgctgtggacttctcttgcggattattacattaggaagaatttgttggagaaagctagggatatttatgaggagggtatgatgaaggtagtaactgtaagggattttagtgtgatatttgacgtttattcacggttcgaggagagtacggtcgcgaagaagatggagatgatgagttcaagtgatgaagaagatgagaatgaagagaatggcgtagaggatgatgaagaggatgttcgccttaattttaatctgtcggtgaaagagttgcagaggaagatactgaatgggttttggttgaatgatgataatgatgttgatctgagattggctcgtttggaagaactgatgaacagaagacctgcactggcaaacagtgtgctccttaggcagaatcctcacaatgttgagcaatggcatcgtagagtcaaaatatttgagggaaacgcagcaaagcagattctcacatacacagaagcagtgaggactgttgatcctatgaatgtgttgggaagcctcacaccttgtgggttgcttttgccaagttgtatgaaaaccacaaagacctggtcaatactagagtgatttttgacaaagcagtccaggtaaactacaaaaccgtagatcatctcgccagtgtgtggtgtgagtgggctgagatggagctgagacacaagaatttcaaaggagcattagagctgatgaggcgtgctacagctgtaccgacagtagaagtcagacggagagttgctgctgatggcaatgaaccagtccagatgaagctgcatagatccttgaggctttggtccttttatgttgatctggaagaaagtctggggacgttagaatcgacaagagctgtctatgagaaaatattggatttgagaatagctacacctcaaattataatgaattatgcttttcttcttgaggaaaataagtactttgaagatgcgttcaaggtgtatgaaagaggtgtcaagatattcaagtatcctcatgtgaaagacatttgggtaacctatcttacaaagtttgtcaagagatacgggaagacaaagctggagcgggcaagagagttgtttgagcatgctgtttcaatggtaagctcatctgtccttttacccatacttttgtgctgtctgattacagatccgatgaaactagcaccgaagttgactaattggccagtggcttagagaacttgtttattgatgtgataatattgaaatgtgatctaacttgttttttgtctctcttgcaggccccatctgatgctgtcaggacgttataccttcagtatgctaagctagaagaggattatggtctggctaaacgagccatgaaggtttatgaggaagccaccaaaaaagttccagaaggtcagaagcttgagatgtacgagatatacatttcccgagcagcggagatatttggtgttcccagaacaagggaaatatatgaacaagcaattgaatctgggcttccacataaggatgtgaagatcatgtgcataaaatttgctgagctggagagaagcttgggagagattgatcgtgctcgtgcactctataagtattcctcccagtttgcagatccaaggtccgaccctgaattctggaacaaatggcatgaattcgaggtccagcacgggaacgaagatacctacagagaaatgctccgtatcaagcgaagtgtttccgcaagctatagtcaggtctgcatcagtttctcttctttcaatttgttgtcatttgtttttggagtcgaaatctgactatattgatcttttttgtttcagactcatttcattctaccagagaacatgatgcaaaaggacaagctgcttgatgtggaagacgcaaaaggcgagctgaagagagccggtttacctgaagacgaaatggcggctctggagaggcagcttttgtctacaactacccccacagagccagcaaaagatggcgggagaagagttgggtttgtaagcgcaggagtcatctcacagtccggtgagaatgaggggaaaccagtgacagggaatggagaagacatcgagcttcccgatgaaagtgatgatgagtctgatggagatgaccatgtggagatctctcagaaagaagtccctgccgctgtttttggaggacttgctagaaagagagacgaagacggcgaagaagctggagaagacggtgctgcccagaaattgggtgcacttgagaggatcaagagacagaagcttaatcagtgaacaagcgagtcgtagacaattagtcttgtgcttagtgattctggaaccaaacttcattgtaatacccagaaacgtgaaacttagagaaaaattttgtattctgttttgtttta

SEQ ID NO: 29070 - DNA, 1115 bp, Arabidopsis thaliana landsberg
tcatgttggtgaatatgatctatagcaccatatacgtcttctacaatttcaatggtgcaggccttggaactgtactcgtggtgaaatgattttgtttccggaatattcagttttgcacttgctcttggcccaccatacaaagtgacgcctgcaatttgacacgtacacttcagacaagtctctttgaaaacggtcaacaaacaaaacactatcttaatttcagtgtttatggtttgaaatactctagtttagtattaaatataaaacaacagttgtaaggaaatccagattggaagatagatccaaataataaaaaaaaagaattattttcccaagctactatactcacctttggtttgcagaacataaataagatcatcgagaaaaccattctgctccaaatctttatgtacaagaagggtttcctgttaggaccaaataaaaagagaaggtgaagtgagacaaaaagtactaagtgagaaccaaaaacgaaatcacttcgcataagtgaacagtagtgaaagagacaagaatctctaaccatcgcattacaggctgctggatagtccaactttgcatcggaaacaatgcgctttgccatgtccagtttaccagacttatcaacatatacatgacagattccatctggaaacacccaaaaaataagccatgttctctctaggccaatccaacttaagaacttaatggaactgaacttataaacataccagcatggcctagcactgggattttcgtcgagttttttatttgagaaacaagcttgttgctgcctcttgggatcacaagatcaataacgtcatcaagctgtaccaaaaatgtaaatggtgggttccagtataagtgaaaaaagctaattacttctggggacttgccattcatatgtatctatctgcttaccttgagcaaatcaggaatctcctctcttgaggtcacaagtcctatgagtttacctccaacagtctccggaattgcatcagtgatcacctttaattttcccatgtatttcaaaaattagccagacgaattttgggaagcaagcaaatgactagattgggagttacaccaatctatgaaaaatgagatcgatgtacctt

SEQ ID NO: 29071 - DNA, 1336 bp, Arabidopsis thaliana landsberg
  unsure (1)..(1336): unsure at all n locations
aaaaagcctaagtcctccaacctctggagaagcttgatgtagattctctacatgctcctttaagaacagagggcggctcagaggctgtgctggtaaacacaacatccgcttctgcagcacaagctagcatctcatcaagaggttgatatataatctcaatacccggcatctcctcacgaatagctgaaactctctcttcacttctgttgaccaccaccacttttgtgcaacccttagccatcaaatgcttaatcacaagcttccccatttttccagcgccaattacacacatcctagcagatacgtttgaagactgcggaagcttcatcagagcaagttcaacagcagctgagctaaccgaaaccgcaccagaagcaatatttgtctctgttctaacacgcttaccaacagttatcgcgtgtttaaacagcccgctgatattcctcccaaaaccattcactccttgaccaactttaacaacttgcttaacctgtgcaaggatctgaccttctcctaggacaagagagtcaagaccagctgagacttcaaatatatgctgtgtagcatccttgttgtacaacagaaaacggtgttgacaaatctctgaaactgggatcccactcgtctgaaaaaagagataagactcgttagttagcccttgataccgactgtaacacagccatgataaacactttatactatatgaacagattatataaaaattcactacagctggtatgatcgcagaatcaaacatataacttcaagttctaaacatgttctaaagcattagtcacagtccaaagtacgacactatagtagaaaaaaatcacacctttgacatccattttgtaacttctttaactccacgatgctgagataaagctaaaacataaatctccatacggttacaagtactaagcacagcagcttcttcaatatgattcaaaccacacaattcagcaatagctcttggccattcagcttcaggtatagccagcttctcacgcatttcaaccggagctgtgtgaatactaagtccaatcacaacaatactgcttctttcctttgtataccctaataatcacaaaatgaagagtcagaacaacaattcatagcaaaaactgtcttcactataatcataacatcactaaagaaagattcaaacaaaaggttcaaacttttatcaaacaaaatattcaaactttgagtagattaagagatagagactcttactatcagctgcagagttcttgagttgttcaagagcagagatgctagctgcattagaagcagaatcagaagaagcagagagctcacaacgagctntttggat

SEQ ID NO: 29072 - DNA, 1688 bp, Arabidopsis thaliana landsberg
ttaataaccaaacataacatcaaaataattgtgcaatttgttttaaaaatataaaacatctacaaagcctttttgcatgcttctccaataatggttatcattgtttagaaacgcagatggtaattagggaaaaaaaattttgtatatatatcatgtgtacaaagttttaaactttaactttaacaaaagaacgcaatgaaacaattatggtatgcttcccatcaagggcatgaaccagaagatcatcttccccagaggctgtcttcaccctctactcaagtttgtatattacaaaggtgccgatttttaacctctacgaacctaaaaaatggatgcaacaaaggctctcttctctctactttttttccacctttgctctaatcttctcctcgagtatctctgcatcaagtccatacatcctgttcagagcctgcatgttctctagtgtctcactcagcgttctgctatcgctcccatcgcatctcaaatgctgcattggaccgtgcaggagcttgttcactatacctcggattagatcatctactgttttcctcatcttcttgttcatgtcaatgcccattttcggcaaggatttctcaatctctgcagctataattctctctgtatatccccttaatttcttgattgttggaaccgtctccagagagtccctccacgcttcaaagtgttttgattcatctgtaattatagcctgagcttccattgctttcctcaccctgtcttctttattcgcagcaacgacttccttgaggtcatccacgttgaaaacccgtgtaccgtctatttcagcgacgcaggacccgacatttctaggaacagagatatcaacaaagagcctcgcatctctaacaggagggagagtctctacttgctccttcaagaataatggtgtctcagatgctgtgctagtaaagactacatcagcttctgcagcacaagacagcatctcatcaaggggtttataaataatctcaacaccaggcggcatctcattgcggatagctgcaactttctcttcgcttcgattcacaaccaccattttggtgcaacctttagcaaccaagtgcttgattacaagcttccccatctttcccgcaccaacaaccaacatcctagcagatgatgcatgagaagattctggaagcttcatgagagcaagttcaactgcagccgaactgacggaaacagccccagcagcgatattcgtctctgttctgacacgctttccaaccgtgattgcgtgtttaaatagcccactgatatttctcccaaacccattgactccttgacctactttaacaacttgtttaacctgtgcaagtatctgaccttcacctaggacaagagagtctagaccagctgagacttcaaatatatgttgtgtgacgtccttgttgtacaatagaaaacgatgctgacagatttttgtaacagggatgccacttgtctgacaaaaaaataacatatgtcagcattgattgtaacatggtgataagaacattcgcaagagaatgagaaatgctaaaaacattttaacagtaaaatagtttactcagacataaggagaagagcattctagtgactaagcataagcatagaaaatgggaaacaccttagacatccactcaggcactggcttgactccacgatgctgagagagagccaaa

SEQ ID NO: 29073 - DNA, 1187 bp, Arabidopsis thaliana landsberg
atacttctcgagaaggtctcgtgcaacaaattatccgaaacatctggtgacttatttcccacgaaaatagagagatcaggtccattgttctctacccgcttctcaccggtgctaaaactagcccagttcaaacgaaaaggttggtcagtatttggcatagtcgtcccgctaaactcccgcaaaaccttatcagctacatcatgggactcaaactccacaaatccatatccttctgataaaccattgttcttattacgaatcaccttcaccgaaacaatctctctctgtattaaacataaagaacacacctttagaccaaattcacaaagaaagagagatcaaaccgagtcagccagttacatagatatataagcaaactttgtcagcaagtacagagggaaactgaaaaaggcaacgtttttaaggtcaaagcattaaaagtcaacgaaaacagaatctaatcaagagatacataaatgttttgcaataatgacagagagagagaagcaaacctcgtcgccggaagcaaaagaagaattaagataagcctcatccatccagtgatgcaaatcaccaacccatatggttttattctcaccattaaaagcgttttgatgcttattaccacgagattgatggtgaaggtggtggtgattcggatactgatataaggtggaacggcgacagcgcgtacatcatctgatgagagattatcgccgttggtgaataccgcatccagtgtggcggcgaagtcgaaaatgtttttggttgattctcctcttctttcgccggctgttgcgacgtcgaagacgaagaaggtggttgattgtcgaccactggatgagaatccaagaattcggattcggattaaatcttgacgactgccattaaattttgcggctataaggtgttttgtgatgtgaagtgattgctatgtaatgtgatgtgagattagggttagtttcggtttcggaccaaacagggcaagttttgagagttgtgtttaagatatctattaatggcaaagtttaggtcgaaattaggggttttaatccggttattgtggtaacttgcaaatacgggtcgggtttatgggtttctgtgtgtgttctgaaaggttttaaagatacggtttagttctgacctagtttagtgaaaaccgttggattgtacgaagagggttagcg

SEQ ID NO: 29074 - DNA, 1168 bp, Arabidopsis thaliana landsberg
  unsure (1)..(1168): unsure at all n locations
caccttatcctccgccgcatccaccggttgaagtagaggagaatcaaccaaaaacatctccgactccgccgccgccacactggatgcgttatccaccggtgttaatgcctcagatgatgtacgcgccgccgccaccgatgccgttctcaccttatcatcaatatccgaatcaccaccactttcaccatcaatctcgtggtaataagcatcaaaacgcttttaatggtgagaataaaactatttgggttggtgatttgcaaaactggatggatgaggcttatcttaattctgcttttacttccgccgaagaggnttgcttctctctctctctctgtcattattgcaaaacatttatgtatctcttgattagtgtcttagattgtgtattaacagtttcttgattctgtttcgttgacttttaatgctttgacatgcctttttcagtttctctatgtacttgttggtaaagtttgctctgtttttttctttctttgtgaatttggtctaaaggtgtgtactttatgtttaatgcagagagagattgtttcgctgaaggtgattcgtaataagcacaatggttcatcggaaggatatggatttgtggagtttgagtcccatgatgtagctgataaggttttgcaggagtttaacggggcgcctatgccaaatactgaccaaccttttcgtttgaactgggctagttttagcaccggtgagaagcggttagagaacaatggacctgatctctctatatttgttggggatttggcgccggatgtttcggatgctttgttgcacgagaccttctctgataagtatctgtcggttaaagctgccaaagttgtccttgatgctaatactggtagatcaaaggggtatgggtttgtgaggtttggagatgagaatgaaaggaccaaagcaatgactgagatgaatggtgttaaatgctctagtagagctatgcgtatcggtcctgctaccccgaggaaaactaatggttatcaacaacaaggtaagttttctccaatgcaatatctttgtgtatctatgctcatgttaggttcttggtattgcaacaatatgttttaagtctcttgtgtacataactatttgatgaatctagtaggtggatacatgccgagtggtgcctttacgcgtcctgaagggg

SEQ ID NO: 29075 - DNA, 1700 bp, Arabidopsis thaliana landsberg
atttcatattgaggaaacacaagaggtggtgaatctgttaccaaattgttcaccatcatcgtccatatcatcatcatctgcttcaggaagatctgaatcgaaaatagaagagtcacatacacatacacatatatacatacgataaaaaatcacgattgaaggagataaaaaaaaaccttcttcgtcgacatcgatttcacggaggacatcggattcaccaaggaaaatctctccttcatcctcttcttccatcgctagattattcatctctgtattattagtattattactcatcttcttcttcttcttcttctctctctcaccacagttttttccagccgcgactaagaacaggaagaggacggcggagatgaatggaggtgtgacgtgtcacgatgatggaacaagaagacacaaagtacaaaaacccttcttctctttttttcccaacaaaaacccttccaaaaatttttctattaaacgacgtcgtttgtatacacaaaagtgaaacggcgtcatgtgagtagcgcattataaataaacgacgctgtttcgcttttgtgtattctaacgacgtttagtagaacaaaattgaaagggtttttgtagcaaaacagcgtagttagtttaacgtatttttggatgtacatatattgtgttcatagttcatacttcatacttcatacaatagacagtaatcttacacaaatctttagattacaatttttttcccttttaatcgaaccatagcacaaaatcacaaatctttgaatgctagatttcattttacattaacaattaaaaaaaacgaaaacttacgggtaaaaaaactacctaccttgtaaaatttgttattgttcaataattttatgttttttttttttaccttggaccagataactcaacggcgtgcaaattgtaagtagaatcaagaatccaatcagagttaggattaggactcaaatcaatctcttccctcaaaatctcaactttttgccattcgtcccatttctccgcaagcccatctccttccagcatccttacaacttcagacatctttggtctttccattggtgatccttgcgtgcatagcaacgccacttgtatcacttgttccagttctctctcctcgtagtttgtttgaagatctggatccactaacatctctagcttcttctccttcaacaatcctttcacctaaaccaacaaacaagtatttgagattagattctcgtttcaatggtttttgttgggtcaaatggaagttttatgttgttattacccagtcaagtaacatgacgtcgtcgtcgttagctagccgagcgagatcgaaagctctttgtcctgtgattagttctagaagcatgattccgtatccgaaaacgtcggttttctctgaagattttccggttgagagatattctggagcgatgtgaccgatggtgccacggactgctgttgtcacgtgagtgtctttatagtccattagctttgccaacccgaaatctccaacaaccgcttcgaattcttcgtctaagaggatgtttgctgcttttacgtcacggtgaatgatcttcggatcgcagtgatcatgtaggtaagacaaacctcgagctgagcctagcgcgattctcttccgcgttggccaatcaagcggaggttgtgacggtggcctctctgtgtcattagtgtaaccaaca

SEQ ID NO: 29076 - DNA, 1719 bp, Arabidopsis thaliana landsberg
tatacatagtttcagacatgtttagaacaatgaaagcacaagaatcttggtaatagccgtgtttttacctgttgggcaaagtagaccaagaggaagcaggggcagcttcagaatccgaaaactcccacactttcaacgaacttgaatgctctgaatcaacactagtccaagttttcattccgaaactactcttatcaacctcactgttcttctgcatacacgcttgcagtgatgactgcttcagagctgttcgaccaccagttgagaaagatttgaaatttgtaacttccgtgggaaacccagagttacccttcatcgattgagacttcaaagctcgatctagtttccgagtttccacagaggtagagactttctccggcgacacattctccttatcctctcccttttgagtggataaagaccctgtaattgtgtccacatttcccttattttcctccaacaaatcattcacttttctcgaaccagccatgttttttttccctttctggatggattgctttcaagtttcaagtttagaactttctgggagctaagtttatatctttatagattttgaagacatgaatctagaaacaggtgtttgacaatggtactgagttgaaagtaacgtttttataaagtcccacagtgtttccatttgaatttgaatagccattggggattgtgcgagcacagaaccaaagacacagatggacttttcttttcttgtcttaaacacaaaggttttttagatgtctgcgtttggtttttgccctttttctactttctacggacccaacggtcaatacacgatagtgggattttgattaatattttgtcgttttcctttgtcgggaaactgaaaggttgatgattggattgaggtttagcgggaactgtgtttcaaacactcaaacacttaaagtatcaacaacctgccgttttttatatttatcaacgtcatgccgttttatcttcgtgagtcatccaaaaccgataagccagagcctcaaaccatcgagtggctgttaaaccatactgttcaaattagtccaaccaaaaccatgagaggccacaacatcgtcgaagcccattattatcaccatggctaaagccagtagtactctgtttgctgtttcctgctccgcttcagctcgtttctctttcctccgacgctctgaatctcttaaaccctcagtttcaagagcgagattcgccgttccaatggctatggccgccgcgtcagctgccaccgctaaaaaactagcgcctgctgtgattgtgggtggcggaagagtcggaagggcgttacaggaaatgggtaatggcgaggatttgttggtgaagagaggagaagcagttccggttgattttgaaggacccattttggtttgtacaagaaatgatgatctcgatgctgttcttgaagctactcctcagtctagatggaaaggtagaaactttcataggccctaagaatcattagtgagccaaattgttagatgttttagggcgtttgatcatcgcacagcacaattcaaatgatcagattatcaaattttgattgtttcttcagtttatgacttggtatagaaaaaacgctgtgtgtaattaatcagatttggtcttcttccaaaatggaatgatggagccccggtttgagagcaaaggtttgtgtgatacagaccaagtgttggcctattttgctgcgccaaagct

SEQ ID NO: 29077 - DNA, 2098 bp, Arabidopsis thaliana landsberg
tatctcttatcacaaaaaataacgtgtcttgtttagcatgaagatcaatgattcaagatcaagcacccgccgcattttacattgcttgactcaatccaagacccacagcaaaaatgactttaggattcgcagcagtcaatagaacattatctttttcaggaaactggaaacaagtgggagagccggaaaaagtatgatcaatatatagaagaatctttctccgccaagtaacttaaccagccaaaattagaactcagtaggagatttcaatcttatgagtcgcttaatcctctgtctttgtcatttgtgaacatgttttccgggataaagagaacacatcagagcacaaacactcagaatctcgctctcaacgttaagtgttcgacatcctaatcagagattcaaatcgagaagaaagcgttgaaatcggaaacctgctaaagtcttgaaacgaatcaaccaaacgaaacgaatcaacctataagttttgactattttacaaaatgggctaccaataaaatctaacttaaatacatgtattactaaatttaaatgtttttttagatgtttcctaattaaatggtagttaaaattctaaaacacaaggattgtgagaaaatctcatgaaatcattttttgagtttagaaaaagttgaaatgacatcccttctctaaacctttagattcattttttttgtttgtttgacaaaaccttcggattcatttaaattgatattgttgatcggcaaaattggtgatcacttctgccatcacaagattcacaatccatggatttgacatctggtctttatattacaaatatagaaattaaatgaaacactaggaagaaattactgttaccaaactgtacgtgataaaggaagagatcacaagttaatttctatagtaatgtcttggtattcatgacttttccccaaagtcaacagcaacgtttccccaaagtgaaaaggtttgaataaacgtaaagagacaacaataaattaacgtaaatgcttttggttttctccgacaaactttacctatcttctattggtcgtcatttttaccaattggcatcatttgacatgtctcttgtctcctcagtcctcacccgtccccaacttccatcgtggttcgagatgaccggattatgattttggtttcagtaatagaagacaatgccaattcggtggatttgctttatgacattttttggtcccaaactaagtgattttgtgaaggttataggatatcatcatgcgattaattagcctttaatttgttcgtgtacgtatatcatcatgcgatacatcattttcagaatgatcacacgtatatgcaaccatttgacgtatcttaatttatatagctagcaactcttttttcgtcaaataattgtttagacgtaattttaatttaatgtttatgaccgacatgaaacatacagcttagtataaccttcaataaaataaaataaaaaaagcttagccgggcaatggaaataaggggcatgctcttttcccatgcaaatgtatattaatatagtgtatctattacacgcgcctatataaatgtattcatgtcccaaagcttgtgtatgctatgtaactttgggttttgagaaaattgtgatgatatggattcgtcaagaaaatataaacgatgtggttttggagctgcactgttggttgctaacatcttcttctctctgctatctctacactgcatatctggtatatatacatatccaaatccctgaaatattgcccctttattaatccctttctgattatatgtatatactaatgtacatgcatgtaggggcacatggtcatcaacaaagaatgaaagaatcggttatgggttcagagcctcccgtgtgtgcgacaaaatgccggaactgcaagccttgccttccttatctatttgacattcgtggtgctcatgatgatgatgatgatagtgaaccatactatccggtaaagtggatatgtagatgtagagatagagtatttgaaccttaagaatagtatctatatatacattatttatctagtgtcttgcttctcatggatgttcatgatctgacccatgaatg

SEQ ID NO: 29078 - DNA, 2418 bp, Arabidopsis thaliana landsberg
  unsure (1)..(2418): unsure at all n locations
ttgatctgttactggtttttagtagatcttcctgattttggatgaggttatcaatcttatttattttttatttttctactatgttaacgttccttctttcttggcttagattcttgatagcgttcaagtgtccataaaaaattttcacatcttatactcagatgcacaacctgaatcggtaagtctcttgcttgttcagtttaattagtttgctagaatataggcttgtattttgttatcctcccattgatattgttgaaacttatatacatcgatcatatcgtagtattggtttgtttgtgagagcatagcatttatcatggaggatatgtatctagatagagtcaaatatatttgagcattgtgatgctaaactactatcagtctttcttgtgattcactagaatataacttgaataatcgnttggtgttgtctactttcccactttcatatgtttttactctaaactgctgncacaggggcaagttgtattatgattgcggttttcaagcttgacagttactaaacaaaactcagttgggtaatctctttatgcaccttctcttgcacttttaagtgtactccactttgtgtttgattccgagctttgctttatatatggcaaggatatgttctttgaattacattgtgagacagcagagagcagaccccacattaatttctttccagttgccttgtttcttctatgtcacttaatatatattctagtttcgtatttgattccttgtagctttgctttattctattggtttggcgataccccattatatctttcttccaactgtctcttttcttactgtaaaatctccttaaacctgttttttccataagctaaattattgttgataagacaagacctgtggtggatacatgtgcgccctcaaatatttgacatgatgtctctgttgaatatcaggccatcagttggtagggtgagaggggggcaagtgaatatacttgtggaggttgaaggtttggaaatatattgtgacatgtatgagggaaacatggactttccaagtgttaatgaaaaaataggttttgacaattggtgccagtcaagattgcaaagcaatagatttggttatttactgaagccagtccatgtttctgtaacgctattggtaatggatctaaaacagcgtcattggtttgctgtctcttaacatcttttgttatcatctaatctttgttgctgcttcaaggtgctacatccttgctcttgctttagggttatgttaaaaatgagatgtacacatttatatgttatatctgccgtactgagtcttgatttacctgatggcctacgaaattttgatgacatattaatcaatcaatgttatcagaaaggatttgcataacatttttgccaattcgtttatatgtcaccatcagctccatatggacattgtgtttggtgaaagatttttacagctatctgatcaatgatacaatatttatacaaaaagtaaattggtctatgcatcagctattgcttgagtgcatttttgtgctgtatgtaaataggcattcttcattttgcctgatatacttctttgcataggtcaatcgatctggagagctttatgacgatcttcctcagtattctatcagcgctgagttgactgatgtggttagttctcagaaattgctaaactaggttcagagctcagatttatttaccatttcctgactcactctaacttccaattggcactgatgcgttttaggtggtgactctgaatgaatttcaattgcagcagattcttattctgttagattatttgcaaaccagccagttgcgtgagaggtaagctttcattagggtagcgataatttttcctcaattcaaacttttttttctcctgagatttagctctattattggatactacagaacgtttttttgaagaactactgattaaagaaccttttaaatggtttaggtatgggcggtatcgtccctgctccacttctttatcgaggaaaccacctggatggcagaaactttggtggcactatgcccaaaattcagttttatctgatgtacggaagaaactgtggaaaacttcatggagatttcttgaacagcgaatgtaagtttacgttgcttacatcatttcttttcttttaattagatgatgcttaatagctattacaattttgatttctcgtaaaacttctgcatactttacttccacgcaaataacttactgtttcatggcataagtagacaaattctcctggaatgtattcaagcgggctgctcacttttagatttttgtttcggcgaacacatacaggagaatccgcaggaggtatatcaacttttacaagataaagctagatcttcctctaagaaacaggcaaggatcttattttctcttacctgatta

SEQ ID NO: 29079 - DNA, 1652 bp, Arabidopsis thaliana landsberg
  unsure (1)..(1652): unsure at all n locations
ccatgtgctgtcacaaaaaaagttccgactccaacaactatcgctacctggaagaaccaactacttttaactgaaaaaggataaaacgctaacaatctagaactaagtgttacctctacaccaagacgacaagccattgcaacttctcttgcaatcagattgattacctaaataatcaaaagagaatttgatgctgaggtcggatagagaaaatgcatgaatcaacaaaagattacacattctggaggaaacctttggatcaatgttattaggannnnnnnnnnnnnnnnnnnnnnnnnnnnnnnnnagaaccactcttcgccatctagggtttgatgtagcctttgatttgacgttattaatctgaactcctgggttatatgttaccagaggatacctgaaacaagaaatacaaaaccaaaaactttcactttcacaagagcacaaaatacaaaagagttgctagtgatcgtttctgcattaccttctagctggcttcacagtattccccattgagcttccgcttctatcttcatcagacgcgcctttcaaggccaatgaattgcccacaatatcttccatcttcttaaaccaaggccagtgactagctgctgttccaccactgctcattctatgcctttcaagcttatacctcttcttgagattatcaatcttgttcttacactgttctacactcttactcagcttttcacacctctcactcaccgatgaagcaacctcttcccaatctcttccccggagattccctcgattaagctgtgtgaacttatccgaatacgcatctaacaaacacgcaatcgccgcatcactccactcttctctatccttcctatactcaccagctgaggaagacgaagtcctcggtctcttgaagctaccgtagggagtaatctcaccgccatttgttgttcctccgtcacttagctcctcctgactctgcctcttctcaacacgaacacctccgattctagatctgttggcaccgagatcttcgtcttcgtcttcgtctacagctgcgttattatcatcatacggattcgaattttcgtccgccgtgaaaggattaacaccgtgaccgtggaaagcagaagacgcttctacaacgacatcgttctcgtcgtcctcgtcgccgttcctctggtgatgcggtaaaaggatctgattcgatggtttcgggttgaatcgtctaggagcgtagggcgtgtgatgaagaacttggtggtggtggtgatgttgattagggtttgactgatcgtctccaagtagagagaaatcgtcatcacacgacgccattaaaaatgccgttagggttaccgcggtggtagcaaccagagacggcgttaattagcggcgagaggttgaagaaacggaaggagaaggcgtcaaggcgtgaactagcgcaaaagtggatgggccgtcacaacggctccgttaggcaagtggtaagggtggaataaaaaaaagttaattcacaaaaaccaaaccgaaccaaagttaaattgcgttattctattcggttttggttaatgcaaaccgaaacatagttaaattcgcttccgttacagtcaataacctacgttacgtgatatttttgagctttacatcaaaacccaccttatcaaaattctttc

SEQ ID NO: 29080 - DNA, 2597 bp, Arabidopsis thaliana landsberg
gagaggatcactcattgttgttactacaatcacttttagacaccttcaatcctatgatcctataaccaaatttcaagagatttaacttgataagataagtacttaagtagtctatatttgatgccaacaaaataaattactaattctataggactaatagtagatataatttacctgtttcatggaagaactgtaaagacttgaacatcgttcatgtcagggttttggactgagtactgaaacgtccagccatagcaagctcctgcgtgagatccgttcttgtcaacagccacaactgctcccacaaaatctggaaacttccttgcgattctcgagattgcatctttagcagcttcttctggtttcattccttgtctcatgctctccacaacttggtaactaaaaccccaaccaagaagaagcagtttgctttaacacatgataaaacataataaccctttcacttttacatgctcaatattcaattttagcgccgcaaaaataaggcaagattcattggtgaccactgagaaagacctgtctaggtcggtagaatgcattgagatagaaacagaacacaaaattgttcaaggagattgggtaattaccaagggaggaagcgcatcatggtgtcaccatctccagttgcaccacatccacctacttcatcatcagcgtaggctgatgaaccgacgataggcccatcaccaaccctgtttttaacaatcaaggtttgaaagttttttaaatctttaaatgaatatggattaagtaatctatattgataacacatggaaatccattttgagcatattccttgcacattttgaacaatcaggattcaggaggcatgtgagataaataggttcggtttaggtcagagataatgctcggttttaatggcattaccttccaggaattttatatgtggctccattggtcgatgtcccaacagctatatgccccatctattgaaagagcacactcagtttctctcgtccttgcaacaaaaatgtatagagaatataactaaacccatcttactctgtcaatgacagccatcgatatcgtatcgtgattgtgaggaccaacaagaggaggtttatactcaatcgcccccatctcgcaagattcagtgcttttgtctacaaaaacattcatagcactattgattggcttgtaaggtccacagtcatttgcggggactacattcttcctgaaattgggttgacactgattctctttccagtccgaccacttctttacagattcaggggagcttaggttcatgggtccggggagacccatggagattgcaaatgctgatgctccttctccggcaagcaacgtgtgttgagagtatttcatcactagatgtgcagctcttataccgggtttaacataccgcattgcagcaacagctccaacctccatagtcacctaagaatgtccttagaataacccaaatgaagagtcattcttcaagatcttaatgcaaatggggctttataaaacggagggtactgatgatttgttaccccatccatgactaaagcatcaatcatggtctcaccattctcatccggacttcctccaggcccaactatcaataccaacaaagaaaactctcactttcagaagtagtaacattaaagaagtaaattcaaattatcggaccaaaaagccgacctgtaccgtcacaacgaagttcttcacaagcagaacaaccttcaacaacagcttccactgcagagctcccattatcaactgctctccaagcagctctaacagcttcaaggaaaggccaagtactcaccactaccggaaacttgtcagatttcaccaattccgcatcagctacctgaaaccaacccacattcataaaaaaaacagtttgtgctatgagaattgtcaagtccctaagcaggtttaaatacgaatttagatgatttggcatttgagcatagaaatacataaatcagtacccaaaagttagttcattaaagtatatccaactccaaccaacatctaaggattcaatctctacaagcaatatatatccaaaatatgaaaagcactcaaatttggcaaaatctggtgtcccaatctcgaaaatcagagagagatctcgaccaagaagtagaaacccaaaacgcttttaatctggtgtcacttaaaatgattaaagatccgatttttatttcccagttccattcgacttgagactttcagagaaaaaagatagaactatttcgagcgcttaccgtaagcagagacagaaacagaagaagagtagaaacaaaaatcaaaacatcgcttctcgccatggctgtgagctcgaagaagctacaaaaatggaaatttgtatgtctctgctctgctctgctttgctctgtttgactctaaggtcaattggtctgctcatgagtcaatacggttcggttaaatcggtttggtttcatatcgatttcgataacccgattggataagagttttaacgaattgcggtcacatccggttgttgctttatatgattgggaaacaatccgaattcttgattttcttataagaaaaacttatcttttaatcatcagagt

SEQ ID NO: 29081 - DNA, 723 bp, Arabidopsis thaliana landsberg
gcatgttatctctttcctggataaagagaaaattgttccgaaaaggttatcaaatgtggagatacattttccatcatctaagacttctaagaacagtctgtctgaaacaattattggaagcatatacacgtacaagcaaatgatcaaggaagcggagagcacgtaacctagcgtcacttcggaaaaaattcgatcctacagagtcagagttcaagttaaagatgtaactaacaagaaaaagagaaaatttgccacaacaaagaaggaaacctcgtcaaagttatctccacttacctgtgaaatctaatgctgttggtctaaaggactcgttcgttgatagcatcctttgcaaatcagataccaattccgagggtatagatgagaaagattcatttgttatatagttcaacgtgttcatgtactgcaaaaaaattcaagttaaacattaccaaccatgggaaatccaaaggatactctgaataattaaaactactccaatgacatcaagcctgagagaaaacgtatctgacagcatctatctgaatatcaaaactaacaagctcggattttagagtttaccatcttgacattattattgcagtcaaacaacggtttccgagcaactaaatgataggcaaggcatccaaaactaaaaatgtccgacgaagctccagctgaaggacttttgctgcgcatcagttcaggtgcagtgtaatttagaga

SEQ ID NO: 29082 - DNA, 2275 bp, Arabidopsis thaliana landsberg
aggataatcaccgtttgttcgctcagaatcccgtcgatgttacctctcttcgcccttccgatctggaagaattcgtcaaaggtaaattgtctttgtctctccactgtatgagcgtatctgagatgcaattgcgagagggtttagatttgctttgcaatcccaatttgggaggaaaattgcattatgtatgttgatagtgtccttagtcacctgagtcgtcaggtaggtttagtgggaattcgtgtctacaagcgaagctgaacaatatgaaattgattaaatttaagtcgagagaaatttcatttagtgcgtttctggagtcaaatttcttctatgactcttgtgattgatatgtgaggcattttgtttactttcgtctcgtggaacaggtgtatcctttgacctttctgatagagaactcttttgtgtcgaggatcaagatgtatttgatcgtgtctactctttggtcaggagcttctttagtcttcctccatcttgcaagtgtaatcttgtagaaagccttcggtccaatctaagcgttcttcttcccaatgtcgattcgatatcccggtctgtccaagatcaggaggatgatgttccaattattgataggatcacatcacatcgcaatgccttgaagatatacactttctttctcctcactgttgttatgaatgaggaatcacacatcagctcagtcgagactacaaaggtgttctctctttttccagctgataatacagaataaaattcatctcttgttgtcgaatttacggtagtgatgttgtggatgaacaggttgcagcacgagggaggaaaaagcaaatcatccagtcatggaactgggaacctcagaggggtaggatgctcaatttgatcgcaaattctcttgaaatcaacctatccttgctctttggatcatcagacctagacgaaaactacctgtctttcattgtcaagtaatttccgtgacctaatgaatcttgtttctttcatagtccatgctatagatacattctcacaacattttcatatcatttccttgtagaaactcgttcactctttttgaaaatgccacaatcttaaaagatgccgagacaaaagatgcactgtgccgaatcatcggagcatctgctacaaaataccactacattgtacagtcatgtgcctcaatcatgcacttgatacacaagtatgattttgctgttgtacacattgctgatgcagttgctagagctgaaagcaagtattcagatggtacgttggcagtgacaatcattagagatattgggaggactgacccaaaggcctacgttaaagatactgctggggctgataatgtgggacgtttcctggtcgagcttgctgatcgtttgccaaaattaatgtcgacaaatgttggagttctggtccctcattttggtggtgaatcatacaagataagaaacgcactagttggtgttcttgggaaattagttgcaaaagcatttaatgatgtcgagggagatatgagttccaagtcccttcgtctgcgaactaagcaagctatgttggaaattttgctcgaacgctgtagagatgtttcagcctatacaaggagccgtgttcttcaagtgtgggctgaactctgtgaagagcattctgtttcaattggcctatggaatgaagttgcatcactatctgctggaagactggaagataagagtgcaattgttagaaaatccgcattgaatttactgatcatgatgttgcaacataacccctttggtccacagctgcggatagcttcatttgaagcaaccctggagcagtataaaagaaaactgaacgaacttgaacctactgagcatgcatcaaaagagtcaacttcagatggtgaatcctgtaatggagatggtgaaatcgatgacttgcatcttgaaactacaactaagattcatcaagatagtctatctgatagctgtcagccagagaatggagaagaaatcagtgagaaggatgtttctgttccagatattggtaacgttgagcaaaccaaggctttgattgcttacctagaggctggattgaggttctgtcagtgcatgtcagccagtaggccaatcctcgttcaattaatggcttcatcttctgccactgatgttgagaatgctattcttttgctgatgaggtgtaagcagttccaaattgacggtgcagaagctcgtctccgtaaaattctgcctctggtatggtcgcttatcatgtatcaaactcataagaatacattcttctg

SEQ ID NO: 29083 - DNA, 3425 bp, Arabidopsis thaliana landsberg
  unsure (1)..(3425): unsure at all n locations
tgatctttttctaagataggagaagtaacccaaccattttagactactgattttctagttttttgtattaagaaagaacaacgaaaaaattagatgtacggtgattgtctcaagtgtttggtttagttttccttgaatttgatgatgcatacttttctcctttcagaactctacgttcattatcttcatcaccatggtctcttctaaattctgtgcatcaatggattctcttatgatgtgggacaagagaaatcatgattctgatttttttattttatttttaattactgataatcaaagagacatggaacttgaacaaagaaaaaataatacaagaacttatcatcaaaattttggatagtaaaaatccatcttagtgatctgtagagagcccagaagtaaataaaatttatcaaacaaaaaaaaacttaggaagaacgaatgttgtctctataatcatcctcttccccactgctcatgaaatcctgcatctcaccgtcgtcatcatcatcctcatcctcaccattaccatcgtcttcattttcaccttctataagctcctccataaagtcaccgtcaatgagaatatctgcttcttcatcaaaatcgctcacactatcttcattgtcctcgctgctaaggtcatcatccccactatcgctattgtctccagctagtcccagaattcggtccaggtcatcttcttcttcatcatcttcatcttcatcttccgtctcatcatcatcatcgggatccgagtcatcatctgttggtctccttctaccaatctcatacatcctggccgaggaaaacatatcttcttggtcttccattgtgatcagcccaaggaacgaatctgttggttctgtggcaaagtcaagaagacaccggtctacaggtatagtggcaatgtctgagtagttgatcgcatcaagagtgcggaaagcagcaaacaagggatgtttcacacggcgtgtgtgaaccgctgacataacgtcctcgatgtttctcctcagcattgcgtatataacatctcccctagagttgaacgtaatagctgtctggtccagtgatggtacactccgaagaagtttgaaagtcctcatgtcccagacctctgagtttatgatcacctgtaataagtaacatgttgaaaagccaagaaacagtgagtaactttttatctatattgtagccgaggagttaatgtagaatatctgaagttgttgtgaaatggttctggagcagttagtgagggacttttataaagctgtcttcgactgtttaagggagtggattgttctagggtttggtcaactagaataggaatgacaatttcattgctttggtattatcacataatttagattaaaaagtaatatgatttatccattacctcgttcctagaaggatgaaacccacctccgccataatcagtaaattgatcaaaccgtctgaccttctcggggatacggcggtcccagagaacaccattccacaaaatcagtgtatcgcaagggctgaagtgcacaagagaatagggattacttcgagaggatgtgactgtgtcagtgagtttttggcaagggctgcaggtctgtacgtcatatagaagaacatcttttctagatgcttcacaagaaagcgctgcaaattgtagcccagagttgctgaattttgcagccttgcatccatcaaaggagtgtctaggcccgccagttatagaagacgcgtcccacaactgtacatcactggagctcgaagaaagtaacaactgagtatcacgagagacatacggctgaacaagtgtaaccggagcctggtgacctgagacactctcaagcatgctaccgctgctagcttcaaatatcttgatttctccagcatgactaccgactgctatatgattagtaccgccaagaagtgcaatgcatgtaaagagagcagtctcatcccggaaagatctccaagatttgaatctgctgaaaacaaactgacgatccctgcgattcccatggactccactgtagaaactttgaagctcacgggtcccaagacggccagtcatgtttagtggagcttcaagtaaccgtttaggttcaggacagacatgtggatgtaggagagacacagggggaagagttgtgattggagccagacactgcctgtgttggtgctttagatactgaaccacaagggagtctagtgataaccgttctggatttgaaggctggggatcacttggaagccgtagctgagaagcaggtgtcatttggcccagtctggaactcccagattggttggcatctaaagctgaagctggtgtttgcaaacctgagccatccgcaaaggttgaattccttcgctcacccaaatcgattcttttacccggaactgacgagtctctaagctcagacaacttccgttttcttggaaaggaaatcggggtcttaaattgagcatcggcatcaaggtcgttcttcaaaactaattctgcagcagtttctgatgtatctgccaaagcaggatctgaattcgaacaacaatttattctctgtgtagactgaggtagagcgtcatgggagaaagattgttttcttgactgcgaactaaaactgggtgagaaagtcaactgtttcttctttgcagatggagctgcgttacctctcgaactaggatcttcatcacgtgcattgattttgggtatgctgggacaaaaaccacagttagcacggcctgatggccattgttgctgtgctactggtgtgggcatctccagtgtcgaggaagccaaatgcttcttcttggcagatagagctgcattagatctagaatttggatcttcgtcatgtgcacagaccttgggtttgctggtgaaaaatccactgttagcacggccagagggccattgttcctgagctagcggcgtagacatctcctgtgtagtggaatatgcaatagaagaaggggaagccgatgaaggtagaggagttaattgagcctcttttaacagtgctgaagctgtatcaccaagacctgatgcctggagatgctcatggataagcagtaaaagctccttagaatcataagttataggcgttgctgctgcaatggcagctctttcaatgcgcctcagtgttggagtagcagcatcactggctgttagtgtagttgcatgccctgaatttgtcacaatctacaaacacatataaaacacaattaaaaatatccgcaaaacttcaacagaaaaacaaagaatgaaaaaaacacttatcactaatgaagcatacaaaaagaaccccatataaacacattaaacaagaaaattaaatcaatttcagatgattacccctattagctcaagcgccacctgagcaagttcagaaagccataacccctgatctgtgccacttgnctgaccacct

SEQ ID NO: 29084 - DNA, 1972 bp, Arabidopsis thaliana landsberg
ttatctcaatctgttctatgaagaaattatggataaaattttgtctatgtgatttttcttggaaaacaatctaacaatccaatcaaacactcaacacggtattagttgcgtatattagaaagaaatcatcttaattaacaaacaagagattaagaagagaggtctttcaaaaagattttgcataattttagccgcaaacagcttgcaccaaacaataataatattatctttttctaatgaccaggtttgttatatttcatatatgccttcaaatattccacggacacggattttacaagtctcgcgtaaagatggatactttataagcataatataaaataagaacatcgaatgccatcggatatggacccatcgaatgccaacttttattagtgttaaaatagttgaactataaggtccatgaccacaaaagtcgccatacattgtttcctctaagtatactagtattgtttagcttatattctcaccaacacattcactcacgttaaaactgagtccaatcataaatttttatcacacgcatatatacaatatgattatctgtaagaaagaatttcatatccaacatgacaagttacaataccatgtagtaattcacttgttaatagtctaataaaataattcataggtatgaggtctaagaatcacattatttgtcaagttgttattgctccacctgcgagattcttttgcaaaatttcctcagatattacatctttttaaggcataaattctatgatatcttcgtgattctaagatatattacaaaatatagaatattaaagaacccaatcactctttcttttattattagaaaaacataaaagtcttttttttttctttgttacataagattcctacacttttcgaaatggaaaatcacaatgataataatatcagaataatctcgaaaattaataataatatggtaataataagaagaaaaaaaagagtgtgtgaagttaacgccaagcggatgcgacagtgagtgcccgtcccatccaaccaaagcacacacctccgttatcttctttaacggtaaagcccgggtggactcggtttccacgactcttcatcgactccgctatcttctcactcaatggcattaactcaaacccagccatgctcatccgcattcgccatttcccgaacacctcgcaccgctctatacgatcgattccttcgcacgccaccgcgtttactagcttccggccaattccttcctcaactttggcacggtcggaattcgtactaggaaccgtagactcgaccgactcaagcaacgcaccgtaacacgcgcatgactcactcactctccctaaaaacggcgccgtattcgaattcatttcttgctccactagagtaaccacgcgcggtttaagtcccttcacgcgccggagaagttcgtctcttggattctccgtgcatacgctttcgtcgggaacacgataaagcttgaaagctaagttcacagccaaagtctcgtcgggatcacacccgagagattcacgattcagatcaccgagtcgtaaactcgtcaccacgttgaaacttacggagataccgagtcgatcaccgagttggctcaacaaatctccgacggcttttaacctctcttctccaccgtcatcgactaaacatccgtaaacgttgttcgccacggcggtgatcttaaccaccggagaattctgattctgacttttaccattccggcgcgtggataatgtacggagaaggttaacgtattgtccaccttctccgatatcgaaatagataacgtgcgggatcatcattacacccgcgttgttatttgcggggtccagaatggggagattcccggcctttaaaccgagtttgaaaccaggagagagctcgtagagcaattgagtcgagaataaatggtcctttccatacaaatacgtcaatggagaagctatccttgatcgaagcg

SEQ ID NO: 29085 - DNA, 3240 bp, Arabidopsis thaliana landsberg
ctcttatttctctggagctaccaagcaacttacaacacaatagtcgaagtgttaacggcaacaaatgtccttccacatatattaatataaccacgaaaatcctagcagattttcgataatatacacacaaaaaaagaataaattgctcctcaagtttatcctttccatacactgattcggagaatatatattgaatctccgcaccaacaacaacgtaccacgttagctactcgcttacttgtcacgtcaaatcagttagtcaaaagtgccatgtcagtttcagacgttatgtgcactccgcagactcctgatgtacaaattttgatacagactcctgttgacatcaaatggttgtcttcaacattagctttatgttgccgtatcttcaatatctttgattttaaataattttgcttatagctgtaaatatatttgtgtatgtgcaggtactctatggatttatttccgggacatttttatgggagtgtcatacttgtatggtaagaaatttgtagctacaccaacacctctcattttacagcttcgggaagagctttatcctcaaccttatgacaaaatcttatggagtcaagctcgcaatcagtgcgcaaaggtaaaaagttgaaaagtacatgagaccaatgaagtatcacataataataataataaatgacatgatgcaggaagatctctactattcatcctcatttttacaagatttgttttggaaaggtgttcatatcttctcagagaatatcctgaatcgatggccttgcaacaagcttatcaggcaaaaagctcttcgaaccacaatggaacttcttcattatcaagatgaagccagccgttactttaccggtggatgtgtgcctaaggtaaaatttcctcaatataccgtattagtacaaatcataactagtactataacactgttctttgatttttgatatataggcctttcatatgcttgcttgttgggtagaagaccccgacggtgattattttaagaaacatcttgctcgagtcccggattacatatggattggggaggatggtctgaaaatccaagttagtcataaactaaagagtatatatattttttactctgttttgaaaatgttgagtttttaaattagagaatgttatttggtgcagtcttttggtagccaactgtgggatacagcattctcacttcaagtcatgttagcttatcaagatgttgatgacgatgatgatgagattagatcaacgttaatcaaaggatacagtttcttgaataaatctcagcttactcaaaatcctcctggtgaccatagaaaaatgttgaaagacattgcgaaaggaggatggacattttcggaccaagaccaaggatggcctgtttcggattgtactgctgagagtttagaggttctgactccaatggttattagttctttaattaaagtaactttttacgatcaatcaactaacgttagaggattaaccgtggtttacactttggctggccagtgttgccttgtctttggaagcatgccatcggagttcattggcgagaaaatggatgtagagaggctctatgatgccgttaatttgcttctctattttcaggtaatcacctaagaattcactaataatttattactatatgatattcgaaatgatattaaattacatatctcagtataatattaaaattgctaagttgtttaaaaaaaagtttgatagtataaaatagattcaaacttttagattattagtggtgtctgcatgtttctttagcatgagaattcgactctgcctccccgtattgacaatgaacaatggaccctattgacacaataaaagagactatatatactggtgaaatttgaaaacatatatattgaaatgattaaattgtataatttttagtatcaaattaaacaataggcaatatttgaaaaaagaatgatacaaattactttaccgaccatacaccaatctaatatattttcttatatatgattattatagagtgataatggaggcatagcagcatggcaaccagttgaaggaaaagcctggttagaggtaaaactattatctagttatatatcatggacgcttttttgtgatataacgtaacaaattacttaaattaaatgcagtggcttagtccagtggagttccttgaagacacaatcgtggagtatgagtacgaacgatatacttatcaccctctcttcatcgatatttattttgtttgtttgagcataattaaagttgttaaatatcatgatttttaggtatgtagaatgtacggggtcagcgattgcagcattgactcagtttaacaaacagtttccagggtataaaaacgtagaggttaaacggtttataacaaaggctgcaaagtacattgaagacatgcaaacggtggatggttcatggtacggaaattggggagtgtgttttatatacgggaccttctttgcggtaagaggtcttgtggccgctgggaagacttacagtaactgtgaaacaaattcgtaaaacagttcgttttcttctagacacacaaaatccggagggtggctggggagagagctttctctcttgtccaagcaagaaatatacccctttgaaaggaaacagcacaaatgtggtgcaaacagcacaagcacttatggtgctaattatgggtgatcagatggagagagatcctttaccggttcatcgtgctgctcaagtgttgatcaattcacagttggataatggcgattttccacagcaggtgattttaatcctataactggttttcattattcatatataatgtgcatattattagtatttcaaacacctaacatgaccctctaaagcacaactaaagaaagaaatatatgtcaacagaattaatagttctcattactaggcagccattagtccattattaggcacatgatgaggtttaatttggcttatcatcactcaaattcaaggcatgtgtcaaaatgttgttgacaagtataaaattatagatatcataacacttaattttgtttttatatatttccaggaaataatgggaacgttcatgagaactgtgatgctccattttccgacctataggaacacgttctctctttgggctctcacacattacacacatgctctgcgacgtctcctcccttaaccatgtcacatctatcttcttcaccgttttatatatcaattctgtttttgtttttattttcc

SEQ ID NO: 29086 - DNA, 1774 bp, Arabidopsis thaliana landsberg
caaggtctttcagatacgtgtacatttcttaagagtttagctatgctagatgctattcatgattctgaaaagagtacggagaagaagaccgtgcgtgaaagaaaagctgctggtggtctcttcaattgggaggtagcatatttgttttactcgactgttttttgtagcttcagtaagcattctactgaaatgtgaaatagaacaaaattaatggcctaagttcatgcctagtaccttgcaaaaatcgacttgcaactcctccaaaaggatacttttattataaagtgtttttggaactcacagttaagatggtggcatcatttttttttcattggtgcaagcatattacataaataacaatttttgctatcaggctaatttagcctcttataactctgagataagttgttatatgttaagaaacctttgtgcttttgcaggaagaaatctttgttgccagagcacctggaaggttagatgtgatgggtggaattgctgactattcaggaagccttgtcttgcaggtcaaaattctctactattagttttgcgggtcacttgtgtctatttatctactgccaaaggaaataaatttgaataaattcaacttagtggcatttatctaagtccctttacataaaacattattttgtcttatgtgtaatgctataatgtagtaattgtaaaaataccgtaagttcctccttgcgtatcctctattttgattgatcacaacaatttcttatcgatattatcacaacttcagatgccaataagggaagcttgccatgtagctgttcaaagaaaccttcctggaaaacatagactgtggaaacatgcccaagcccgacagcaagctaagggacaagtaccaacaccagttctgcaaattgtaaggatgagtatttgagtgaagtcacattttgggattgtcctggcttaagattttgaagattttgctttgtagtcctgctgagatttccttgaatctttgtgtttaaggtctcatatggatcagagatcagcaatcgtgcccccacttttgacatggatttgtctgattttatggatggagatgaaccaatttcttatgaaaaagcaagaaagttctttgctcaggatccagcacaaaagtgagtttctcctcttttgttcaactgcttcttcagttctctccgttaacaaggtaataatatcttccaggtgggcagcatatgttgctgggacaatcttggtattgatgatagaacttggtgtgcgttttgaggatagcatcagcttgctggtgcgttttttttcatccttttgttaaaatttatcatttctgctgcagaatctctcctaatttatctttttttactttgccattttaaattttgcttgtactctctgttggtaaaaaatgtttatcctgttctttgttttgatgcacatactttagttttccatgttctaggagtgaagtcatcaaaacggtaaagaaacgtttagacatgcaattgtaggatatgaaattagcaagtttgccacccccttagggggccacaattgcgaggcctctcagttataattctgacaaactgtgatctttctgtcactagtcctttatgagtttcttaaaaatcttagacctctgtccgcatttagttcttggtactatgcatattagatgaatattagagctgactaattatttgctttgctaggtttcttctgctgtacctgaaggtaaaggtgtatcttcatctgctgctgtggaggtggcgagcatgtc

SEQ ID NO: 29087 - DNA, 2540 bp, Arabidopsis thaliana landsberg
  unsure (1)..(2540): unsure at all n locations
acaattcacgaaatgatcatacatcttatttttttggtaggtgagaatagacaattgtctctcgcaatttattaaactgcaactaaaaagaatattacaaccgaacatgacctgagaactctgcctctaacataatcgagtggactactttaggagaagagtccaatgaatgaaattaaacctaacagcactgaagaaaacacattgttatcaaaaaatttacaactatgtagatttttttggtcaactagattgttattctgttagttataaacagaatgataacaatctccctaatttgtcttaataaaaaaaaaaaaaaaaattagccatgtgttgttttcttaaacagtctgtttcttgggattaggttttgtttctttaaaaagcacaccggtcacttgagtgtctaaaaacgttataaaaaacaacaaatgtgataatcagcaaaaacagcttgaaagagaagtagacacaatcattaacattatgggtaatggcctaaacaattggaccacgtttgttgtaaaagctatcctctgcactctgcagctttctcagtcctcacttctctcacccacaaagtcacagtaaccagaaacacgttccacatcctatgaatccaatcaaacctcagccactcggagtccgccacgtggtggccatgccttggccaggaagaggccacatcaacccaatgttaaacctctgcaaaagcctcgtccggcgagacccaaacctcaccgtcacattcgtcgtcaccgaagaatggctcgggttcatcgggtccgacccgaaacctaaccggatccatttcgccactctccccaacatcattccctccgagctcgtccgagccaacgacttcatcgccttcatcgacgccgtcctcaccagattagaagagccgttcgaacagctacttgaccgtctaaactctcctcccaccgcaatcatcgccgatacttacatcatttgggcagtacgtgtaggcacaaaaaggaatattccggtggcttctttctggactacgtcagccacgattctctccctcttcattaactccgatcttctcgcaagtcacggccattttccgatcgaaccatcaggtagttacaaagttcccatttttactgatcaaaaccgtaaagttcaatactttcatccataattagtgatttctgaatccgggtttgtttccagaatcaaaactagacgagattgttgattacatccccggtttatctccgacaagactcagtgacttacagatcttacacggctatagtcatcaagtcttcaatatattcaaaaagtctttcggtgagctttataaagctaagtatcttctcttcccttctgcttatgagctcgaaccaaaagccattgactttttcacttccaagtttgatttcccggtttactccactggcccgttaatacccttggaagaactatccgttggaaatgagaatagagaacttgattacttnnnnnnnnnnnnnnnnnnnnnnnnnnnnnctgttctttacatatctcaagggagttttctttcagtctccgaagctcagatggaggagattgttgtaggagttagagaggctggagttaagttcttttgggtggctcgtgggggtgagttaaagcttaaggaggctcttgaaggtagcttgggtgttgtggtgagctggtgtgatcagctacgtgttttgtgtcatgcggctataggcgggttttggacgcattgcgggtataactcgacattggaagggatatgttcgggagtaccgttgcttacatttcctgttttttgggatcagtttctgaatgctaagatgattgttgaggagtggagagttggaatggggatcgagaggaagaagcagatggagttgttgatagtgagtgatgagatcaaggaattggtaaaaaggtttatggatggagagagtgaagaagggaaagagatgagaagaaggacttgtgatctcagtgagatatgtcgtggagcggttgcgaaaggtggttcttctgatgctaacatcgatgctttcattaaagatattactaagatcgtgtaagttctattgttgttaatgattcaagtctatattagtgtttgtataagtttgttaaagattcaaactttgtagagatttaagattgtttgtaaaactgttatttataagttcatttgttagactctttggtagagcttaatctcgtgtgtgcctaatttttgtttgactttggaaatgaattgtgaggagacaaatatagaaaataatttatgaaatgaattgattttggtaaagcttactggctgattggttacactatagctgtagattatttgctgtagaatattggatgtaagtgtaagctgtagctgtagatttgtaaagattttattcagtttgttagagaaaatactccaattctgcataaaattctaaaatctgatcttaataggaatgattttcacacataaaatgttttatctaccaatattttccatattttgcagtaatttatttttc

SEQ ID NO: 29088 - DNA, 2347 bp, Arabidopsis thaliana landsberg
gcaactttgtctatatcctatagcagagcgcagtccgtgttttctgtttatgttagattgttcttgctgtttcttttgagttattttcacattctttctcttgtttttaatatgaacctcaggataagctgtgcaaagcaaacacatggcagcgagcacaaactacaactgatgtggtttctcttctatctgagataaaaattggaactggaaaaaatgaactttggtctgggataagaactgctaatatcccagctgtgatggctgcagcagctgcagcgtcaggggcaaacttaaaagtttctgaagcctttaacttggaagtacttggtactggtgtagtcagtgcaacggtaaagtgcaaccatgctggagaaattgctggcatgcgaaggttgtacaacagtattggtggatttcaatctggctcgacacctagtggttttggtggtggccttcaaagattaatatctggagcattttcccaggcaccacaaccagaagatgattcatttaatgagatgttaattgccaggtttgtgcgtcttcttcagcaatttgtaaatactgctgaaaagggtggagaggtggagaagtcgcaattccgagaaacttgttcccaagcaactgcattacttctgtcaaacctggtaaggttttcttaccaagaacagagggggcactttttcttaccaacaactgtgaaatctaccagctattttctgctgtacattctaatctctcttattgttgcatcagggtggtgagtcgaaaacaaatgtcgaaggcttttctcaattactgcgtctcctttgttggtgtccagcatatatatctactccagacgctatggaaactggaatttttatatggacctggttggtttctgctgctcctcaactggtatctcttgtccttgccgagcttgttgatgcatggatatggacaattgatacaaaacgtggtctctttgcatctgatgtacgatactctggcccagctgcaaaattaagaccccatctttccccaggggaaccagaagatccacctgaaagtgaccctgttgaccagatagttgctcacagactgtggcttggatttttgatagatcgttttgaggttaggatttattctctactttttctaatacagagggaactcatgtgtgatttacctcattcttcttccacattggttaagacggtcttaagtgttataagtgctgagttttcttgtgatcctcctagttgaatcaattgaaagaccttaggtgacaaattgcagtctaaattaattttgcttcacttgaaaaatttgcttactgatcatcaaggaagcagataaatttgagtgagtttcttattgccactatgcttttttaggttgttcgacataatagtgcggagcaactgttgctgctaggtcggatgttacaacggagtacagaccttgaatggtgctttactcgccaccctgcagctgctggtacctttttttctttgatgctccttggactgaaattctgctcatgccaaacacaaggcaacatgcagaaatttcgatctggactccagcttttagaagatcgaatctataggtattttttttgcggatttcctttgttttttcttgcactatacattttgttacgctttctttatggacatctctcagcctgtctctatgatttggcggcacgcgtctgactaattttcttttcgtccatttatttactatgttctaaatattaatgttcatgtgatctcttagtgttttgtcggatgtaggatttaacataaattgcctttgcacaacacattgaactgcctggactagtatctgctatgatagtagctatttcatatgcggagaacaatttaagctttatgtcatcttagccatccaacatggcattttcggtgttttcaaaatacttaaataatagctatttcaattttattatctctgatttacctttgttttattttttgtgcacatcaacttatcccaggacgtctttaggctggtttgctcatcagccagagtggtatgatgtaaatattccaaatttttgtcatagcgaggctctatctgtttcagtttttgttcactttttatcaaacgagctatcagaatcaagtcaatctgattccaaaggaaaacctcgtgaaagtgggaatttgattgatgtggtaagacaacgatctgcgatttttttctactttcacctgtaaatttgactacaaacaatgatatttctttgggctggatgtttacagactgatcagtatcatcccgtctggggtgagatggacaactacactctgggaaaagaaaaaaggaagct

SEQ ID NO: 29089 - DNA, 3042 bp, Arabidopsis thaliana landsberg
aaaggattcgatttgtacttaagaaatcacaacaagaagaatcaattttgcccagaaatgagaaataatcaaaagcctttagcaccagattctttcaaaacagcaggttgatcagccatagataaacagtacttagcaatctctctgaacttagggacacttctcaaatccactttagttccatctttcaaagtaatgatgatatctccccattctccgatgaacctcggcacaacttgaacgtcttttatcactttgtacgagaaatcgctccgatcatctccggtgagtcccgaaataaccgtcacgcggaggttagtgaacctgtaacgaaggttaaaagctcgagacactgcagctaaggttagtgggagccaaaggatggttagacctagaatgagattggctaatagatctccgtaatgagctccgccgtcgaagtagactgtttctttcttcgccggtttggaatcggaaggaacggtggatgcggatgcggaggaggaagctaggagcaatctttgaatgtgtctttgtggtagtttcgtggagggagacaatgaagaagcggggaaggagaaggtggttgagaggaggagagatttgcgaacgacggaggttacggcggttgacggcggaattgaggaagaagctgccatgagagaatgatttgagtgactggaagatttggagtgaaaagatgatgacttctctgttttttggatttgattttttggcgcaaattgtgccacgtggcctaagctctatggatacaacatctatccaaatattgaatcaatatcaaccatagaatgatataaatcagaaattatataagaaaaaagattatgctactaatgaagagttaagatgtaggtaatgtaaccaaactctatatcagcatcatcatgtgagagtatactttgatagatttctatatggtattcgttttgataaaatttggtcttatcacacttcatgagccagttattcatgatcagctttgcatcatatatattcacagacgaatacggttctgaatcgggccattggtctattcactgccttgagccgcgggtaccgagatcagatgcggctttagcagctctctctaatgcaccagacagccaaagagctccgctggagaagtaactgctattgacaacactagttgcagctgctgccgcggttcttcctgtggcaaagacagctgatttagctgtatctgaaacatgatacctttggtcagtcattctaacagcttcaagtccggtaaagattttgtcagtaagaccaatcctctgttctagttgagatactctagccaccgctgcagctgatacgccgtgggattcatcaaaggctttagctttgcttaaagcgtctttgcctagcacgaatcctgtggcaagcattattttcaccacttcttgagcttttgtcactgcttctccagcgttgaactcgcttcgttgagcataatgctacatgattgaagaacgaataagctttagaattgagaccaagcatcaaacttcaacataaagactactgaaccagtgaccgttagatttaactattttaacaaaaaaagaagacagaaagatcaaaagtgagagaagtgtcaaaagcgatacatacttgtgagtccgattcatcttcaaaacctcgcgaagtcgcattccagaaatcgaactcttcgtgatgttgtccccaacgagttatacaaacacgctgatccaatatcgttgcgccctgaagatatcaaagaagtgagtgatttctcaagagacatccaaaaaagatagaaagagtgaatcaaatccaaactaacacttacagtgagtaaaacagcagtttcttgagaataagaatccttaaacatcacataagcagtacaagcttgctcacccgacctagtctcattaacaacattacaaagtgtactcttttgaatccagaataagcaaacaaacaacaaacttgctaaaaagtaaaaagactcacctgacaatatcaatatcttggatagtaccagagaaagagaagaaatcgataagatcattatgagtaacagatggagataacccagtaacttcaacaccatatccaaattggatgatccatctctgctcaataagctaaaaacaaaacaaaaaacctaaaaatttcaacatatcctaagtcaataaattaaattacttccagttcgtgattcaactttgggaactacatagaactttccgatttagctttacatgatttgggattgaaattttcaagcgaaatttgagcaaggacagattgccaaatatgttcagacctaaatcgttgattcactaagctctagagaagaaatttaaggaatcgaagaatagaagttacctgttgtagttgttgttgaccaacggagatcacacacagagaagcttgaaagagagacaaaggtgatgaattgatgaagttgatgatgtgagtgagaaagagaaggactaccttttcagtgaacgaaaaagacgcaattttaaaaagctaaaaactgcgccgtttagtaactcaatgttgggcctttaatgtcttgagttagcccatatcgttaacggttctaaatgtaataaaaaattctacatgaaaggcccaatgttgtttcattattttccagtctcaaacaacccataatcacaaatattttttgaaacataaattttcatcttatgctattttttattttaaaaatcagtctttacatattaaaattaaatcattaatcattactaagtgtttgtacaagaagcaaaaattaacaatctatagacgattttgtttttttcagcaacgattttaacattctagaaccttttttataccttagtattgcatgtatatataaaaattggagtaattttagatgttatctgtctaaccgtccaaagtccaaacaggtaaaagttctctaagtgataactttttaaaatctctaaagagacaaatttgacaagtgtatgtgatataaatacttatgttactgttaatacatgagag

SEQ ID NO: 29090 - DNA, 1581 bp, Arabidopsis thaliana landsberg
ttatataaaccgtgtcagacagaaagtatgataaaataatatatagaccgaagaaccataaaagtttttttttctttttaaaatgaaatgaaccaaaaaagagagagagaatttggaagtctatttttgtgctgaaaactcacttcttaagcgtatgaacagaatacttaatatatacctttcgcattacatgaacgcccacaaagtaagaagagtcaaactacttgtaaaccaacaaaaccaaacttttaatacctctttgacccatgcatccataaatacatatgtataccagtttatatgcatgtatacatggtgtgagatgcaaacgaatgttcatgaaactaaaaggttaagacattacactatacaaacaaaaaattcttttggtcggagaaggagacttctccttttctctgtctctagctagagcctttggttctgcatctaacctcaccgcaacctctctcgatactcaaggtaataaaaaatcttagagatatatcattactgtttgatctatttgtatatctatataaaatagagtacattttcttgcaatattttaaaatttgcatcgaaaaaaaaacaaacaacaacgaatgttgtaggggagctagagcagaagtttaagaatgggaaggcgaatgtagaagagctggaaagactcgggtgcagcgtggtctatggagttaacgtgcactccatgatcacaaaacctagcgttggtggttctgcgatatatgacagagtcatcttcaattttcctacgcatggttcgactatggtcgtgagcacgaaatcaaaaccatcatgtatgattttaaattatatacacaacttgtctccccctatgcacataatttaaaacaatactttttcggcttgtttcatccacgtacgctatgtgattttaggagacatcaagagcttgtacgagggtttatgaagagtgcaagagtgttggtgaaagatgaagacaagggaggagagattcatgtgattcataagacagaatatccatttagcgagtggaagctcaagactttgggtgagaaagaaggtttagatttgatccgtgaggtcgagttttgcttaagtcattatcctggttatttcaacaagagaggaagtggaggttatagtgactctagcttccctgttgggaaatcttctactttcatgtttacgaaacagttcttttattaacttgtatttacttatcacttttgcccagataaaacttatcactatgatgataataattatagtgtttgatttagtcatttgtattaatttttctttaccaagagatttcagctacagtttttcttctttgaattcagacctcataacataatagttaggtaagattgaaaattcaatttacaacttacaacatacatcatgaaatcctaattatgaatgaaactcgactatatattcgtatttttaaggatttgtgaatacaatgtgtttgtttagtgatgataattacaaaaataccaacacaaaaaatattttacagacaccacaaatatcagtcacaaacaaaaccttcatgatttatcatttatcaat

SEQ ID NO: 29091 - DNA, 1232 bp, Arabidopsis thaliana landsberg
tcgcccaatgagtgtttgagcctttaaaattcgaaaactgcttttgatttggtgcagtatatgttagttattcagcttccatctaatctcctccatacacattataatttaagttgctctgagttttatttgattcttactgaagattggtccagaaactttcctagtacaatgaactcttgtttcaaaacaaaaaaaaacactgtttcattgtgtggcgatgtagaattagatcgatacaatacaagactagtaagtaaatactttggttggtctacgttacctaataatacagagcagatacagggtaatctcaagcaaaacatgatacaactctaaagcttttggaaaaacaagattaaaaaaagaagctaagcattgatgtggcttgaaggagtttcagagtgttgtgagaagatagaagttctgcaagtgggacaggaggagcgagtagagagccatttgtggatacacttaacatggaaaccatgctgacatttctccagcacttgaatgctttctccttgttcaaattccgacaagcaaatggcacactctgcttcagctcctgcgagttcaaggtcggaggagtagacaagtgtaggagttgttggagtggatgaagcagctgcttcagggtcaggcttgtggtcgtcttcagtctcgagggttggtcggagaaagcaacgaattgcagcgtaaagagagagagcacaaatgagagcagagatgacaaggatgagaaggactgatgcattagctgtgaagtcagtagagtttgagtaaggcttccatctgcaagtatgagagttacatgttggagttgcagcagaggacaatggtgaagctgcttctgctactagcaaacgcatcttttaatggtttgagagagagcctcgtgagaagagaccttatagaggagaggagtgtagggacaatagtggcgcttccagtggagtcttgaagctgtgagagagtttgaaggattaggatggtttcgtctctattttgaggactgtaacactcgcttctctctcttttggtccacttcacattaatggatattattgtgatggatgagggattgctttctttgtcttgtggcttatcatcatccacatgtttgccacaagtcgtcctcacactacgttgcctacattctaggcaaattgctctttttttaattcgttttcaaaattgaatttgtcaatatatggatttagatataaaaa

SEQ ID NO: 29092 - DNA, 1320 bp, Arabidopsis thaliana landsberg
aaaaagaaacccttcacaaacgtgaaaggccaaagaattggggaaaaagtaggaaaattgtcaacttaggatacttcatttgctcaaaagatgataaagtacacaaagtaaggtctgtggctaaaataataaagcatcagaacaagggatagaagtcacttcataaagatgatgcattcacaaaatttcggtctctgcctaatatcataaagcatcataacaaggaatagaagtcgctacatcatctggattcgtctaactaactaagtcttttgtcttgtgatgtaacagtttgtttcgccacttgctcagatctactgatacttcttcaagatcacacattctggatcttgatcaagatagacttcccctgcacaatgcacacaagtcattgatgaataacagtcgcaaacatctaaattgccaaaagactaagacttcataagtggagagaaacactattcataaagaacagtttgaagaaacacttgaagtctgagatagaagagtaaagttatgtgcatacaaacctcagcatctaccaaatatctcttctggtggatcataagcatgtttctcagggaacaactctttgaaatccttcttcactttgtttctaagaagcggatgcggcagaagccccttcaacaaaaccctaaacggcaactcttccggcggatctggagatttcaacatgtcttcatacacattcatagcatcagctggacatccgtctcgaagaaatcctctgataacctcagtataagtctgagaatcaggaaagaggttttctttcttcattttctcccacaacgccattgcttcatccattcttttactctttgctaaggatactataaggtccttgtacataaacacatcaggttggtaccattcttgtttctggatcacctcaaacatctataagttgaagaaaccaatcatcaacaacacaacaaaaacgacacaaaaccataagaatatacgtatatgatctataaaggatggtctaaaacttaaacaatataactaccctaatgttagctccgttcaggcatttcgtcgaacacttcatgagcacatgagatcaaactaaagataagctgaagcgagacataagctgaaagacccagaagaaattgtcacgtaaagaacgcaccttgatggctaacgcagtctcttcttgtcgttcaagctcaccgataacagctaacatgtctaatttcaacaatctgaaaacatgggtttttataaacttgtccagcttctcgtcgtcttctttcaatctcttgagacccagaatcacgaaaagggcttctt

SEQ ID NO: 29093 - DNA, 2456 bp, Arabidopsis thaliana landsberg
aaaaggccccaaagaaacctataaggagagcatacatatagctgccgtttacaacatttcttgtgaaaaaaatgtatcatctacacatttcgaatggtgtttgtacctgtgcgtttcccacgtccatggaacgtagctattggtacaagatccacggaatctccaatgctgcagcatatataccctagagttagttagtaaaggactctactatcttaacttttaaattttttttgtttaaaagagtattattgcttgtccatatagtccttcttcagttttagccaattatttgatctctttgcaggctcataggttgcatttgagtacaatgactttatcattaaaccttcacatctgccaaaataacatacttgtgatgaagaattgaaacatcatagagattatgaggcagtgtcatatgaatatttaccctatgtcaatagaagctttaagaaactcttgtaattcaccaatatcgttggatgttagagcagttgcaaactggaaatacccaagatcttcctcaaatgaatagtgtagcttctggcagaagcaaggtgcaaacaaatgattacatatttgcacaacactagttgcttcactgataaaccattttacgatttactaatatatggcttacctctcggcgaatgttcagattctcatggataagtagttggccatttaggtataatatatcaaaagcaaagacgcatacgccaaccttgatatcactgacattcacatttttatgggctcgtgtactctaagtctgagaaaagaaaacaaagaaaacaagctaagacatataaaaacctaaactatcagtaactgtaacaagttatctttaaactaatgttggcaaaaaaaattgttgtcaaatcaccaaaatctggtctagtagagcttaagcttaatttgatcattcattggctaacaagaagaaaaacaagaatgttcatatttgcaaccataaagcctggctattgaggtacctggagtggaagaattttctctttttctctgttgaaggtgacaacctcgcaatccagaataaaagatttcacagtgggcttctttaacctgtatagagaagatatttacactaacttcattagaaatatgggctcattctaattttttcaacaagtaacaacacaacaaacaagtgcaccttgataacacaagagcaacatcagggtacttgccagtgtttctttcagcatgtctactgaatatctcgactgtaccatcctccatataatatatctgcgagaatagattgatgaaaagccaaacgtagcagcacatataaataactttgctttacgaataatagcattcatcggataagagtagaaagcaatggatcacctgtgcacgttcaccatcatatttgtattcagctgtgaaaacagtgtccttgaatttctcaagtatgagatctactcttgtagttgcttttgcaagcatgggcctaactggaacaccgagtgtgaggttacaagttttaggaagattccatacaccactagttagaagagcaccaacaataatgtcatagacaggaagcattgagaatacttctttaacaatcgttgcagcctacaaggacagacaacaaggtaagttgtgacgtctctaaaggaatactgcaaatagagcctaaagccacaagtaacatccttgagaagcaaacctcatctaaaggattcttgatatttgggggcggcttagaatgctcttcgttatatacagcagcctgtcccaaggcagctaaaacagtttgacgtgagaaccctaaccgcaaattatcctgcattgtaacggaataaggaacacaaaggaatgagcagattttttttttttgtaacaattgatctaacatacctgaagtaaacgagttaagtaaagaggttcacaatctgtagttgccacaagaagtgccttcattagatccttcttcttatccttactaccttttccagattcctaacacataacatagtccaacaactaatcaaaaagaaagaaaatttaaagcaaacacaagaaagtgtctaagagaatcaccaaccccactcctctaaactctattatagagcaaatttctctccaacctacttttgtatctcactctaaaataaagtaaaagagaggattgctctatattcagagcaactatttttactacgctctattttagagtaaaaaaaatagagatagatggtctaaaataccttagcaattaggcgaagtgtatcagcaaccttgacaacagttaatggtttgggcatgaaaatcatagtctgagaggaacggctcccatttgctacaagccccaagtctcccagttgcgtatattgctgctccccgtccgactcagttctaccaaaagcttcagaaaaagcaataataatgtaggaacccttacccattcccaatttaatacc

SEQ ID NO: 29094 - DNA, 1260 bp, Arabidopsis thaliana landsberg
aattttaaaaaccattcgtacaagttgaaaatcattcaatttatttctctaccaaaaggttaaacaatttttctttataacttttttggttgaatggatgaaattagtttttagcttatttatctcaaatagtaaaaaaaaataagatgaatgatcatttaactttttataacctcttattttcaaaccacatttgcacccatagtctaaaaatagaaatttgttgaccaagaagaattatgactaaaacacatttaatcatgactaaaatttggtatcaaatgaatattttttgtggctcaaacttttattctccctttaagtagctgaaaaattaacgttggaaaagtggggtctactgacctttacggccattcatttacgcttcaatggttttctaatcacatccttaatcttacaatttgtttgataataaatctattaattaaatttggcgtcacaaatcacaatgcactgacgcccattagcatgttagtgacaatgtaaccaaactgattcatcacatttcaaactgaactcattccggttgactaatcggttcggttttaactcgccaactattcttatcaggccaggcccaaacattccttcacaaagccctgccaatttgattaatttttgtggcacgtgattttagttttgtgttaggtctcaccaagattattgatcacgttccataattcaaaactttgcattatataccaaaaatccaatccgtattgacacttcaattgtaaagtttttttcccaaatagtacttttttttttgtttggccttcttatagaaagaagaactcaaagcacagagagaagatgagcgaagaacaaccacacgccaatctagcggttcccgcgtttaaaactgagaaagatcccgtaacgcaaaccgcaaatggtcaaaggtagcgtttggcggttcggtgggaagtgataaggcagcgaaagcatccaccgtaacgcttagaggtgtcatctacatgctcttcgacaactgcagcaaagacgtcaataagaccattttacccctcggccacggtgacccttccgtctacccttgcttccgcgcctgtatcgaagctgaagacgccgtcgtcgacgtccttcgctccggcaaaggcaattcttacggtcccggagctgggattctccccgcaagacggtaactttctcactcaattctcgatcttccactctaatcgaacgattctcgatctgggttcttcgaatgtcatcgtaatc

SEQ ID NO: 29095 - DNA, 1536 bp, Arabidopsis thaliana landsberg
cagatcttggtcatatagtccagaagactcatgtgtaacctgtatgtagtcatgtcattgaatagatacacaacacgtgttttgtttcaacctaggatcaatcagttactaaaagtagaaatgagcacgatgcttaaaaacctttatacataagattcctaaaaagtgttaagatcagcgaaatgagaaagacaggattgaaaaagtttcctttattcttctctgtaaatctacaaatgaaaacaagtaaactaatgaacccaggagcaaccggatacaaagaactaaagtgagagttatgctatcttatagagtacccaaacctatcccaaagtctgaaaggcttaccacaaacaacccaaatgaccaaaactctccgcaattatgactaactcactcctatagtcatattatacttttttcgtttatgcttatcacaatgacttatagactgaggcattttcttctatgttagtgacaagcagtaaatagtgtgtagtgtatgtcaatatgcttgtaagacgatattattcagatatgttatcaataaatcttgatgcaggccagcaaaagcaatcaaaacagtaagtattagaagacaagtttagttaaagtataagctacgagtgatagataataccttgtgaccgtaaaaatgtccagctgggtcacatttgtaaagtaagggaccattctcttcatcaacacccattaccatagcgacttcataaagagagacaacaagaaaattccttttgtcagccaataatattcatcaaaacgtgaaggtgatataatacgcatcaaacacaagtaggcactaatgtctagattggtcttaagaaaagaaaaagatagcaaacttgccaactccaaggggtctcatgtaagcatgttgagtgtagacctgtgacttgtccgctatcctgtaagtaaaatagttatttatcagcaacaccatttatcacagaagagctagatagatcaataactataagccagcctccactaagaagttaaagaaccatctgaaaaaagagacaccaagtcgattagcaacgataccatttagcaagaatgtcaacaggcatctcatatccataagtgaaccgaaattcagctgcttgattccttgcttgttgaaccaaagaccttgcatcagctgaaaacgaaattcacatgttcaaattaccatccatagcaataaattctacagcttaagaggagataaaagggtcatgaaacgaacctgtaatgccagtagctaccaatccaatgtacttggtgatagggaacagatgtgtaacactagactgatccaaaagcttgtcctgtcccaacccaaaaacaaaaaccctaatgggtaagatacaccaacaatcctcaatctactagaaacctaaatccatacaatggttcaataaaagacgcaacttttttgcaaaccctaaaaaaaacgagagacaatgaaaagagagattcactcacaggaactttcttctgggtaacgacgcaaaccgaatctttcccacaact

SEQ ID NO: 29096 - DNA, 2391 bp, Arabidopsis thaliana landsberg
ctaccactgacattctttcgggagcgtgtgtgtatgtgtagacggctgggtttggtcttcatcagaggtacaaatctcagtttctgaaggttgtgaatgttgtgagagagcatttcttgcagaaattgcgggcgaagaaggacacgtcggatctacttgtgatcatagccgaaatcacagcgtacttagatgaccggatgtatctcaaggaacctgaaggaagagctatgaagacgactagtaccttgtcctctgaacttactgctgaattaaatcagccgaactacaatcagaattaccagaggaatgattacagaaactactattgatttgatgttgtaacatttcgtcggatagaaaaacccatctcaattttcatcaatgttgtaacactatagttgtctcacaagaagcattcttttgcttttatttcaattcttgtttcatttttaatcatttctttgtttgataatgttaactaatcctacctgttatttaatttaagcatatgataattggtgtctgttaaataccttttctattcacggtaacgtgggcggccaacccaaatatagtaatgcgttttgcggatctaattaattaatttgtcttttatcctaactagttctaattaaataatttaattctcataatttaattgtttaaaaacacttgtgtttagttgtttaaaaaacaaaaacttgtgttgatatcactattcagattatgccttacaaccatatcaagataaacaagctggaaacaaatacataatcttatggactaattgtttcatgatcgtcgtttcaatgatgaacaagtggaacaagctcaagggttgtcttcttgctaataatgattgatcctgtttcttccaagttgatgtccttcacattcttccctacaggcactacccaatcgaagaagtaaagcaaattcaacagtcccaattccacggtggtgattcccagcgtcatcccgggacagattctccggccagaaccaaatggtaacagctcaaagtttagtcctctgtaatctatggagctgtcaagaaacctgtcagggttaaactcatcagggtttgtccatagttttggatcacgtgcgatcgagtagatgttgatcatcatctgtgttttcacaggaatatcgtagccttgaatcttgacatgagacattgtctgtcttgggagcaaaagtggagttgttggatgtaaccttaatatctccttgaccacaagcttgaagtagtgaacttggcttagatcttcttctttgattctctacttcttgtccccaagtgttgtccgaatctcgtcatgcactttcttcatcactctcgggtttctgatcagctcggccattccccatagagttatgccagcgactccaccaatccctgctacaaatatgtcctgacataaacacaaagtcacaaatatattggtatgttgttgcaagattttttaaccactgtggaatatatataacttgaaaaagactaaaggcttaccgagatcattcctttgagatgatcagtggtgaacttgagagcatctccatcgttctcttgcttcttcttcatatcgatcatcaagtcaacaatagtagagctctctcttccaggcttaagatgctcgttaagaacattctgaaagaaagtgtctactaccgagaaattattcttcaatctcctgttctgaccggagatacagtcgatgaacctaccgattcttccgggaaagaaatcagagaacacagtttctcttatgaccgcttcagcctttagcacaagatccacgactctatcagcttcaaagaaatcacactcatagagatttatcccgtacccgatacgacacactatatttccgactaaagtgaaaatggctctctcaagattcaccggagattgtctcgtagcaaactcagagagtttcttgacacacaagttattctcttcctctatgatatacttgaaagattgaagctttttcacgctgaagagctcgaccaccgagagcttccgcatcagactccactcgtcaccgaagggtgccatcccgatgtctttgaagttgtaaaaagttgctctcatcccggccgcctctggtctactacaacactcaagatcgttgatctttagaacttcctctgctgcttctttcgaagagatcgcgaccacggggacgaatccgtattggagaagcgccactggtccatacatttcggcgagattacggcgattcctcggatgtagtgtccggcgttggtgtaagtttccgatgatgggaagcttctttggacccggaggaagcttatacttcgaaggtttgaaaacgttcaagaagattaagattaggggtaagaggacgaggaaatagagaa

SEQ ID NO: 29097 - DNA, 1508 bp, Arabidopsis thaliana landsberg
aaaaaagccactcttgtgttgacaaaaatatatcaatcctctcttgtataaattggtactatttcccagttttagattgaataaaacattttgtatgtaaaaatggataaataggttactaactgccagttgattcttctgctcactgtaaagtttattcgtttttaggtcaaacgaatggttttcagtttctagctacaagctgattcaccatttatatgcttgagtatttgaatgtatataatccataaaataactcaagccgatacacatgtaagcaaagttgattatttttaacgtcatggaaccagagaaaaccttaaacgtgatcaatattaaagatcctaaaggaaaaaagaaaaagggacttgactagattggtgcgagaattacaagtcaaaattggaacagaattcatacaaagtcctttgtgtttgcctcctccaagagatcaggccaaatctttattggatttgggctaaacttggaacataattcataagaactgagcatgatgatcttaacgcagaatctctaccatgatcatccaaatcttgtatgtgataaatttctcccacaatgtgtaagactttttgggagatccaacacactaaagatttgttttgctcgtcgaccaagaaactcatcccataatcaaacatatccactctcggcttaatgatttgtattgttaagaacttgctccatgacacgactgatccgagactagttgtcacccatacatttaagtcttctgaagttgttgaccaattataataaccaaacagacagagttgctcttctctaaccactgataaatccgtaaccagataagaaaacggctgaggaagagacagactttgaaatctctcggttgaaaaatcaaaacttaggaagtatttatatggaaaatacctattacgaacaacccaataagtacttcctttcacagacacgggatgcttttgtcttatagacagttcggtagtcgcaccatgaaccctccaagaatcattggtgaagtcatagatttcgtactcaatcttgaagtcaccttgaacatggacttgactaatcaccctcaagactttgtatttcttgcaggaggatttgttgtcataaccaagagcataaaagtctgattccttgtagtagctgtgtctaggtttaattaacttggcttctcctgaacatggattccaaacctcgagtgtattctccttaatggagcagagcaataacaagccatcacagtgaaagacgttagaaatgtgcggatctttaaggtacaatcgagatcctaactcaaaagattgagcaacgttgttgtgaactccatggagattgacacttgctaagtaaaccctagaatccttcaacatgataatcagaggctcctttgttgcattagcagagtgcttcttagcaaaactcccagaattcgatagagcgttccattgtttcgatgttgatcgcaatcgtgccaaatatttagccggaaccctctg

SEQ ID NO: 29098 - DNA, 5030 bp, Arabidopsis thaliana landsberg
tctttttgatcactggttttttttatttaatagagaggagttatcagagagacgtcagagaacgtccctgcgattgcttgcagcgggaagtttctttctctctagctccggatttgctttggtatgttactacttcacaatcttcaactccattgattgtatccttgattgcgatttgctcctactatgtaatcgttctcttgtctcagatctaaatttaagctcatctttgaattttagtctgggactgagattctctctatagattcgtcgatccagtcttattcctttgtaatttgtttgagatgatgatgattatgttgctacagttttataattgagtatcttagagttaagtttttctaatttctcagctattcagaggatctaattttttaataatttgcagtcgaaaaccgtaagctttggcgagtttccgggagaatttgacgaatctgttttgcaacgagtgagaattcatggggaaaggatcagaagaccttgtgaagaaggaaagcttaaattctacacctgtaaattcggatacgtttcctgcttgggctaaagatgtcgcggaatgtgaagaacatttcgttgttagtcgtgagaaaggtttgagtagtgatgaggtgttgaagcggcatcagatctatggtttgaatgagttagagaagcctgagggtacttctatttttaagctgattttggagcagtttaatgatacattggttcgtattcttttggcggctgctgttatttcctttgtcttggccttctttgatggcgacgaaggtggtgagatgggtatcactgcatttgttgagccgcttgttatttttctcatcttaattgttaatgccattgttggcatctggcaagaaactaatgctgagaaggcgttggaagctttgaaagagattcagtctcagcaagcaactgtcatgcgtgatgggactaaggtttccagtttgcctgcaaaggagcttgttcctggtgatattgtggaactgagggttggtgataaggtacctgctgatatgcgtgtggttgctttgatcagttcaactttgagagtcgagcaggggtccttaacaggagagagtgaggcagtgagcaaaaccaccaagcacgtggatgagaatgctgatattcaaggaaagaaatgcatggtgtttgcaggaaccactgtcgtgaatgggaactgcatatgtttagttacagatactgggatgaatactgagattggaagggttcactcacagatccaggaagctgcacaacacgaggaagatacccctctgaagaaaaaacttaacgagtttggggaagttctgactatgatcattgggttaatttgtgcgttagtgtggctcatcaatgtcaaatactttctgtcatgggagtatgttgatggctggcccagaaactttaagttctccttcgagaagtgcacatattactttgagattgctgttgcactggcggttgctgcaattcctgaaggtctgccagcagttattaccacatgtttggctcttggcacacggaagatggctcagaagaatgctctggttaggaagctacccagtgtggagactcttggatgcaccaccgtgatatgctctgacaaaactggaactctcacaaccaatcagatggctgtttctaagctcgttgctatgggttcgaggatcggtactcttcgatctttcaatgttgaggggacctcgtttgatcctcgagatggaaagattgaagattggccaatgggtcggatggatgcaaatcttcagatgattgcaaaaattgctgccatttgcaacgatgctaatgttgagaaatctgatcagcaatttgtgtctaggggcatgcctactgaggcagctttgaaggtaaagcggtctactacactagcttgcacatttcttttcttaactaaattgacttagaaaactctgttcgttgtccttgattgatttctttttctattggtgtgtgtgtttatttgaacaggttttggttgagaaaatgggatttcccgaaggattgaatgaagcttcatccgatggcaatgtcttacgttcgtattctgcactatatctgttacttatgtttatacagttttacagatgctaacctcctgcacttttccttttttaacattattgaaggttgttgtcggctatggagtgaactagaacaacggattgccacccttgagtttgaccgtgaccggaaatcaatgggagttatggtggattccagctcaggaaacaaactgctactggtcaaggtctgtttgtcatcattgatcatatcctgactcctggggtcgaacgtgggaaatcaagtggcttctgctttggttcttgcatgttattagtcgataaaaccattgtcccctctttttcagcacctaagagaccaattttgaaattatgcagggtgcggtagaaaatgtattggaaaggagtacacatattcagctacttgatggttcaaaacgagagcttgaccaatactcaagggatctgattttacaaagcctacgtgatatgtccttgagtgcattaagatgtctcggatttgcttactcagatgttccatcagattttgccacttatgatggcagtgaagaccatcctgctcaccagcaacttctcaacccatccaattattcatcaattgagtccaatctaatattcgttggatttgttggtttaagggtgagttactgtgatattgttttggttctttctagttcctcattaataaatattgatgctcgacctttttaatgattgaaggatcctccaaggaaagaggtgcgtcaagccattgcagattgcagaacagcaggtattcgggtcatggtcattactggagacaacaagagcacagcggaagcgatctgccgtgaaattggcgtatttgaagcagatgaagatatctcctcaagaagcttgacgggaaaagaatttatggatgttcaagatcagaagaatcatctacgacagactggagggctcctgttctcaagggctgaaccaaaacacaaacaagagattgtcaggttactgaaagaagatggagaagtggttgccatgactggagacggagtcaatgatgctcctgctctgaagttggctgatattggtgtggctatgggcatttccggcacagaggtactgtttctcttctctcatcttcaattccggatgatgatagctctatcagctttctaaagctctgggcattttgcaggtagcaaaggaggcatctgacatggttttggcagatgataatttcagcaccattgttgcagctgtaggtgaaggcaggtccatctataacaacatgaaggccttcatcaggtgagtcttctactatcacatatatatatatgcctattcgtattgatggcttgagttatacatactaagcctatatatatgactatgatgaataaaaggtacatgatctcttccaacatcggcgaggttgcatcgatatttttgacagctgctcttggaatcccagaaggcatgatcccggttcagcttctgtgggtaaatctcgtaacagacggtcctccagctactgctttggggttcaacccccctgacaaagatattatgaaaaagcctcctcgtaggagcgatgactcgcttatcactgcctggatcctcttccgctatatggtatgcaaaaatcgatttgtctctctctctctcttgttcatcgtatggggcatttctgactattatggatacctacctacaggtgattggtctgtacgtgggagtagcaacggtgggagtattcatcatatggtacacacacagtagcttcatgggcatagacttgagccaagacggtcacagccttgtgagctattcacagctcgcacattggggccaatgctcttcatgggaaggcttcaaagtatctcctttcacagcaggctctcagactttctcgttcgactcaaacccttgcgactatttccagcaggggaaaatcaaggcgtccacactctccctctcggtgttggtggccattgaaatgttcaactccctgaacgcactctcagaagacggcagcctggtaacgatgccgccgtgggtgaacccgtggttactcctggctatggctgtctcattcgggctccactttgtgatactgtacgtgccattcctggctcaggtatttgggatagtgccactgagcttgaacgagtggctgctggtactggctgtttcgcttccagtgattcttatagacgaagtgctcaagtttgtaggaaggtgtacgagtggctaccgctactcacctcgcactctttccacgaagcaaaaggaggagtaagaaataaatcaaaagcattatattattagactcttagttttagctgaaattagcgttgttacttacctcggcgttggttatttaattttctaaaacgataatttttggtttgataaaaatgttctaacttgcttctcatttggttcacggacaaagagcctgaaatagatgaatgtttcaacaaagcccttcatttttatgcttcctaagttatgtgctagatagatctctctttctgcaatattgactgcttccaaatcaatataattcatggttgaaatattgatgaatgtttcacccaagccttcattgttgttatgcgtttttactagtgaactataatcgtatatactccactttgtttttttgttgggtgatttgattttgtgtactcagatcagagtaaagatacattctccttcacgtgagacagagtaatctagttgttttctgtttagttccccttcctgcaatattgactgcttccatagctcccagtccatagactatagcagtcggactcatagcaggattcccctgttatttatcaattatcattaattgcttagttgattgaatcctgatcttacgagaaccattgagatagggtgaaatgtagctccgtttctcgattcacatgaatcttccagaagctttggatt

SEQ ID NO: 29099 - DNA, 1622 bp, Arabidopsis thaliana landsberg
  unsure (1)..(1622): unsure at all n locations
tctgacagcaacataagttattttttaagataattgttttgtaggcttaaccctgtgacaggtattgatctttctctaagtggaacttccacattcttgaggcacctttggatatcgctgtctgtcagaacaatagtcataatccaggtacgtcttccttgcgtttaggtacagtgtcttctctttagagcttagctgtttgcgattccaccagaacttaggatcagtgcatttatctattcccatgaactcagtcttacacccttcaatctttgatgcctggaacnnnnnnnnnnnnnnnnnnnnnnnnnnntcaattatcgatccgttttgcacacttcccattaggaacattgtctgcaccgatgggtagtaaacatctggattcttgctgtacaccctgatcggtgtatcgtcaacataaaacctgaaaatgtggaaatacattttctttttgttactgatgttaatcaatggatgatctgataaaaagtgttatatgatactcacacaagttgattagggttccaaagaaaactgtaggaatggtaatcttttgttggatcaaaccagagacgaaacctctgatctttgcctccttcaccgtacagatacatattcgtattcagcaaatacggtggcccattctttcccaagatctggaaacagagctcatcatggcggcttgaacgggagattaactgccgtatagcagaaaaacagatttcaaaaagctattcaggtacgtaatctcatcatctttatttttagacaaacttaagtttactggtcattcacgtacatagaaggaagtaatgactcccgtagacgtagtttgaggtgccttgattcttacgttgaagtatcctgatccgtaaatcaattgggattcaaacccggaccctgtaaggaacatagaccaatcacaatcatcgactagacacaaacacacagacacatgtagacagagagaaagagagatagaaaaccagagtttttatcgagggtgagctggagctcagaggttttattaataaccaaagcttgatgtccccatgtctggtagtaattgttaccccatgtcacgaatccagtagtctcttcttggccttgagccgcagctacaactgctacaaccaccataaccatcagtagaatcttctgatcagatcctctcatcttgatctctctatctctatctctcgttgcttctccctcactttacttaatcacattagaacacgactctcttgggctatgttatataggcttagagcagccacgtacgttacgttgtattttttcaccaaatagtctatattcactgcatcatcctaaaatcctattcaattaattaaaaagttttgagtttaatccatctaaattttgagattaagtttgtttttagtgtagtgaaagctgtttccaactcgtttcaacgcatcaaatattgcagctcaaaaagctttactatttttcacgatttcaatacttttgtttgttagcttacaaagttttccatacaaagtaaactctaaaaaggggaagtataaagtcattaggttcagatgttccaaacttttattctgcttatcattgataatgtgtttgaattcctagtt

SEQ ID NO: 29100 - DNA, 5185 bp, Arabidopsis thaliana landsberg
tctttaattataaacgcaaaacacatcaatttgtgtttgaatgaattgcaccttggtctaggttctataactgtttgatgattttgggttgtatatgttagggtgtgaatgtgaaaagtttttactatggagaaggttcagataatacaggagttccaacaaagatcatgaacgttaaatgttcagtggagatcacaacacacaatccttctacattattcggcatccatgttagctccactgccgtcaacctcatatactctcgtcaattcacacttgcgaatgcgcagctaaaaagttactaccaaccaaaacaaagcaaccacacatcgaggatcaaccttgttggctctaaggttccactatatggagcaggagccgagttagttgcttcggacaacagtggtggagttcccgtgaagttagagttcgagatccgatcacgagccaatattgtcggaaacttagtcaagtctaggcatagaaaacacctctcttgcttcttttttatttcctcctacaacaccacctttgtaaaatttacccacaaaacttgtatctcatagaagcttcttcattttttattttaatacaaaaacttgattcttatttactcctagcttttgtaaaaatggattattatttgttcaaagtatagttatataatataatgtcctatttttccatttttcttagcaaaaaaggattacattccattttattttatcagaaatagaaaaaataaaatccgttaaaaacggttttataaacaaaaacaaataaaaatggaaaagaaagcttcaaagggtttgttctatatccactctctacgccgtgttcttcttcaattatcttctaagacatatgtatcgatctcccattttcaatgtttacgtgaatctcaaaacacaaacaaattgataaaccaaaagaaagatgatggatgcaacgtcagaatcagaaagaacaagcttggacctatctatttcatcacctaaacaagcttactacgtagagagtccttcaagcgtgtcccaattagacgatggtgaaaaatcctcatcctctgcttcgcttattcaggttcataccccaaactacaccattctcagtgagtcacgtctctcctcttcgagccgtacctctaatgggacaagcggtatgggatttcgatggaaaggaagctcccggaggagtaatatgtattggccggagaagccatacacgattaatgaagatgaggtttatgatgataacagaggattatcagtgggacaatgcagagcggttttggtaatattaggtactgtggttgtgttctctgttttttgctctgttttgtggggagcttctcatcctttctctcctatcgtctccgttaagagcgttgacatccatagcttctattacggagaaggaatagacagaacaggagtcgccaccaagattctaagctttaacagttcagtgaaggtgacaatagacagtcctgctccttactttggcatccatgtctcttcttctaccttcaaactcactttctctgctctcacactcgccactggtcaggtactctgtgttttcatatctcactcattgctcctatactgtcatcatcgtaatctgatattcacattctggttgtgaagctaaagagctattaccaaccaagaaagagtaagcacatatcaattgtaaagctcactggcgcagaggttcctctgtatggagcaggaccacacttagcagcttccgacaagaagggtaaagctccagtgaagctggagtttgagatcagatcaagaggtaatctatcggggaagctagtcaagcacgaagcacgagaatcacgtagcatgctctttcttcatctcctcctccaagacttccaaacccatggaatgcacttacaagacctgtaaactcgttaccaagtaaacaaattttcatcatatctccattttgcaaataagaatttcttgttgcctcattaatctgcaatctaattcaaaatgtgccaactctctccttcataaaaaggtacattggtttcgtttttatctgcacaagtgtttcaaatgaagacatgccgaatcaaaacgttacaatatgttatattgcttatccacagcacagccaccttctagcactgtcccgcttactctgtttggtggccaataccgaaaaaccgaccgtccaataatattcttcaaaggcaaaggacccctgaagacaacacaagttttccacaataaggaacaatccaagaagaagctaaatcctgtgataaaattctaaaaccagatgaacaaataggcttctcaccatacgtgcgaatcataactgttattccggttatcacccatcacaaagactgaattttccggtaccctcgacaatgttgaagcaaccaaaatcagaaaaagaagaaaaaccacaagcttcaggttcttttgataatacttacaattggtgtcatttcataaccaggaggctctaagatgaatttttcattcctagcaacaccattaaccatcagtttcccattatgtacctacacattaccccaaatcaaaataaccatcagcttcactattacaagccaagagccaaaaatatgatcatacatacctccacaaggtcaccttctttggcaacaatccgtttaataaatacatcggcatcagtatacccaacttcctgaagaactggtggacttttaaagatgacaatatcatttgcacaaggcttcctgaaataataactcacctgaaacatcaacaccacatcttagtaacaaacaccaaaaaccaatcaatgagaatctcttgagctcatactaaaaaactcatctttaactctaaagatgtaacctttgacattgtaatctgataaaactaaaccatagcttcccaattcctaaactaaagctcatgattacaaagctaaactaatataaagaaaacaataccttctctgcaactaatctgtctccaacatcaaaagtaggatacatagacaaagaaggaatatatcttggttctgcgataaaataacgaaacgccaacgatacagctatagccacaaacacagtctgtgcatcatccgaggtaaaatccaaccattccggaaaaagtttgtttttttcctccacttcacctttatcatcatcaccaccatctccaccgtcacctcctccgccgccaccgtcgccggagtctaatgacggcgcagacttcgttgtctcacttgaatccttaatcccatagcaactcagagttcgccggtttaaatttgttccggtgttgaaattgagacgttggggggaaagaagttgggattttggggtgaattggataaaattaggattagggttcttgagaaatctggaattggaatcagatttgagaaaagctagcggcggagtagagaagtgaagagatatcatcaccatcatcaactgaaacaatggctttctcggaaaaaaataattgtttgtaattttatttaccatatcaaaaaaaaggatcgaaatgtccaaaacaccctttaagaaaattggaaactacagatacaagcatttgtgcaatgtgaattatccaaaaaacattgtttggttacattagttcacatttggcatttgatatgttgtgagaagtcggtagttgcgttctctgttaaaaaggaacacaatggcttggacagttttatacagatactgacatgatcagagcaataagagaatcctagttgtggagagttaataatcttgttcaatcaacatgataaaagagaaaaaacaagggtataaatatgcaagaaacagattacaggttttgtagaatatactaatcaaaaatgcactaaacttggaacataagagcacacaagtgggtaaacaaatttgtctacagacattccaaggtccactttactcaagattccattattttccatgatgtaacaaatattgcgagcggaaaggtgacatttgtctattatctctttatcaagaacaaccgcgaccttcttctcctcgtcaacgaagaaactcctaccgacattaggaaaccaaaaaccagcgactggtttcatatcaacagcaaataacaagttgctccacgacactgcattaggctcaatcttattagtaatccatatctcgacgacggatgcccggtgaaacagcaccgcaagctgctcttctctaacactagcaagcgtcacagtatctccaaatacggctcggaaaggcagaggcagacgcggttcaaatcttgaaatcaaaggatagtagaaaatcagggtgatctagtgatggtagaccatgaaatgggatctcttctagggcataccagtaagtgtttccctttagagacacgccactgtgtttgtacaaaatataccagtctggagtgaaatcatcaatgacctcccatgaattggagtataaactgtaaatctgaagctcacgaattcggtccctactggtctccaagtactcattcacgaatctcaagattttgtgattctttttctcgtatccgagagcgtacttcacgcacttgtggtagatagaatttctaggtaattcgatataccttgtttgtcccaaataagggttccaaacaacaaccctagaagagtctttgtctctgtccttgttgatgcataagaataaacccttggcagtgaaagattttagatattttgattccatctgcattgagattacctataggatctatagacggagagagtagatctacgctcatcaaggaaactctatagtccatcatcatcaccacctcaattccattcctctgtttcttctttaaaaagctctcacttttcgttatagtgttccactttttgcaggtcaatcgcagtttccccagagatttcaccggaaccctagagagcacctcctcctccatatcaattggaagatcgaacatcttcgaatcgaatctcccaaaatctctctctcttttccgtgtctatcaatccatctcttcacgccctcttttagtgatataacttatctttttcaatttgggctttatggtaatgggtcaaggcccattaaggggtctcgtttagaactattgataaatgtctgaaataagttttatacatttcttcatttggagagtcatttcgcagagacgacgcataggttctt

SEQ ID NO: 29101 - DNA, 1163 bp, Arabidopsis thaliana landsberg
ctcgactccgattcgaatcttaacactgacggtgacgaagcgaccgtttatgattcctcgaaggcattggttactatccctgctccagccgtttgtcttttccggttcgccggagatgctgctggtggcgccgttatgggctctatcttcggatatggtgctcttcttctttctattttgtttcttctattgcttggttttatctgctattgctttactctctgatagtgaattgagaattactggcaaacaattgagtttgtactcttttcttcatttaagttgatttcaaaacatgtttcgtggataagggtttgagaaatcatagttgttttagcagactagccttttgagttattttcaggagtaatctagatttaggggattcaacattcctctagtttggttatgttttgctcctggaagctgtagaattgaattagcttagttttcattaaagagcgtcaatgtgataagattggctactgatttgattacgatgattgaattgtgaaatattatctcactatataagttgggattcaggttcaggattgttcaagaagaaaggcttcaaaggatcatttgcagatgcagggcagtctgctaaggtacccctcatctttatgctatagcatatatatgcttattgttccaagaaactgagtaatttgctaattttttgttcaagacttttgctgttttatctggagtccacagtttggttgtttgccttctgaagcaaatccgaggcaaagatgacggtgagactcttcagattgcttccttcttgtgtaaatgattagtttttacatgaacttgtaatctctctcctacttatattgcttttgttctttttttacagccattaatgttggagtagcagggtgttgcactggtcttgctcttagtttccctggtaatccaaatccattatgctcattctgatttctactttggcgttaggtatcatatcaaagatgcaatcatcacagagaggagacctaatagattctttcttatatggccttttttacaggtgctccacaggctcttctacagagttgtctcacgtttggggcattctcttttattcttgagggactcaacaaaagacaaacagctttggcacactcggtctcgttgagacaccaaaccggact

SEQ ID NO: 29102 - DNA, 2053 bp, Arabidopsis thaliana landsberg
  unsure (1)..(2053): unsure at all n locations
tgcgtgcctttttctatgtcgtcactcgtcattatctctactctattggcatatctgggctaatgttaatgtttcctgaaagatgaaagcccattacatcgaatttgggctttatgttaattcttctattaaaacatattgggcttttagtaaattttacgtcgacgttggggatagtattgctcttgtgaccaaacacttggaaactcgaacaagcagtttatgccccaatcttcttcccgcgtctttcacacacttcaatctctccgccggcgaaatcattgcttcttccctcaggcctcagtcaattcagatgccttttccacgtctcctcgccgggttttaacctcattagattcgtcaatcactcaattttgtcttcttcttcatgtgagcttcgatttcatgtgattttcaatcgaatttatagcttttaagatctctttttagggttttgattttgcgaagtaaatcctgaatgtacgacctgattttgttgtaattgagtggatattgaagctgggaagaagcttagattgttgttttgagctctgaagaagtgaaattatgagcagcagctctagagagggatctccagattggcttcgctcttacgaggttccagattcaatctgatttctgtttctattttatatatttgtttgaaatatatagaaattaacaattgaaagtggatggttttgttacgcaggcacccatgactacttcattgttgtcgctatcatcttcagatgatgatagtccttatagggaatctgaagtcatttcgtctcttcctttgcctgatgatgacggtgacgacattgtggttcttgagacagaatctgtggagttactgactaggaagaattccgaaacgaaggttgtgacgaagcaagtgagtatcgagcaggtgttttctagaaagaagaaagcagatgctagtctcaaccttgaaggtatggaagattttctgtgttgttttgctttgagattagaggaacaaacatttatgggtcatttccttcttggagggcgagggagagaatatcaatttatgaatttaggggagtattgttcaactgttgagctcttaaaagcatgtatttgactcgggcagattcgtgtgcagggaaggagaatggaaacaacgttgactgtgaaatactctctagcaagcataaggatgctcaagtaagaaccttttggacactgtctccatcgtactccttagtgtttctgttgcctctacttgctttagtgggtcgatattgtgattcaagtgtttcttgtnnnnnnnnnnnnnnnnnnnnnnnggattgtattgtcaagatagtggtatactagttataaactaactctaggacagctttggacttctatgagatatgatgaaattagttggtgatctatcgccagcactcttatctgtcttagttttttatttcaaggttttgtgtctgcatggatcagtttaatttatggaatataatatcgcaggggtgtaaaactactaactcttaatttggtatagtgtcgagaagatatgttaacaatatttaaatgtatcattagcagggaggagctgattctgtatggtctgtctcatctgattctgagccatcctctcctataaagcaggaagtgactgtgtcaactgaaaaggatgcggattttgttcttgaagctacagaggaagaaccagcagttaagacagttcgaaaggaaaaatctccaaaaacaaagtcaaaaagcagtcgcaagacacccaaggaaggaaatagtgcacaggaaattttaaaaactgaaggtaagaattgtatcaatgtttttttttttttaatttaggatttttcttaagtaatgtaacggttcctctatcatgcagataaagatacagataccactatagccgagcaagtaacaccggaaaaatctccaaaaacaaagtcaaaaagcagtcgcaagacacccaaggaagaaaattgtgcacaagaaattttaaaaacttgaggtaagaatcgtatcagtgtttgtgaatttttaggatttt

SEQ ID NO: 29103 - DNA, 2165 bp, Arabidopsis thaliana landsberg
  unsure (1)..(2165): unsure at all n locations
tactcaaaaatatattccatgcttaattaggccggattcgcggtgacgatgcaccaagagcggtttttccgagcattgtaggccgtcctcgccacaccggtgtgatggttgggatgggacaaaaggatgcttatgttggagacgaggctcaatcaaaacgtggtatcttgactctgaagtacccaattgagcatggaattgttaataattgggatgacatggagaagatttggcatcacactttctacaatgagcttcgtgttgcccctgaagaacatccggttctcttgaccgaagctcctctcaatccgaaagctaaccgtgagaagatgactcagatcatgtttgagacattcaatactcctgctatgtatgttgccattcaagctgttctctcactctatgccagtggccgtactactggtcagtacattactacattctttttataccgtttggttgaaataaaattcggtttggttcgattcgagtttgctctcattatttttattttgttggttaggtattgttttggactccggagatggtgtgagccacacggtaccaatctacgagggttatgcacttccacacgcaatcctgcgtcttgatcttgcaggtcgtgacctaaccgaccaccttatgaaaatcctgacagagcgtggttactctttcaccacaactgctgagcgtgagattgttagagacatgaaggagaagctctcttacattgccttggactttgaacaagagctcgagacttccaaaacaagctcatccgttgagaagagcttcgagctgccagacggtcaagtgatcaccatcggggcagagcgtttccgatgccctgaagttctgtttcagccatcgatgatcggaatggaaaatccgggaattcatgaaactacttacaactcaatcatgaaatgtgatgtggatatcaggaaggatctttatggaaacattgtgcttagtggtggcaccacaatgttcgatgggattggtgataggatgagtaaagagatcacagcgttggctccaagcagtatgaagatcaaagtggtggctccaccggaaaggaagtacagtgtctggatcggtggctctatcttggcttccctcagtactttccagcaggtaaattacttactatacttaatacataaagtctattagtgatttgatgtataaagtgttacaaaaatgtgttccaaatttgcagatgtggattgcgaaagcggagtatgatgaatctggaccgtcaatcgtccacaggaagtgcttctgatcaaaagtcaccaagtaaaacaagagcggtaaaaattttgatatcagtttttcaccctgaagccagttgctataattactcacaacttctctatttgtgttcttttattcttgtccctcgttgttcattttaatctcttttttgcaacaaagcaacttaaaaaaacagagcagtcattaacagaatgttattattatatatatgtatacatattagtatacacccattatttcattaaaacatttatcatataaggataggattctatacatcgatatatttattttgttgacactattcagcacatgcttatgtcttatcttgttagtatatgtaaccaaagacaaataatagatgctacaaattgttttctttgaagcaaaaatttcaatcttaaaattgtttttttccaggttacacaaaaaaaacttgtagtttgtaaattttctatacaattttggggatctcaacaagaacatgaacttcaacttctagtcatatgacgacctgagtctgcgcggctgtgaatctctttgctgcagtaaatgtttacaagtggtgtgtaaattggtactgattcaaaagctttaagaaatctacacatttcgtgaaattatttagcagacttgatattaaaaatctaggataaaatgactatccaaagacaaataggactgtttcacatgttcccctgattcttgtagctcataactcatcagcagttaacttttctacctcatacacgctcgcaatncgtttggaattatcagctntaatttttctaattctttggaaattattagcagctcgatcaaatggggcatggcttcttcttctatctgcaactcatctaaactttccatgaagaaacaaagct

SEQ ID NO: 29104 - DNA, 4553 bp, Arabidopsis thaliana landsberg
atattagtaatgcactatataaaatagagacacccggagcatactatgaatgaatgcaatatacagagcattgtaatgaaacattttcggctaagctttctcactgaagaccatgaaatctgtaaaagatgaaagcaggatttaaagggatacccgtgccgcagagacagcagcttggcctaagtttgcgcggaacttttcagatatattaggctgcaccagtatagtgtcaatcagacccacatccatttatgctagaaaatatatgaatcaataacagaaagaaatatggtcattaccgcaggagcttcttcaataatcttttggtgtcttctttgcacactgcaatccctttcgtatagatgaagaacatttccatgtttgtcaccaaatatctaaaagcagtggaaacaccgaagcaaaattagttaaaatgctagaaaaaaaggagaaaagccagaaatggttactcaatgagtacgccaaaaatgaaatacaagttaaggttaacatttgtcctctttctatatacaataactgggtttcaatgcgccataaccagcctttcatgaaaaaaaaaaacaacatgaaatttcacgactcactacctggacttctatatgcctcggtcgagtaatgtatttctcgagaagaatagtgttaacgccaaaagaagcagcagcttcacgttgggcccccaaaaacgagtcagcaaaatccttcccactttgcactatcctcattccctaaaaaacaagagcttactttgcttcgaaaccaatagattttaaaagggtatcaaactttgactattacaaaaagccatctattggaaaaaatcaatgccgtatatcataacataccttccccccacctccatgtgttggcttgattattatagggtatccaatcttttcagcttctgacttcatatgatcaatatcttgctcatggccatgatatccaggcacgagaggaactccagcagctcccataattctcttggatgcacttcataaatacacatgagggacatgtcctcagaaactattcaagagagaataaaataacaacttgtgcaaagaagaagcaagtcgtaatagaaggcctgtaatggtaccttttatcacccatgtctgtaatagcagatgctggaggtccaatgaatgttagacccgaatcctcacagagttgggcaaagtcagaactttctgacaagaacccatagccagggtgtattgcctagttatataattcaaagaagacatcagctacaagaacacgattattctttttcggggatcaaaactcatacctgtgcaccagtccgagccgctgcctccatgatagtcacaccgctgaggtaactaagtctagccgagggcgggccaatccgtaccgcttcgtctgcagatttcacatggagcgaatctctatcagcgtcactgtaaaccgcaacggtctgaatccctaaacgcttcgccgttctcatgatccggcgagcaatctcgcctctgttcgccaccaaaatcttctcaatacattgctccttaggcttcatcgatgcggagccggaaatatatctcacgagcatcgagtgattcttccgacgaacattccgtcgaagtgcccacgccgtcatcatcgacatttgatctcgattttcgaattttccgagtgaagaaaacaagtgtgactcagcaactgcgttgtagataaaaccaaacaacgagggtatgttggtcaatttcgtaaaaactaatcgacgatgaatagtgacgtggcatatactttatcatggtttggtcggaatggatatgtgtctgatgtgccgcttgcgttgcgtctttacctgattttacaagtatgggctttattgttttattaatgggcctatctgcacgaagcattaagaaaggctgcaaggccttgtttcagttttgaaatataaatacttttgaatcatccatataaatcgcattgatgtaattttaaaattcacttggtcttactatatagagttttaatataatatcaatctgactattaaagacatgtggagggatagttataaatgattttgaaaatcataataaatagtagtaaaatctttggaggcatgaaaacgatacgagctggaactattaaaagtgtttgttaggtagtggctgttgagtgttgactcctctattcatttctttttgttttgcatttctataaccgacaaaaaaaacaatacaattaaggaaaatatacacaatccttttaattaattcaatattggcaacaaactgaacaagaatatatgttagtaataaacttataagaagacaatttgatttgaagtcacgctgttgattatttagtttacaattaaatgaatcttaacacactcgaaacgtttatgtaaaatagtatataaccgtttgtgatgcttaaaagtcagacaacctatttgttcccaataggtggatagtttatttgtccgtttcgtgaatcttcgtttgagtaacaaataaaggatgatatataagttgtgtcaaacaagtaatgcataccaaacaccaaaaacattctcagtcaattaaatttgaatttttcgtttttaatcttaattataatattattttttaaattataaattttagaaagctgaatgaaatgatacataacgataagccaccatatatcgtatatacttttttcttgcaaagtttaactaaaagttatgaacaacgtaactctaactccgactcaacttttagatgattggaaaaagtttgacacgcaagatcgcaataagtcgaatctaaaagcgaacgtggagaaaaaaacaaagggtgacgaaagtggaccgagagctcaccgtccaagacctccctgtctttgtcacttatctcttgtcagcctccttatcattactagtatttaatacttttttttttttttaaatcatctttagtgatttaatactttgttattccggataataaaatgtattaaaattacaaaatcatttagttcttgagcagacaggtatagaaaaagaaaaagtgaactgcagacttgatataaatcaggggtaaatgggaagtatcagattgaaaaataaagaaatcaaataaaatgtcatactgtatttagttgtagttcgataaaagaatattttctttcggacatgaaagtcgtgtttttttttaagttggcagcgaaggcgatcccaaggaggcaaagtcacgcaacaagtgaattaaaataatgaaacagaacatctgtgagaactgtactggagggtaatatcgtcatttaaaagcttacctaaacaattcttcttcttcacaacgtaaaaagtaggaaccagagctgaaaaacgcctggagagagaaagagagagagatctagatgaagaaaatgagatgagaagaagaagaagaagaagaagtgaaagcgaaagctgatccgaagatttctgatttttgtagtagcaagtattatttccggtaagcctcacagaattcttgcttttgaacctattttcactagtgttaaattcgctttgtagattaaacctgtgaagctaatttcagtttcagactaagtgcgttactataccctctaattcctgtaagatcatgtggtttcacttgctattcttctctaggattctcgtctaatttccaaagacgaattgatttatgctgatccaatttttcatctgtaatgaattgtttgatatgttttctgaccaggttactactggatttggctagttaattatttttgtctcgaatttggctttcattgacttagtggtaattcgtttctattttttcttttgttttcttctgtatttgtcttttatatgactgttgaacttgttcattattatcatagcttaacccttgctattttcttcttcttcttcgtcttcttaagttaggatttttttacagaggaatttggtgtacttggctttgagagagacttggttccggagtgttctaatatcctcataatttttgtgtgattttgccgggaaaaatgactgctgttgtgaatggtaactctaaacgctattcttggtggtgggatagtcacataagccccaagaactcgaaatggcttcaggagaatcttacaggtatgtgattttcttgttttaacgtcccttgtatttcccacgggaaaggtcatttccatcgtgacaaatttcttttacttttagttcagttttgtgtcatgcaagatactttgtatgcgatctgcttacatgtttctatttttgttgacagatatggatagtaaagtcaagcaaatgatcaaggttattgaagaagatgctgactcttttgctaggcgagcggaaatgtattacaagaagcggcctgagcttatgaaactggttgaggagttttatcgagcatatcgtgctttggctgaaagatacgatcatgccaccggtgttattcgtcatgctcagcagactatgataaagccttcccaaaccaagaccctatgatgtttggtgaggagtcacctctcggttcttccac

SEQ ID NO: 29105 - DNA, 1571 bp, Arabidopsis thaliana landsberg
taaaggctccattggtgtgtttaacaatgtatgatacacaaagtaactaattaagaatttcaaaaaaaaaaatcaaacaaaaatccatctaaaattgtagaccttccataattgtatagaccttccagaacaaccggttttgataaggatccatatagtttttgttgaatacatacaaccggttttgagaaggaacatctttcaataaaaagagaaggtcatggagctggacacaaccacaacagcgttggactcagaatcaagatcatcaatatgaacggagttacgctctttgtggaggattttggaaacggtgagtatgagggaattaaagacgttgactcaatttaaactacgccaaatggcagccaggaattcaaatcagacttgtgatccaaaatcgggacgacataaaagcattgtaaaaggatgatatgttggcgtttttcatcccaagctaacaaaaagcaaaacatacccaaaagactttacaaaaaaacttgcattatttgtttaaaaagggatagaacccaagtcttaaaaacgattacccataataagacttcaaccatgcagtttcaggttctggaaacacaatactgttatttgatcatatcatcatatccaaattctcagcatcatcacagctggataattctttaagataaaacaaataggagaaatggaaactctaggcaccaatcacggaaccagagttcttcctgcactcggacaacatgtccatgtagaactgacatttgctaatctcgcttccatagctgccgatgcactgcattcatttaaaaaagaacaatggatttgcttgacttcaacaatgaaaatgtgattatcccatcattttattcaatgtaaggaaacaagtttcaatgtgcgcgcttcactagagtcaacaacacccatctaaatcactgagctatgtaaacgttcagcagagataaaaatgaattcaaatgtttcagaacgaattctatcatgcaattaagaatccggacaaatctgatcctataacagaaatacagagagagtgtgaaagcatgagaaaaagatttaaaacttacatcttggaaagccttagcatgaatgtcacaggtgctagaaagcatggcgcttccagcaggggctgcagatgcagaagcagcctcaacagcctcatgctgaatggttcgtggacccatcacagaatcaacagccctgtgtgcaactgcacttccagtaccaaaagccatacctatttcccaaaaacacaaacaaacaggtaaggaaagacgattccagacaaaacaattggggtcgtatatagagagacaaataatagcttcaaaattaaacagaaataattaggctgatttaccctgagcaatggttgaaccaatgcctgagaacatgccaccaccaccaccgctggcctgagctggagctggaggaggtgcacggtgtactgcaaaacaaaacccagaaagaatgatttataaataattgaatccagcggaatggattgaataagtcataactaagagcaaaaaagacaaatttcgagacaaagatttgta

SEQ ID NO: 29106 - DNA, 1449 bp, Arabidopsis thaliana landsberg
ataagcaggtgggaaataaaagaacagagtcccttaaaattattttgccagtgcaccaggttgacgaaaacagttaactggtgactggtaggtgatacatgtaaacaaaagggaacagcaggaatcaaatgcccagaaaccaaaaagacttgaaggaatgtaaactaaaactggagctaagaagaagcagccagaggtttttctacagcagattcgttgggtttcatggtattgaagagttctagaacatccggattattacggatatagtttgggcacagagagagtaaatcttgtgcttcactgtgcctagcagacttcatcatagtttcgaacacacgcagaaccactgacatagatggaaagttattcgaggtcatagccttcaaaaaaccgatagcttcagtgctttttccagttgatgagaagtaattcatgaaagggtcaatgaaaggagggaacccgtgatctttcattatcggtagaagactcatagcttcttcaaacccaccatcccttgcaatcttcttcgtcaacagattcgttaccaagattttgtacgtgctatggcgaggtttcagctgttttttctgtacttgtgcactcaaaagcttgtatgcgtctcttacttgattcttgttgcaataagcaagaaccaacttctcaaatgcataatcagcataggaggccccctcgtttccaaccattttctcgaaacacactaaagcttcatcaagatccccggaatcacaatacccttcaacaagagacgccattgccttgtcatctagattatttccggatgcttccataaagtctacaaattcatcagcttcctctttctttcccttacggctaagacttgatgcaatcatgctctgcatatcaccactaggaacatagcctcctctcttcatttctttcaacagctcattgctctgttcaaccctatccacgcttctcaaggactttaagacagatttcagcaaggaatccgtcaaagcattaccatttttggtataaactttcacagctcttgaaaacaaatccaaatctagaatcttggcagtgacaattttcttgagcagcaaacagaagcagtgtagggtgggtttgttactactactacctgccattgcaatctcaaacaagtcaacagcttccttgatcaatttagtctggcagaacctcgttgaaactctaacataagtctctatttccacttcataaccagcactcctcatttctactacaatgttctgaaatctatcaagaaacttctctttccccaaaaccctagccatagcattataggttttctcatcatgcttaaagagatcagactcatcaatccaccggaagaacaacaaagatttcctgggttaaacatcaagactttccacaatcatcttcactaaatcactcttaaactcaacattcaagtctctc

SEQ ID NO: 29107 - DNA, 1752 bp, Arabidopsis thaliana landsberg
atagtctgctcgatttttttatttaatattttcatgtttagatattctctaagaattagttagaaatttaaaaagatattctctaagaagatacgtgtctctcttgtccaaaaccctagccgtcgttttatttatttttcattctattcggctcacttagcctgagttttaataatttattttccatttttctgtacagccagtcctcgtcttgctggcctgcaataataatgtctctgatcggccgcctcaatcttggtcggcgcttctgcaccgccgtgccaagaagatcggaagacataatgtcaaacccagattgccgcccttctgatctatgcttgagggtctcgtacttgatcagatgcgttggggatctcgacacggcggcgaaggacgctcgtttggctgttttcaccagcatcaaattggagtcaacaacaacaatatgtcaatccatcatcggaggcatgttacgggataaaaggctcaaggacgcttatgatctctacgagttcttcttcaatcagcataacctcagacccaacagccattgctggaactacatcatcgaatctggtttccaacaaggtcttgtcaacgatgctctgcatttccaccaccgatgcatcaattccggtcaggtccacaactacccaagcgacgattctttcaggatcctgactaaagggttagtccactccggtcggttggaccaagccgaagcctttcttagaggcaggacagtcaatcgaaccacctacccagatcatgtggcgtacaacaatctgattcgcgggtttttggatcttggaaattttaaaaaggcgaatctagtcttgggcgaattcaaacgcttgtttttgattgccctatccgagaccaaagatgatttgcaccattcaaactatgaaaacagagtcgcattcctgatggccacattcatggaggactggtttaagcaaggtaaaccggtggaagctatggagtgttacaaccgctgtgttctatcaaacaggttactggtttgtgccgaaacgggtaacgcccttttgaaagtcctgctcaaatacggtgaaaaaaaaaatgcttgggcattgtaccatgaactcttagataaaaatggaaccggtaagggttgcttggactctgataccattaagataatagtggacgagtgctttgatatgggttggtttagtgaggctatggagacctacaaaaaggcgagacccaagaacgactacctcagtgacaaatacattattacaaggttttgcgaaaacaggatgttgtcagaagcagagtctgtttttgttgattcacttgctgatgattttggatatattgatgttaacacttataaaacaatgatcgatgcttatgtgaaggctgggagaatacatgatgctataaaaacctccaacaagatgatcgatgcaactctaaaggaggtctcccaactcttttgaccattcctcgtcacttggtgatctttatttaatgtccctttttaatatattttttatcagacaataatagatttttgtttgtttttattggtcggccaatttatccattagatgaagacataaagcgtttacagaacatacatctagaaaatccaagagatagtaaaagaggaatccttgattgtagcttcttttgctaacacaacagcataatgcccatatggattttacttatatcattaactaaagaaagatgtgaaggttggatagaggttcaagtttg

SEQ ID NO: 29108 - DNA, 1828 bp, Arabidopsis thaliana landsberg
tattatcttctccaaacagctcataaactcagagcaaacccatggccaatggatgatgtattagatcccatttgacttttcggtataggttagatacattgttctctgttcatctgctattggaatgtagtgagctgtttagagatttacatgtctctcaagtcagaagatccctatatatcatattccagcaaaacaatgttgcatagtatatatcatatatgtgaacattatctcattgtggcttgagattctaatctgctttttaaaattcattgcgactaacaaacatacctgacatttttcacatttgaccccacaacatttggaatgattaataatataacacaacttgcttatttatcagatcaaacctagacttctacactgatctttagcaggttaacacagatacagacacacatacataaggcaacagaaacaaaaaaaaaatggcgagttagtcttaagtgatagagagatttctgattctactgaacaaaagggtatcgagcaacgtagaattctcttacacgtgaagccccgtctctagcaagtataccttcaagatctccaataattctagccagccaaatctccaagtttctctgaacttctttcaagttgttcttgatcaaatccaatgacctccctgtgttcatcttggcttggcttaactgatctccttgattactcctggtgatttccgtctgcaatgaaactagcttctgacctgtctccgatgcccgttgctgaagtctgaaacactcgagcagaaactcgttttgtctttgcgtcctgaactcaggtcctaatgtagcatcgcacggatcactactctgctgaaaacataaattccatgaaaggtgtaaggagtaactcaagaatgtgttgtaacttgtaagcaaatcactcatagagactaaccattcttctacatagatcatcgatcttccctgaaagagcttgatacctcttagcctgttttttcaacaaagacggaactttcgatatgtcactaggacgacaaactttctcaagattcagtaattcctcttcaagcaacctcagtttcgcagatacacccgtcccttcactatcaatcttccatggtgattcccttctatgcaatcaaagacaagctattatacatcactcatcatcacaatcacaatcacacattctcaattcaaaaactctctattaccttggcacaaaatgcttcatacgatacacagattccaaagattcatattgtaaatcctacaaaaacagaagcaaaacttgaaaaaccaaacacacaaattcttcactctcataattaagaaaatcaaaatcaaaacctggaaaggattaaaattgccataagcattaggtgatggtgatgaagatagagtgagatgatccacagcataacgttcactggactcatctccttgtccatcatcatcatcttcttcctcaatctctcttcgagacataaacccaatcatttcatctctctcactcacttccctctccaattcactaatcctattcatgacatcttctctttcttcttcaatttcatgaatccgattcaacaatcgtttctcttcttcttgccaagcgtttctatgactagcgaagatctcgaccacacgcgcgttacgtttagaatcttccacgcgccgagatttcatctgacggacttgttcctccgccgtcgcgagtcgccgttttagctcggtgacttgagatgttaatctcgggacaagagagattgcgtcgtttgggagatgagctaacattactgagaagcttaaaactagaaatgattttgctagtt

SEQ ID NO: 29109 - DNA, 2060 bp, Arabidopsis thaliana landsberg
ttctttacctttgactcggatccaataagctttgatttttgttctggtttatcttaaacttgcttaatctaatctttctgttgatttggggaagaacagacatgtgggcattgttagattcatttgtttttgtaaaaaaaagactcatcttttgtttgaatcaaatgttcttggagaaattctttgcttgtggatttgtgaaacttcttttattattatgattcattttcagacgggattattcttgggacctttttcttctctctattcacagatatcttcttcttattattattttgtattccttattctttgtcttattgccttttgatttttttatcttatagaaaaaagaaaagaaaatgccagctgtttttgtctaccattaaccttttgtttaataagactaatgcttctttattatctcattaagactcatattagctcatcttttttaaactgtcattccctttttattaaaaaaaaaccacaatgattagaattaggccatttctctttggttgttgatgatcaagtttttggttttgtttttttgcccttaaaagtagtaaagctgcacatggaaaagctttaacagagatgttttcttttttgtgtgtgtgttaatcaaagcatttcttttccacctaaagtcagttgtcatattcctatctttagtatacatttactaacgagaaaatagattcattgtttacaaacacatgttttatgaatatggagtagacaaatggtatggttaaaagtttagtttttttctgttggtttcatgatccgttacttttgttataacttgttggtttcttgtgttcaggagcatcgtgttaaaactgctagtggtgttgtgtctgtcattgtctatggagacagagaaaagccagcattgattacttatcctgatttagccctaaaccgtaaggctaaagaatctctataggcactaatgtaatggctaaatttattaatgtttttgttgtttcttcttcagatatgtcatgcttccaagggttattcttctgtcctgaagcagcttcattgctgcttcataacttctgcatttaccatatcagtccacctgggcatgaggtccaatattttagtttctctttttttaacttgccgtatgctttgcttgacgtgattacttactcacatgacttctctgttttcttgcagttaggagctgctccaatttgtcctaatgattcagtcccttctgctgaaaacttggcagatcagatccttgaagttctcaactttttcgggtaacgatggaatcccttatttttggcttattgaagttctcaacttttgtttttcgggtaacaatgtataagctttttgttcagccttggtgttgtgatgtgtatgggagtgactgcaggtgcttatatcctcaccttattcgcggtatgttcctatttatttttctcttctcattgcccattgcttcagaagaatactgtgtttatcatctcttctatgttttaaaacttttcagatgaaacatagagaacgggttcttggtttgattcttgtctcaccgttatgcaaggcgccgtcttggtctgaatggttttacaacaaggttatcacaaacttgttatattattacggaatgtgtggagtggtaaaggaatttttgcttcagagatattttagtaaggtgtgttcactgcagttaccattgctctctctctgcacttgttgcatttccagacttctcttatttaaaccggttgcaactgcttgctacaggaagtccgtggtaacgttgagattccagagtcagatatagcacaagcttgcagaagagtcagtgtttatctcttctgttgattttctgtttcatcaatagattgatttttctgtatcagtgattcacaccttgcacttttggtgattgtctcagctgcttgatgaaagacaaggcataaacgttttgcgatttcttgacgccattgatcggtaacacaacaaacacctcgaaattctttaccttaaagcattcattcattcatggtgcaaatattgactttctt

SEQ ID NO: 29110 - DNA, 3061 bp, Arabidopsis thaliana landsberg
tctaagtgccatagtcgttatataacgccttagattgtgtgtatgtgtatgatgggattcaagtgttagatacaagctggtaaatcctttaatggacgggtgtagatccatcttaatacaagatggtatgctgccggtgaaactctaaaagtaacactcaaaatacaagcgtataattttaaacactaaacaatttaaattatatcaactgaacatatacaactcggagttgtattatacatttaaaatcaaataaaataatatcatatatttataatcatctttacaataaaagtggttagtttaactaaaatataagcatacctgcggtatactgctagttaaaattataaataagcagattaccattacgatggatgtaccttctcacatacacacctatcaaaaacttaaaacctttcaaaacctcttggtatattcaaattaggattcttcattcatggaatcattatttcaagggttttgggatgtcttatgaaatgattttggcagaagaggatgtaaatttttttgaataaaaagtagtcagcaaaacatatgttttattgggattttttagataattaaatcagagaatagggctgggcatatgagtaacccattcgagttcgggtagaacccgttcgggtttgggattaatgggtatatgatttactacctaatagaataattctaaatattcggttcgggtcgcgtccagttgggtttaggtcagtttggatgaaaagtttcaggccctaaaaatactcaaaaaatagaaacgggtattttgtatgtagatagtgcgtctccaaacaaaaaaaaacttttaaatttattaagttttaataaatttaattatatttgaatatattttactaaattttgacaaatataacaaataattttgacaaacataacaaacataacaaagtatacaatttaatttatacaaaatattaatgctcgtgctgtacagcacgggttatgatctagttcttttttattatcaagcgcgctaatttattcctttttaattatcataaaatctttaaaattttaaatagccccaaaaaatgttgggtttaaaaagtgtataaaattttaggaacaagtcatatttgatttaagaacatttccacctaaaaaaattagaaacttttagtaaacataaaactttaaggtacttttagaaatgttccaaaattgtggtattgataaaacaaataaagttacacaaaaattaatctataatatactaattttgaacttaaataaaaacctaaagatccttgtcatctagaagtgttgtactttggtaaagctctctgctctaaaacccaaactgaaacataaagccaaaagatctcaaaacagttccaacgagaaaaataaggtttgtagttatcttccaattttcataatgtttttttatattcctttgtgcaatcgctaagtcaaaccaaccctaatattatttcgccgtaatttttaatttccaaagataatcataaaagaaaaggaacaaaaaccctaaggttcttgcatcgccgtcgtattattccgtcaacactataaaacccacattttcctatctctctcaatctaaagtctttgttagggttctttatttttaaaacaaacagtaaccagaaaaaataatcaaatcatcgaatgggtttgagtatcgcttaataaagttttgatctttgggtttagttctaaaaacagagaatttcggggattgtatatatttgaggtataaagttttgatctttatattttttttcgtaatggtgtgagtataaactattgaattgattttgggttttttgttgtttaggtgacaatgataccggaactagggagaagaccgatgcatagaggtaacgaagattcatcttttggggatgattatgagaaagagattggagtattgcttggtgagcagcagagaaggcaagtagaagctgatgagcttgagagagagcttaacttgtttagaagtggctctgctccaccgactgttgatggttctgttagtgctgccggagggctttttagcggcggaggtgcggctccttttttggagtttggtggtgttaataagggtaatgggtttggtggtgatgatgaggagtttagaaaagatccggcttacttgtcttattactatgctaatatgaagttgaatccgagttgccaccacctttgatgtctagggaggatttgagggttgctcagaggcttaaagggagtaataatgtgttaggtggtgttggggataggagaaaagttaatgataatcgatctttgttctctatgccaccgggttttgaaggtgagaaaactggtgcttctgcttctgaatgggatgctaatggattgattggtttaccgggtttgggacttggaggcaagcagaagagttttgctgatatctttcaggttggtgatacctcttcttatttacttcttttggttgtctatagttgattatgctttgatgctttgctaatgttttctctgtgtgtgtgttgtgtatatttctccttgatattcttccttatgtaaacttggtgtattgcttttgtgcaggctgatatggggcatggacatcctgtcgcacaacagccctcacgtcctgcaagtcgtaatacctttgatgaaaatgttgactctaataataatctgtctccgtctgcatcacaaggcattggtgcaccatctccatacagctatgcagctgttctaggctcttctttgtctagaaatggaactccagatccacaggccattgctagggtgcctagtccctgtcttactcccattgggagtggaagagtgagttcaaatgataagaggagcacaagtaatcatagcccgttcaacggtgggctcaacgagtcttctgatcttgtcaatgctttatctggcatgaacctgtctggcagtggcgggttagatgaacgtggtcaggctgagcaagatgtggaaaaggtcaggaactatatgtttggactgcaaggtgggcataacgaagtcaatcaacatgggttcc

SEQ ID NO: 29111 - DNA, 1020 bp, Arabidopsis thaliana landsberg
aaccggtaaaatgaaaaagataaaaaaaaaccgataaaaggttaaattttaaaatattaaaatttttataattctagaaatgtccaaaaactgagtcaactacttcaaatgcttcacttatccaacttccccgattctcatcgagtctatttcatacatagtttttattttcatttattatgacttacgtttagaccgatctcacagatatgtggatatttaatgattaaggattttaaagaaagttttgctttcatactatatcgtcaacaagttgtctaaaaataggaacataaaaaaagctttcacactttgaattctttaaattctataatcttttctttttctttttgagtcttactttatcctttcatatttgctgtcacaccttgaaaaggtctattattttactcgctcatctcctctttttaagaatcttgttttgaatcttcatgaaagctttgctcgttaaaaaatcaacaaactcgttgactctgcaaaaccctcatgtgctaagtttcaagtaagtatctctagctcctttatttgctccccagcaaaaaaaaaaggaacatagcatcatcttgtgtttgatccaattcttgaatcttgaaaacaggtttatgttcttttgagctcaatggcggatagatatgagaaccaacctcctgagaagcttcaggtgagagtttccaaagaactcaatactcagatccaaaaatctctcattgtttttctgatttaaaaacaaaacaaattcgtgtttgctctcttgactttaaaaaacaggggaagtatcaagcaatgggtggttgctgtattcttggaattggatctatcgtttcttggaacagtatgctcactatagcagattactactacaaagtttttccggttcggtttcggttcggatgattctcagattccaaattggcttattgaattctgatgttgcgtgattagttatcaaaaagctgaaagaaacaaaactttacgttccttgtaggataatcatccttc

SEQ ID NO: 29112 - DNA, 1402 bp, Arabidopsis thaliana landsberg
gtgatgcgatgcaaacttttgtctcatcgccagagttttcgatcgctctctacttacaagcagcttgtcttttaaagcttgggatggaggctgaagctaaagaagctcttagacatggctcttctctcgaagctttttagagttactacgacgacaacaaaaaagccagatttgtacagctttctctgcataagtatgtagaaatgtgaatatacacatagcacatatacatgtttgcttctttgacttggtttgagagaatcttggtgaaccatcagttttttgtgtgctaaaaccggattttcttgccgttttcccttgatcttaactggattgtggtttttgttactacacattcacactaattagtagtgttatgacattgatcatcatcgtcagattgttgtcaaggcatgttgcaaagtgaaacaaccattatgatatgttaatgcagacgccatacaagtcacaaagaaagttgaagacactgtggtctctactcgatttcagaactataaaatctatctctactcaattacatcacaactttgattacaagtaaaactcaagctctccgagatcaagagtaaataaaaataaatgtaaagaaatctcaaaaaagaaagaaaaataaaaaatctcagagactctgtttttgttctcccagtttttatgtggacaggacattggttatgttcgtcccctgttcagatacaagataatgatctcgatgacccctggagccttgaggccttaaccgaccaactgcgtcttccatcaccctcacgctgctactctctaaaccgcttctcagccaagcgaggctgcctatttccgttgctatagcagctagttcggaactcggaaacgttggtgagtctaagtaatccacaaactctggacccaacaatgattcttgctgaaaactgccatcgggattgttgctgcaacaaccacctccacatgtttgaggcacaaaccgttcgctgtaagctccttcaagcaatcttagcattgctgcgtcttgtttagatgattggagctgattttggtcttgtatatgtggagagggtgatccttccatgtgattgcaagcattaaaagaactgagccgaggcactgggcggaaaagcgttggaggatccttatcatcttgcctagaaataccttctccgtttgttttctctacgcattgttcttcagacatttccatggaggtggtagcttctttgccttctggagatacaattggagtagttacatggcaaccaccgcctgaagataaagtttcttctgatgaggctactgttgtcgttctgtcaaatccagaatcatccacgaccaagcttccagttcctatattcttggccttttcaaagtctatgaatcgacgtcttaaagc

SEQ ID NO: 29113 - DNA, 1440 bp, Arabidopsis thaliana landsberg
gaaatccgaatgacgaaaatctccctacagattcccgccgaaatgttggaagaagactcacaaagaaggaaataataatgctgtgattggaacgatatagaaatgaaacgcatacattgcaacccaaagtaatttgaaccttagctcatgagtcatgacttgtgtttgtaaagttatttgcgaattgctagtattatttttacacatggaagtcgaacccctcctaagtgtaacactcgatgatttttcaacgcttaatatacaattttagcctggacataaatcatgtgtaaatatgtactactgtagtgtgttgatataaaatataaaaaacggaaatgaaaaccaaaaatatcaatcacaatgtttattattcattaaaatttccatgtcttgtaaattatgatctaaattagttagggctctttaagtaaaataaacaataacaaaaaaaatcattttcataattcacattccctggttttctcaattatagttattaaaccgtacaatacaattgcacaaaagccttccagagatattacaactccaacaacaaacccaaagacacataaatgatcaatcaatagacaaagattcatctaaaaatgatccaacggccagaaacccattacgatgcaaattaaaaaagcaaatcacgaaaaattcatcagattaacaacgttgaatttgacgtcttcagtaatcggtggtaggcaattgctcgtgggcattttcatcgatgaagacaaagtcgtagataattccggcgagtccaccaccaataagaggaccagcccagtaaacccagtggttggtccacgtccagcttacgacggctggtccgaaagcaacggctgggttcatggaagctccgctgaaagctccaccagcgaggatgttagctccaacgatgaaacctatggcgattggtgcgattgttccgagactaccgttcttggggtcaacggctgtggcgtagacggtgtagacgagcccgaaggtcatcacgatctcgaagacgagagcgtttaatgatccgactccggcagagagaccgaacgctggaattggctgaaaaaacaatcatttgcaaaaaggtttatttacttgccggagaagttaggtcaaacgggttattttagttggaatattcaattgaatttagttttaaaccaaaccacaaaatagagaaacagagaatcgaaaatactactaaaatctaattaggtgtaagtgacgttacctcgccaccggtggcaaagctaaggaggaaacaagcggcgacggagccaagaagctgagcaatccagtagagaatacccggaggagagtgatgttaccaccgagtaagacccgaaggtaacgcagggttaacgtggccaccgaaatgtagcgccacagagaagcgacaaagagaccgaagctgaactaagcacg

SEQ ID NO: 29114 - DNA, 1301 bp, Arabidopsis thaliana landsberg
agtatttgtttcaaaattgaatagtttcgttgatggaatctttttgcccactgactgcacgaaagtcactgttgaatttttttaacgttgcaaaattatcatttcgattgtttttttgtaagagttaaaatcctactatattatttgtgaagtacattttaaatgtaactttattttttgtaagtaattacatatgtatgtcattaaaaataaaattttaaaaaataaattaattaatctctttaagaattaaaaagtcaaatactaatttaattaattaaattgaattaaaaatgaaatacattattaatttccaaaaaaataaccaattaaaatcaacaaattagatttgatatctaaattatcatatcaattttttattaattattatagttcacctctcatctttatatgattctaattttgcaaaaaataatatcatcgttataaaaaaataattagagtttttttcgcatatgccataatttgaatttttaaaaacaaatataaactgttcaatacataaaaatattataacagtcaaaaatagatttaagaaaactttctactgagtaacgggtcatcatttgaatatttatattcaatttcatacatattattttgaaaatttataatcttatatacaacaataattaataacatattagattttttttatgtgtatgatgtgattcaatttttaatacaagctggaaaatcctataattgacgggtttagatcgatattaatacaagatggtataatacaggtgaaactctaaaattaacaattaaaatacaagtgtataatcttaaacactaaacaatataaataatatcaacaaaacatatacaactcgcagtttactatacatttaaaataaaataatattatcaatttataaatcatctttacaataaaaaattttaatttaactaaaatataagtctacctgcgatataccgcaggttaatatatagttagctcaatatcattgtaataattaaatattatttgcttcgttccaaatattttataagaaatttagcagagttttacgtatttgctttggcctctcttcagctacagttaaagatccagatatggcggatgcagtagcaagattttgttatgttactattttatttctccatacatgtttccatgaaattaaccaactacagtaaaacctctataaattaataatattgagaccaaaaaaatttattaatttggagaggtattaagttatcgataaattaattaaaattgtacaaattttgtaaatttcttacaaaaa

SEQ ID NO: 29115 - DNA, 2434 bp, Arabidopsis thaliana landsberg
agctacctatgacatcgcagaccacacaagtttgttttccggaataactcagggaaagtccacgctttgttgcctcattgagtactcttgcagctcgctctttctggccagccaccacaaagcatccagaagtgcattgtaaaaccttattcccaaaccacatccttctgaattgagtttgtccaacacgtattccactatctgccaatttgagtcatcatcataatctcccttgatcatttgcccaataacttgatgaatatttgatactctatttgaaagcatctcctccaataactcattgacatcgtcccacctataaaccaaaaaaaaaatttgaagtgttgcttaaaatcttaagatgttatatacaaaacaatggctaaagttactgcttatccagaacactcaagttagctgcaagaaaattaactagggtgctacattacactagcatatctcccccatgcctgaccatgtatagacagaaggcaactgaaagagcaaaatgctatgatgatggaataaatcatcatgcttagtaaggtatgagctataaaaatacacgcaaaagaaaacatcagaaaccgtgtattactggcgaaggcactaacctctcgttcttcccataatcagctagcatcatacagtagcacatgatactgggcagtatatcagaagctttcatctcctcaaactgctctctgcactcatcaacaagccgcgcaaaagaatacacacttaaaacagcctcaagcgtcctttcatcaggatcgcatcttgacttctccatatctacatatgtcttcacagcctcttcaaatttgcctccttgcttgtacgcttctatctgtgcattgaacgtatctctgttcctgggaataccagaatccaccaacctggacaaaatcgcctcagactccttgaccagtcctccccttgcaaacgaatataacagtgagtggaatgtttcaatacttggattgcttcctacttcatgcatggtgttgaaagcaacaagcgcttcttcatataaagcagcctgcccaaacgcttcaataaccccagtgtacgccttggaacttggcacgatatcgttagctgtcatatattgtaagatcttcctagcatcttcgtgaagtccccccttcccacaagcaaatattataccctcatatgtctccatgtccggttcaatattctcctccaccatatcatggaacaaagttaccacctccttaaaataccccccttccccaaaaacctcaatcaaaatgttatatgtagcagcatcaggatccgtattgcttgatttcatctcaagaaaaagctgcctcacatcatcatacctcccactctgtccaaacaaattcagcaaaacactgtatgtatttgcgttcggcgtacaccctgcagcttgcatctgatggaagacccccattgcctccttaatagacccggatttcgcatatgcctctaacaacacattataagaagtgatatccggcaaactaccgccggacgcatctcgcctaaaagatcacatactttctccagccggcgtaacttcccaaatgtctcaactagatgactatatgtggttaaatccggaacaatcccaccatcattcatagtcctaaaaaccatttcagcctcatcacctaaacctctaatagcacaagcactaagcagtgtattataagtcacgatatcaggttgtatcccctcatgtctcatctctgcaaacaaacccaataaaccctcccaatctaaaccacctctagcacaagcattaatcacagtgttgtaagtcaaaatactaggtgatatcttttcattcttcatcctatcaagaagctcaagagaagtctcataccgtccatttcgaccataagcattgatcaaagcagtgtaagagaaaacgctgcgtgacacaccttggctaggcatttcgtcgaatacctcaagacatttatctagtagaccttctctaccaagcaaagagatcataatagtgtagatatgctcgttaggtttgcaccatatctgccgttgcatatacttgaagagacgaagcgacctttgccaatcgccgcgaccagcgaactctttgaacacgagtgcgaaatcgttcaacgaaagcttgtttttgaatatgtctaagcacctggcgatgctcccgcgtggtgggagactgctcagcttgttaatcagcgattcgacgtcgtagctgtactttcctttctccacggagacggaggggttcccgagaacgagatctttagtctttgctttgattttaccggagaaggagcatggtttacgatttcctcctgagaggaaacggagacggttgccgtcggcgaatctccggtttccgatgaagcttgaattctggatgaggaaggagaggtggtgtgagttggcatttgcc

SEQ ID NO: 29116 - DNA, 2657 bp, Arabidopsis thaliana landsberg
tctttgttgactaaatagtccaatataatctagcagaattagaaattagatttaattttcttaaactagatccaagcatcatacatttttattgagcaaatcaaataataaatgaaattcccatccggataatataatatccctaaaatcaaatgacatgtctctttttggttctaattttttcttgatattattttgctctgaattttgaaattattctgtttctttctgtagatattttctttggaggtcgcatgatggatggaaagaagctgttttatttatccacttaccaaaaaaaaagattatgtattgtgtatatgataaactactactaagtgcaatgcaattgtactagcattaatgcatgagatcctacgattaaaggtatttgttttataggcttatagcagggatgacactacctaaagaatcagagtgttgcacccaattctgttaatgatacaaaagactaattgctctggataagcccaatatttaaggaaataacaaaactagtaaggtaattaaatgatagataaactttagtaagtacttattagccaaaatatcattgattcccttgaacaaaatattccgtgtttggtataaaatgattccacaaatataacatcatggtatttttaggaaacaatgtaaaatgagaaatcgaagtttctcagcaagtcaagcttctgtatatagagagaggtcaagggtctgctttttaggcggtgggtctggcaatacacgtagttggatcttatgacacatggagcgtaattgcgtaaataatgttaagtaacaaaaaacgaatatcagaaaactcatgggtaatagagcctttgtattaccctaaaaccgatcactgtatgatgtatataatcaaactttctctacttgacactttttgacgccaatctcagtggctttcgtatgggcacactatctatacatatggcactcttcacaaacaccaaaacaaaacaaaattgaaacaaaaattaaggttaaatagacaaaaaatctcgtacccgggactggctttctagtgggtaagacaagattgtaagttaactcttcttgttaccaaaatttggtgagaggatgatctgtttttgtttttttactacgagagatggagagccatttgctgtagtagtactttcttttgagatgcatttatgactcctttgcattctgcatcgagtaacacttcattcattatggctgcggcatgccctcgtggttcatccgatgctcttcttagcataaacacctgcatacacaaaccaacccttagatcatcatcaattacatggtacagggagtttctttcagctctacttccaatgtaatgtacaatttgtctcaaggttttgccgtgtgattgatagagcgaaatgatatacctgcccgtggtgagttatctccaagcagccaggttgctggataaacggttctccatctatttgaacaggaaaggactagaaacatgtattcttattacctttccctgtgctaacctccttttctgagaaagaccgacctgtaaggaacagtgacgggttataaatctgctgaatcaattcaattaaatcttttagcctcacattaagtaaggattactgctcaaaatttatgtgcaggtctaaagaaaacggaattaaaagtatcagaaacatgagtaaggagcaattcgagatgagactagacctgtagtttgccaaggtgccacgctccacggacacataccacctctagagtcttgtcgtgcatacactgaatgctcaaattatcatcgtgttcataatcattttgccaaagatctactccacccatatagcttccaatgttaagtactattagaccctctgaatcctgagaggataacaaattagggacatcagtttccagaggtaacaacaataattttagcctttttggtaatgtcaacctctctcgctcgggtcccacataatcaaaacgttctccagataggaaactaaaatgtcgttgtcagctatggtttttactttttatcaagcaattatgcgctatctttcatgctcaatttttacttaatatatgtttagtgagtattggttggggtttccatattagcaaagaacaaaaaggcacagtatgaggaaagtgatacggacaaatcctgtaagaacacaccacacaagatggggaatgaaggactaatgtcatttcagttaagataccttaggaatttcaatgtcttttccatcaacttcaagccaaacttgccatggtaaatcggcacatgctcgatccattatatccctcgcaccttctttagcatatcgtaatttatttacaaactgcaaagaaaacaagatataatatatcagccatatttttctcattgaaattagttacttaacgggttaagccgcaatttttacacccacaatttttacaccaaaaaaaaacaatgaaacaaagcgctattcagattctggttctcaatatatcatcgtcacaacagcagtacctgactacaaaacttctcaggtttctcttgccgcatcatatgaaattcatatgcaacttttgcatcgcagccaatacctaaacaaaggaaaatgtcacaaattgttcatgatccatcacagggaccaacccaa

SEQ ID NO: 29117 - DNA, 2115 bp, Arabidopsis thaliana landsberg
tgtctgtgacagatctatcgaatgacatgttagattcagaatttaagctttcaacattggtttcaggaccagcaaaaatgacctgatcccctgaatcaccaccatctggcttattggatttggcagagatgagcacggagtcgttaagatgagtagatgacgatggaagaaatgttggaatgccatttgaactgatcagaccgatctctttaaccaaatctctgttgcaatcctttgtcacaaacttggaacagatctcctcaaaatggtatggggaaatagattcttcttcttgatatcttatcaacccagaatcaagttcagaaacattggatatttcagctacatctttgccggcactagactttacattaagataatcggatttcagactttctttggcttttgaagaatcagagatgtccttgccttcttcagttgctaatgaataaggaatacacttactctcagtgtgatcctcaaactcatcatcacttgcgaatgttttatggcatatgaggcagtgaatcatagatggcaaaatggattccaagcattcgcatctacacaatttctctcgctctgcaacctttgtcttcttcccccgtttttttaaggtttccatctccagtttgatgcatggaccatatctcttctccattgacatggcagccttggtctcaagacccgtagcaaataccggagcagataaattctgagcttgtttcttttccttttgaacgtctccatatcgtaaccttttccaccacaaaatagactctctcaggtctctttctttcagatcatcatcatgaagccattggacaagctcgctgatctcggtttcagtttcataatacgtccagggtgaaagccttagtcttccatggtcaacggtatggagaaacggagaggggacttttgaacctatcaaatcggcttgaacaggtttctgcaaagatatgcttccatcaaccaatatacgaggattttcatctgggaagcagcaaccccaatataaccgaccactagcatcggttcccagaaaatctctccgtatagattgctttagaagctgtgattctatgcttctaattgattgctgaagattctgaatttcataactagtggcactcaaatcctgctgacaagcctgcaactcttgggcagccccagaagatgcatcatgagctgtcggcaaaaataatgcattggaatttggtgaatgtgtttcatgattccttccaactgacttaagcaaggtctccgaggtatctttttcaggcagattatctgttacaagaggagaggtatctgctataggtagctcatgcctcccaggggatgatattgtttccggggaggaaattttgctctcaccgaaattaacatgcgactctccgggttgagtatcggtttcaagtggagatttaccttgattcttgttaagatatgcagtagaggaagtctcatcatcacgagtaactccgtctccaacgccctcctgtggttgtggatcacatcccatttggtctgcaaagtagcttgaattatgtggttcgcccacttccttcagaatactcggttcaacctttgccagtttagccgtcaggaattcttgccgcatttttgcgtttttccattctgaggaaagagagcgtaacttctgctgcatttcaattattgcttcggcacactgctcaaggtgttgatggacaagagatgaactaagcagttcatcgcatagaagcttaagcagcaagattctctgcatcagaatagggaaaaattcaaccataataccaatggaaacagcaccaaaagattgtaagaatttataggtaaagggatcacttgcacaagtaatcaccacgaaataaaatcatgttgggaatgaaaagttgacacatttcgaatgaatgagcaaaaaatgggagacaagtttcaaaactgacctcctcagcactaaactcccagtagtccttttcttccatcacatctgccaggtgagcagtcagttccatagaagctagggtgagttccccctgatactttctacctttccgccgcctaactagtttgtaagattccaaagcctcttgagccaggcgctgg

SEQ ID NO: 29118 - DNA, 1179 bp, Arabidopsis thaliana landsberg
ttggtgataaggcattttacgcagcgtctccaaatatatctcgggtgagtggattttctcatgagcagaaatggcttttgttgcataaccacaagcacatcatattgtcaaaaattctgcaacgcactacaaatgcgtaacatgaaagccaatcattctaatcataggaactaatgtaaaggtaaacaacatcataattcatacctcgctattaatttccttagagagatcaatttgattttctaccttatcatcgacactctgaatcctttgtgttaaatgtcttttcgcaacctgataatgaaacgagttaagatccagatttaactctagaactaaatatatcaccaaaaacaccatagataaagcatataaaaactcacttcaagggtcttagaaacttgctccatattatttgtcaagttagccacggtagtagccatgttagcttttgtcacatacataaaggtcagtgaacaatcataaacagtttttagttccatacaacattgaaacctcctttgaccgaaatagtgtgtatgaacatcaagggtttgtaggttagctcaaaacaaccaaaaacgaagagagtcctgatgagcacacacacacatagaaaacaatacctaacaaactatttgagtagaattataatttcataatctttacataccacaagaaacaccattcatgatcgttatctgcttcagcgaaggtaactgtcaaacctccattgccaatcgttgaaccttcacattattcccaattgcaaaagaaatcaattgaatttagtacatgaagaatctggcggaaccaacactcagtcacaacattttcacacttaattttactcttaatcaacagaatcatcagagaaatctcatgttttatcactagaacaataatcgacaaagagaaaagtctacaagcgtgtatttttttttacaatcatcacctaatcaacggttgacatgtaactctctcaaattcctaaaactatatctattctaaatacatgattagattttgaacccacgctacatgagggtaggtttgatatattttgataaaaaatatatacaattgattatggtttttaaataaagtaaaagtttctttcaaatataccaaggtaaaaattttaaaaacaaaggggttaagaattataaatccatttat

SEQ ID NO: 29119 - DNA, 1758 bp, Arabidopsis thaliana landsberg
atagcacgtctaaggaaaatgcaataagaaaaaaaaaatgggtgttcgtcttcttaatacctaaactaagggggatttttgagacaaagctcgacaagtcctccgcggcggtgtaaaaatcagtcggagctatggcgatgcaggccggagttggcttatctaggatctttctcttagccggagctggtacttcactttgattttctctgctcaatctaactcgctcgtttacttactgctaattgcgatctgtatatcatcctgatgcgttttccgatttgctggattcaaggttatactggtacgatcatgatgaagaatggaaaattgtcggatttgttgggtgaattgcaggtactttttgattctatgcattttttttttgtttctctccttgatttttttattttgactaattgatttgtgctttcgatagagtttggtgaagggaatggagaaatctggagaagggtctgagggagattctgatgtttctgatgctatagctgcacaggtacataaactcattttcattggatataggaatattggtgaggaatggtattgatatcttttgcaatattggtgagaaggttcgccggttggctatggagattcgacagctagcttcgcagcaacacataacggtcatgaatggagtttctggtggtatgtgaagattagggatttgtatttctactcaaatagttttgctaagtgtgtctgtgtgtgtgtgtgtgtgttcatcagactctcttgttttttcagcaaacctaccagcccttgctgttcctgctgcggcattgggagctctcggatatggttatatgtggtggaaggtgggattactaagttttcaatctcttctcttgtgaattctgctgttttgttgaaaagagatttcagtgttgtaagggaactaaaaactgtttgtgattgttcactgattagggactctcattcactgaccttatgtatgtgacaaaagccaacatggctgctgcagtggctaacttgacaaagaatctggagcaagtttctgagactcttgcggtgagttttttttgttgctttgtgtatggtgtttctggtgatatattaagctgcagggttaaaattggatcttaattggttgattgtcaggctgcgaaaaggcatttaacacaaaggattcagaatctggatgataaggtagaaaagcagatcgatctctcgaaggaaatcaatagccaggtatgataatgatgatgtttaccttctctttagttcctatgattagagctattggctttcattgttatgcatctgtagtgtcttgaacagttttggaacgtgatgtggttgtggttatgctacacaggttatttctgctcgtgagaatatcagctcacttgagatggatttggaatcattgcataatttgattactggactggtgagtcttagttttattttgttatgccatatataagcaatgctgaatatcaatagttttcttctctttcacactcaattggcatgtgctttactgcatctgtcatgattaaggcgattgcagctgtgaatcattcagtctttaagattagataaggaatcagaatccttctctatggcatttcactccttttagtatatctcctaattattttggcatttaaccttgttttgcaggatgggaagttggacacgctggaatacaagcaggtacattcatcttttatgttctattaagcaggcatcattacccagagaatcacc

SEQ ID NO: 29120 - DNA, 2953 bp, Arabidopsis thaliana landsberg
tggataacatgggcaatcattgggaaatgtttctttaaagcgggattaaatatatgcaaaggggaggaggcagattattatcgatttcggttttttaatatgatcatcgtaatttagtatatatataaaaaattgttcatcgcatatcaataaagcacgaagtctagatatactttcatgcttttagctaaaaataaattattatgtgatctggtacaagactagtaaaatcactatttaaaatgattgattctgaatcatattaaaagagtgattttgaaaaagtttgttgctggaacaacagtttcactttcgagttttctttaattctttgaatgaattcacatgaaaagcaattcataattgtaaaatttatttttaaatgtagtaaaccccacccactgttcataaaaaaaagagaggaaggtagtagagaattgggcaaatttgccaagataaatatataaattcctattgaataacaaaatcaactagtgtctgcatacaatattatctatgaatggcttaaaaggagagtgtcttagataactcttcactttctccaaaagtcgctaatccttaaaatgaatcacttatgttttcctcgattttcagtcgatataatcactatattctacacgatctatcaaacaaaacacacaacaaacgattgacgatagtgttaatttgccaaataaacgtttttagcatcataaatcaagaacaaatgcaacaataaacgattgattatatggttaattgcttaataacattcaagcttatgcataagataacgaagtgtgttcatttctataattaaaaaacacaatgcaggatgtaaaagaagagtcaccaaccccataaaataagtaatcatggctttttttttgtagaatcaaaggcactcaacggtatcaacggaaacagttggtgatggagatattagtgttggaattatgctttttctacgtgtcttgcattaaccataaacctattttttatcaatagcttgacgcgattttttaattacttaactcaatatctaaaaatttgacagtaacgttatatagaattgaaaggtactccatactaactactaatatataattaaccatcattttgtgattaaaaaaaatcaatactcctcacaaatataccaccatattggaaaaaatatacttaatcgtctttagtccttacaattccatatcttttgggcttcgtatttatacatcttatccaatcttgatgttgggcactaaaacaaggccgagaaggcccaaaggtattttggctccgattgggttgtcaagagtagcttcaagttgaaacagaggattgaaaaatgaaataaaatacattcgtaaactgaaatcaggaattagcatgcataataagaaacacaaaaaaaagaaatacatttggttttaaaaaagagagaactaaaagaagaaatcaagacttcattttacaaactttgatctcactctcataagtagatgtgaggatataatacatagcttttgaatacataaactttctccggtttgtgaatgacgaggaccttaaaaacttaccaagccaaaccaaacatggagattagctacatagtaaaactctatacgaccaacaaagaaaactaggacagattcaaacctaataaactcatctgcaacttgttgaaaatttcagttgcacagaagattaatataaaatagaagactttaagaattggccagtttactaattgcatcccaatcaatctccaccgaaggaaacttccgaagcccgaaacttccaatctcttcaaactcagtatccgagaaatccaggaatgttttatccgacgatgaatattccgcctgcgactcatccaacaacgaggtctcatcgcttctcggtgactcattagagagctcatttgtctccaaatgctctcttttaggcaagaaaagctctgtttttggcaggaaaagctctgttttatctgaaacagagtaaacagagtactcctttgtttgatcagaaacagagcaaatttcctctgtttttctcaaacttttgcagatagcttgaagcttggtatcaacagaggaagggagaggattcatgtcttcgtgtatgaggtttgggaagttaagcttcgcgatatctccacggagctgaaaagcagcttggtcgtaagctaaggcggctttttcggcggtttcgaatgtcccgagccagagacgggtccggttcttgggcaaacggatctcagcgacccatttcccccagtgcctttgccttacgcctctgtagagattcttggttttggaggtagaaggtgttaagttcttcattctgatacggtttggagagaggtttgagattgtgctacgtctatggttaagctggttctgaatctgatgaatttggtatggtgtgagctggtttagaccgagaggcatagatttgtttacaccgaagctcgtgtttgggacaggaaaagaaagagaagcagtttccatgagaggattgaaatagagatctttgctgcttgtgaagatataaagtttggatttttataatacaaagatgaaacccttttgaaagaaaagacgacgaacaaagaaatgggtgaaattgatcaaaacgaaacttcagggtcaagaaaagagaaactcaaatttttaaggtgaactcgtgcttcctttttttttttttatataaaaaatctctcgttatgttgcttgttctgaagctctcggccttttaaaggccattgaattcgtctgaatatttaaggcaataattgttttaatcaatccatggccggagtaaaccaataggaaattgccatgtctacatgtgctttggatctagccgtttccggggaatataatataaaggctatatggggcaagttctctataatatgtgggttttcggttgtgaatttagacatgtttta

SEQ ID NO: 29121 - DNA, 2538 bp, Arabidopsis thaliana landsberg
gcaattgggtcgaaacctgtatttaaaagtaacataaatacttaaaattttactttagagttagtttatatataaaataattagcaaagtcaacggagtatgaatgtggtaagatactttatcaaatgcctctaaattaatatcaaagctcctgatggacattcctttccttacacgagtgtttgtcttactcctaccaagtcaatgattcaatttgtaatttgtttacttagattaccgttactaaaaaagagagttaagtgcaatatataattaggcaagaaatgaggggttttatacagtacactctattttctttagtatttgatcatttaccaaagactgagtcttgtttgttaaaacgaccaaaacaaaatatatctatgatattgatggacaaataaataggagagttaacaaagaaagggtatgtaggtttctaccaaaaaaaaaaaagggtatgtaggcccattatggcagaagcaaaaaccgaaaataagcctttcttaatcagcccatctcaaaatctctttacttctctctttcttgcacttgtgtgtataaggtctatgttttgttcaccgtaagagtgtggtaagaaatacatacaagttgtatgcaaaaaggttttagactcgtctgagcaagattttagtgggttcgaaattccattcctgaaatacgtagggtttcgagctttgcagcctgaattagtaaattgtggcgtcttaaattacatttttgttaaagctcttaaacacatgagtgacaggccaaggtagagagagtaattaaatgaacagagctggaaactaagtaagagcttgaaccttttttttcttttctttaactctttagtcgtatcagtctcagcagatggaatgacaaaacaatacatgtaaacaattttcttggcttacaaataacattttattagtttttatgtggtgcagacaaagaaaaaagcatacaattacaaaatatatcagtacctttaaaactcttacattctatatatagttatatacacattgattcccaacagaaaatggtagcctatatatattgagacatttggatgtaactaaaactagtaatagcttagctaggaaagagagaagaatgatcgtttggccggaggtcgtccaacggctctcatgagattagcaacttcaagaaccctcgcaacctccgtccctcgtttaccttccgccgtggctctcctctcctccgccttcctctgagcttttgccactttgttttgtgttttctccatcgccttcgctctcctatcttccagtttcctctgcatccacatatatgtatcaatcgcataatctattattccaaagacaacatcgacgtctatttagtcagtcttttggatagctttatcacatttcaaatatttgatatatcaccaccattcaaggatctatcgtttatttgtgtttctgcttttttttcaaataaacccataattcttacattttgattttttttttttttttggttggataaaatatgcattttataatttgtaaaaaacgcttgtccacgtttatcgtttgcaatttgaaaacgttacatagctttttctaaattcattttgttatacactgtaaaagcaaacagtttcaagaaaagcatgttataagacatcttgttctcttaatcgatcggatctaactaagatattcgtaaaatagaaaaaaaatgagtcacctcgattttcttcatccaagagttagctctatgaacctgctcattcaaccaaccgttaataacggcgtcttgtctcttaaacctattattaatcttagccagttttgccgtctgccacgccgttatcttcgcttccacctcttccctcttaactctttgcaccgaagcagtcgtaaccatccggttctgaccacctgatgacgccaacacaatattattctctgaaccggcccggttgttgtaaccgtccggtacaatcgcccatggatttgaatcctcctcaggcacctgaccatgatcaccaacgtcatcgttttctccgatcctagtcagctcgtttctttcatcacgtatgacgtcacgatgaccacctgattggttagttccgttactgttgttgtccatggaagatccggcgatgactagagcgttgaactctctgctcacggtggtgaaattctcaccggaagaagtagttccgtcgctaaaagcaatagacctcgacggagacaagtatcctcctcctgatcccctttgttgtggccgagtaagctctgttgtcgtcgtcatcgcgtgaatatctctcacgactatctccgacgacggcgtctcatcccggcgatcggaagcatcggtcgtacttgtggtggagttctccggtgacctttcttgaccgtacaaagtcaacatcagaatagttgtagtagtagtagtggagtgttgtaattagctagtttaggtctgattataattaggtgatggaaggagaagaaacaaggtcaggaataaataatcaatgattaggttttaata

SEQ ID NO: 29122 - DNA, 1219 bp, Arabidopsis thaliana landsberg
gcaccggttactactacggcccgaatgcgtactacgaccctgccaccaacagcgtcaccggcagcccgcatgcgcccagcggcagcttcggcttcgacgaacgcggcaacggcctgctctatgtcgatccgtcgcaggactacggctccggcatggtgctgaccgatccgcagggctggggcgccggcaacaaggtggtgcaggccggcttcatcaacgcgccgcacaccgtggactacctggccaacctgcgcctgagcgtggaacgcgacttcgtcagcggcccgttctccagcctggagttcggcgcgggctacagcacccgcaacaagacctacaacatcgaccagaacttcctgaccctgggcggcggttccttcagcgcaacgaacacgccggtcctgtcggcaccgttctccggcagcagctgcgccccgctggcgtggatgggcatcggttcgatgcagtgctacaacccgttcgacctgatcgacaacggcacgctggccgaggtgccggtgttcatgtcctcgctgccgctgccgccgaactggcgggtgcacgagcgtgacgtgaacccgtacgcacagctcaatatcgacaccatgctgggcgacatcagcctgcgcggcaatatcggcatgcaggtggatcacactaatcaaacctcgtccggctcgcgcgtggtagtaaccccagccacttggtttacaaacgggcataccgagttggttcctgtgtcgggcggtaccagctatacccgttacctacctagcgccaacctgatctttggcatgagcgacaacgacgacctgcgcttgagtgcagcccgtaccattgcccagccgcgcatggaccagatgaacgctagcctcgctgtcaaaggcgacgatacccacctgtcgtcgatcaatccgaaccaggcgttcttcagctcggacggcggcaacgccaagctgctgccgagaactcggacctgtgccgcgatggcggcggcggtggctacttcgccgtatcgggttacttcatcaaactgagcgactatatcgacccgaacgcagcctatctgtacgacttcagcgcgttcgtgtcgtcgtacctgaccccggcgaatgccgccacgctgggcaccacccagggcatcgtcaccatcccgaacaacgacggccatggctatgtgaagggcgcccaggtcaccttgaacctgccgttcaacctg

SEQ ID NO: 29123 - DNA, 1443 bp, Arabidopsis thaliana landsberg
taagaacttggccccgcctgagatagaagatgtgcccaccgcctcaaagcttggcctcaccgtcttgcctagcttttccggtgatggttttttggctcctccgctcaccaatcgtggcgtcataattgttgagttgtgccaatggtttaggcttcatttgggcctggaaacccattacctttggatcgtgagtcatgtcttggtaatggttgttctttgcttctctttaactcacatagattatctttgtgattttaccaaatctcctctgttaccttcctccgtttggagagacttttctccattatggagaattattcctcatatatgagatattcttcctcatatatagagagaccaattccctcttcctcctctttgaaggagagacctttttcatcaatcctctcctttagggagaatatttctaaaagctcagccctggtggcatcaagctttattgttgttcgccagccttcaatggcaaaagaactaccatcactctcttctttatttaaagaccaagagtcgacgatcgtatccaaatcgatcacttttgaagtcctctcgaaggagcttccggttatcatcaatgatgttaatctactatcttactgctttcatgttttccctttcctgtttgtttctatttcaaactttcgacaaatgagttcttttgcaaagcttgatgctgttgtaatcgcaagttaacttaatataagttgtttgacaaaaaaaaatgagattatttcaatatatataacaatcttatttcatttcacgatatttaatttcagattttatatactctatcagttgaacaaaaaagaattcacattttaacattaaaactagaaacattggaacttgatatcatagggttataacaatgattattacacgtactttaaatttgatgaacattagaacttgatatcatagggctataaagttgaatatcgaaaagggacggctacaagtaatttgaaacatagaaagaatttcgaaaataattactttatatatctaaacagaaaataaaacatagaaaatatagtatatctattttattacgtaaaaaagttagaatatgttttgttgtacaataaaaaatgtaatgaaactcatactaaaaatttactcttttacatgtgcaaattgcaggaattatatcgagaatcattgttgcttttaaaatttaataatcaatgataaatttttaaataaatttaactctcagataaattaacaatttatttttgaaatttatggttttaaatgattggttttgataatttatatgtttgttgtgtgtattcattatatgtgaatacttagctaataaaacgggattcgtaaaactaatatttactaatatatacacgtttataaattcttcgatacactaaccgacaacgtatatactaacacatgacgttttcc

SEQ ID NO: 29124 - DNA, 1685 bp, Arabidopsis thaliana landsberg
gatttcagtgatctacaatcatgaaagacgctagagaatatgtttctaagaaacttgtacaagaaaaaaagtatgttgtatacaaaataaaataaaaatattaacataaaaaagagtgatgatcttgtcttttaaatctaccaatttagccactaaacaaattcctttcgttcatcaaagtccacaaattcactgaaattaatgattccaagcattttttcccaccaattcaacaatttttaagtacaacactttagtgattctaatttacaaaaataacattttgttgtaaaacaaatttagtagtactagaaatttccttttcagggagatgcaaaaattcaattatcacactgctattttggtcgaggtgtaataaaaaaacaaggagacaattgcggcgtggaggctttctgtttacatgcagcacaagaagggccacatgacatgacatcatgtgactctgtttcccatagtcagagaaaagaaaaaatatgacgccagaaagcttgttagcgtcggcgtcgatcaacataggactcgccgtcgttgcactctggctcttctccgtcctcaagaagcagccccgtaacgccgtcgtatactatgctcgccgcctctccgatcgccaccaccaccgtcctctgtctctacactcatccctttgcctccctcgtttccttccttccgttgcttggatcccacgcgccttccgtgtccccgaggacgagatcctcagccgccacggccttgatgctctcgtcctcatcaggctcttcaaattcgggtaaggaagatttggtcttatctcgcatataaacacgattatcagattctttgaactatgtgcagaattagattcttcctgatgtgttcgttacttggagcatcactacttcttccggttgattattacaatgagtcagatttaccgacacgaagagagtattcaatggatgctttcacaatatcaaatatcacacgaggttctaacaagtaagccgtttcctttttatgtcttaattaattttgcatcatctctcttagagttgtgtttcttgatatcttgtcttaattttcctaggttatgggtgcatttctcatgcttgtggtgcatatcattctatgcattgtttttgttgcataaggtaagcttttactcttgtctatcagtgacggatttttttttgttatagaataggtttatttactggatcttctccatctaggaatataaggagattcttgtgataaggcttcaacaaatgaaagaacttagacatcgtgctgatcagttcactgttcttgtccgccaagttcctctctgccctgagcataacactcgtggctgcgccgttgatcactttttctctaagcatcatcgctttagttatcattcacatcagatgttgtatgacgggagagatcttgaataccttttggtaaggtttgaaactttgtggtggtatcatctttgcagtttttccttcaatacgtgatggtaggatcctttatgtaggggaagcagaagaagcttaagaaagagctagaagacaagagacacacagaaatactttcaaatggatcacaagaacacaagcaaatatccacatctgaagaaaaacttcgagaaattactcatatgatttaccaccttcaaagtgaaactatgctcagagagaagg

SEQ ID NO: 29125 - DNA, 931 bp, Arabidopsis thaliana landsberg
gtatattaaacttatactaatttctataatacattgtaaatttaaaattttgatttttaaaatttgataaagataactttttaaattattattatgtatactactagtctaaatcatgctctagttcttcaactttctactcaggatcattgtctggtggatattcctcatccaatattctctgtaccacttttttttaatgacttcaatgtgtttgagtttgtttgtgcattttcctaaggcattggccaagatatattgggttttgactcttattatgtagtgtgtatttagttagtcatagtactactttgaatgttatgttacaaaatttctattatttattcgatataattataacagtatatgagttttaaataatgcgatataagtagatgaaaatataatattatttattttataagtattgttatgataaatcatgtgtatccttaatttttcctagtatatcatatgtaaaacacatatataacacaattggttgcaataatgcaacattttcggacagtacagccttttttggaaaaattaatgtaatgtctcaaaacatggggttttctgtaagatttttaactttgcagggttgatcttatattgttttaaactacaggatacgaaactaaataacaattgagaaaaagttggaccagagacccttgatacgtggatccagctcatacatgaaaacataaattaactcattttataaactcaaccttaacaaaatattgttaattttgttcttcaatatgtttttactttgttaaaagatataaaatatattttctttaatcatcttataattttcttgtaagtttttttttagttacgaaaccccaaaggcatgacattatcaaattatcctcccaaaattttaggtctataccatatttatttgaaactataagtt

SEQ ID NO: 29126 - DNA, 1823 bp, Arabidopsis thaliana landsberg
  unsure (1)..(1823): unsure at all n locations
tcaaaaaaattctgttaaaatatttctcagacactgccatcatcgtcgtcccatacacgtcctctttcatctccgcaaagtgccatctgccgatagatcctcatccattgtgtatctgcaaattaatccttataaatgataaacaaacaaactggactatctgttagtccaagtatgcatgcatagctttataatcctttcctaagctggatatgtgattggtaataaactaatactaccatgacaacattgtaccctattcatatacatcgcaataaaataccaaaattttccactaatcgcagatagaggaatcaactaatgcatggtagggtaaatatttatagtgtgatgttgatagctctattataggtgtactatataaatcaatgacgatataagtatactgtatagtattaaacaagccccacacaacaaactgaaattgcatccacatattcatttctcacgtttatttcatctatatatcctaccctacttgctcataaactttcctctcttgtcttaaacttttaacgttacaaagtcacagccacaatattctatcctcaccgatataataatcaccgcaacagtataatcttaccttgatatctattatacggattaaaacccgatttcttacggaacatttgacactttcgcgtagaacataatctgtacatacgaatttcgaattcatatatatatatatatgttggataatgattgtgtttctcgaatcttgtgtcgatttatagtgtagtcatattttagatagctgctccgttcatcaccaatagcttgtttctatggttaatttctttcacttattagatttatctcaaccaatcactcaattagtttctagagattgttgtgattgctatactacatgttaagcactttttatttttgccggatttcttggcaaaaagggttggcgatagaagcaactacattaaattcatgacctaagctaaattacatgtaacgatatacaatacaagatttgtctaaactaaacattgattcaaccaaaacttatatagactatatatttaaccccaatacttatcatataaatgttttcttttttgacgtcaacacaaccgtaaacattcgaaatcttatatatttaattatttactatgcttgttatttcatttgtcgacgttgtttttttttttttgcattcttcagatccactaagaaaaggcaagtccgaaagataatgggcccaattagtggctatataaaaacccgacccggaaagactaaacctgatccgcaaccgaaccgacccgacgacgctagtataccgtaaaaatttgacaatcttcgtctccggcacaacaaaattgttcttcttcggcaagattcctcgattttctccgtgttctgtaatttccgatagattttgacaactctctttgattgtttccctttagctttttatttttatctgccttgttttttttttttttgttgttccggttctattcgtttccttttgttaccttgtttttggttttgatctcaaatcctgctctgctctactatcttcaattcgattcttcatccgaacgaagaagacacaaattggagcttcactggtacatattcttgacgctttatctctgatttgctatttagggcttttcaatgaatgaatttagtttttctgctatgttcattgggaagtaagttcaatcgtatgtgtgatgatttttcaggacgttgatgataaagcatgaatcacggagggaacactcangccgtagcaccaatggaccctaattccattgaggtaattaacaatc

SEQ ID NO: 29127 - DNA, 1823 bp, Arabidopsis thaliana landsberg
  unsure (1)..(1823): unsure at all n locations
tgtgttgtggtactcaactttggatttggatctgtgatgtaggcctgcagcttttatttcaaatagtaatatatatatttgttttccgaagaaaacgaagtaaacgaaatggtgtattcaattcaatatttcacttatcctgtaaattgagaaactaaggtaagactgtaagagaatgctcatacccttctccactacctccaaatagacgaggctctactgaaaaattcggagtaatgtgaaataacaagttgctgtttggacgccatatctcaatttgctatatctacaaattaacgataccaaagtgctagtaagggctaaatgcagaaagaaaagccattcaccattacgggtagaacatgaaattctcatttaggctatgctacttgaatatgttctcgttaagaattctttcaccctagtacaagatccgcggtcatgcttaatcaagtgctaaaagttagactagtagaccaaatttgaatccgatatatatattaccttggtgccgaactcaaacttagacatgctcgaacctcaacaccaagaacactcgatgtttttgccaatacttacataaaagctattggaggatcactaataaaatgattgatcatcaatcatcatgctttgcggactctctttttcattgaggggtaaatgattacaaataaacatgcgcgcgtggatataacgcatttggtcagtgcgtgtggcacaagtcagagtgaacacgtgggacagccagatcacactgaaacacaactccgacatcttgtcggatcttatgtaaagccttgggtcccacttttcataatatctctcaccacgaaacccatctttttgctctcaattattgttgctcactgccgtatctcttcataatttcactatatacatgtctacgttaggcggaaattattaaattgtttttggaattttagtttacaagatatttttttctaaataaacatgaaatatatttacaaaagtatatccaaaccatcatttttttattgtttacatatacactaatgaaatttttatttggattgtgaattatgattatgcaacgatcactagtagtttactagaacaattaagtttacatgnnnnnnnnnnnnnnnnnnnnntatttactaaaactgaagttagtctacaactagtttttgtgaaaagaaaggaatattagacgataaaaaagtaggcagcagttaaaggaatcaaataattaacaagttagcattgattgaggcggatggttacacatgataaggagcaggcgagtgaggaaacaacacaacacgcacgatcacgctgttatgacccacatgctcctatctccatgttactgtacgcaaagtggttatacatttacacacacttgaccaatattgctcacatttaaatttttatgtttaaaggaaaaagcacaaacatttaaaggttttactgacggaagaaacgaaaaaaagtagtagctttaaaatgtcattgttgatgaaagtagaaaccatgatgatgatatttatgtgcaaatattcatctcacacgtatatcattggttcataaccgttggttggtccacaactttgaacaagttcagattctttttgattgtgttttgtaccaaccactccaattagtcaatattccattatatccaacctcaaatactattttcccttttctctttaaaaaatatttggacaaataattggctacactattggagatttgactcagctcggtatgccgtaactaatcaagatactattttctatactttcttttattgatatccacataatacatgtact

SEQ ID NO: 29128 - DNA, 2156 bp, Arabidopsis thaliana landsberg
taccaaacagagcctactctgagatgtgtctccaaaggataactatacaacttgtctcttcttatttgtttcttaacacagagatgattgttgttcgttcattccttagaactgaaacggtcatatatatgcacacgtttttggttggatcacttgatgtaagcttcttaaatacagtagctttctgtaccaaagctgaagaacctgatctaacaaaactagttcaataccaatgaagttgacaaagactaagctcagtttggaatcacatttgttgatttcttttcatcctctggactcaaaaatcatttatcaacaatctccatcagtattttctctgtttgtatcttcaatgatcatttcgtattcagaacaaaacataacgatttggtttcacaaatcgaaaaacatgttacagtattctcagctaaagaaaccaatgtattctcagctaaagaaacatgttacagtattgcaatgttataaaagaaaattggagattctttctactcaaacccaatgattctcttcaatccaggaaacaagccagaaaacgaagacatagacgaagaagaagaagattcgattgttttgtcagaatctaacactcttggtcaccgatttctttaacagatgtaatagataaaggttgaaaatcaccagcccattcatcaacaaactctctaaccagaaccaatttctcttcttctccaatcttgttccattttatcttcatctcatcttctttcaaatccatatgcctacaaaactctgcccacagaatctcaccgctcttcttcatcgcttctcttctctgctccgcgactgtgttcgctttcccgatttctctagccaaatctgtcgctagctccgaatcggtcataatcttcttcttcctcttcggcctcctaatcctcatcttgttgatgatgtcatcgtcttcctcgtctctccttatgcactggattcgggttacgggtcgggtcaacagatggtgaaatttgagattccgagaaaaggaattgttttggggaagaagatgaagtaatctcaccgacatctctgctctgctctctgtctctctttttctccctctgacccaaatggccaatcctttagtatataatccggcgctaatcttcattatattggattctctattcttttatcatcgactaatcacaattaggctctagtacaaaatttgattatttacaacaaccgttcaaactccaaagattgagccttttgagatgtggacgtaacccttagttttgaaggtggaaacctttcgagatattttagagcatctttctatatgcagatccccaattgcaaaaacattaacttcatggaaacagtagttacaagcaagagacacaatacaagttaaatgtttgtgttttgagaagatgtcttggtaaaggaacaaaatttcatccagatatgaatcatttacagttaaaaccaaaagatggaacctttccgacatttgagcttccatatgctcaagcaagtctctgttctcgactcctgatagcgtcttcactctgtttttaagttagtgagaatgagttccgctaatatatcgacccatgtgtcaggaacaccgggtaggcaccaatgcatacagtcttgtccccatattgccaccgcgtcctgcttccctaaccagatcgctgggtgggcatctgctctgaattcgcttagatgggtcagatccagtaacttgatctttgtcgtttgcaactcattcttgatgatttggttaatctttcttgcttctttgttcactccattgttcctgggatcaaaccacaagtcaagctgtctaggtcttagcatcaacatcatttataagaatgcaataggattaaatcgaaagcgaatatctttgccacccatctctgaggaaagcctagagaaagaccagacttgcttagtaaagctcgttaccatacctggttttcttcgagtggcttatcgagcaaacaacttccattctggttccaatcaccaccatagaaatgtcttggtgattgcaaacgccagaacttaagggtcttcgcagggacttctctttggatataagaaaccatatttttgaagaactagttcaaatcctggtaatatatcaagaggaggatttatcggct

SEQ ID NO: 29129 - DNA, 1848 bp, Arabidopsis thaliana landsberg
gccgaagttgatggaagagaataatatcatatcttatttactatttagccctgtactgtgaatagtcattaattaaagagggttaagtctctgttggaattttcagttagattataaaacaaagttgttttgtataagaaaaatcaaacaaatgtgttcctcaaattcctttacaaaaaaaaaaaaaaaaaaaaatcacacaaatatgagactacaagctaaaatattttaatgataaactgttggctaggcttcttctctacaaaagaaaaccaaattggcttgaaaaggaatttagggttttgaaaaaaatcgacatggctccaaaatcatgcgacggcgaggtaaatgatggatcttcgagcgacgtaaatgtgatggaaccaatggaaacatccaccggcgttggcctatcttttctggggaagcgcagggccgaaacccccaaccctggtgaaagcgagcaaatagctgacgaggacggagaagaatacgaatcagtcgaggacgttgttgtggaagacgatcgaatcagaggaggaaggtgacgaagagagtcacagggatgaggaggatagtgagccggaatggggttatgatagcttcgatggccgagagtatcattcctctgatcagatggggtattcggacaaggagtttgatgagaaatgtcgttattatagacgccaagtcatcctaacaaggtattctcgagtagaaaatgattcattcggattttcgtgtatgttgttgttaatcacgtatctttggtttgtttagggtttctttgagccgtcagaccgttttcctcccctctggggtggaattagttcgctctacgatcttgaagcgaacgctgggaaaggccttaccgtccgtgaattctgcgctaacttgacatcttcatgtctcaacaagtataaccaagaagtggcaagttgttcacttttaatttggttctaatcatggctattagattcctaattatgtgtgtatatctaaatcaattatgtcttgttgtttttagggattgaatgtgaagttggaacatatcttgagggcgaattacaaccctggctccatgtccaagttttacattacatttgctgcaagagagtctgattctccagatgcaccttcagaggagtatcaagctaaggccgcatggtctgcagccgagaagacttatcccatcttttgtagaccaagtcctctacaaaagtgaccactcatatagactatacacgttacggtttaggctcttaattttgtttaaagggtgtattactaattgttatatattaattaataacaaaaaataaacagttaagactagagtatacactaagttgaacatattggaaacataatgcaaatatatagataacaaaataatttaaaaactgatgaggaatcattttttttgtctgatggcacaaacgcaaataagtgtcacggacgataaattactatgaattgtgttatctatgcgtttagcttcttgttagaaaaaaaataaaaaacccaaattgaattgaaaggtgaatctaaggtttactcaatcatcgagatggctcctaaatcaagcgacggtgagaccaagtatggatcttcaagcgacggcgagatcaagtgtggatcttcaagcgaaaaccaatcaacggagtcaatggacattaccacgggagatgaatcttctatgctggggtagcgcaaggttgaaaccatcgacctggaggatcccgatgaaaatgacgaggaggatcccgatgaaaaccaccaaggaggataggtgaaaagtgattagtgatttcccgaaattgggattaaggggataggcctttccta

SEQ ID NO: 29130 - DNA, 1192 bp, Arabidopsis thaliana landsberg
  unsure (1)..(1192): unsure at all n locations
actatctactgtacaagggttccacagttttgcaacacataacgcttcaaatataagaggatatataatatgtcgtttcacttacgtgaacatatgcagtgtaatgaccacctcccatgctcccatagagattgctaatcgcatagagcatgtaacgatatgttgtctgaccattcttgtaggagatgtagcttgatagatcaagattatctaacgggaaatccacatatgcctccagcttgttcttgataaaccggctatacgaaaannnnnnnnnnnnnnnnnnnnnnnnnnnnnnnnnnnnccagagatctaactttttaatggcttgccggtgttctttgcacccaggacaatacctaatacagttttgactcatgtcagctaccaaggatcagagtactccgaagaattagtaaagagcatgtcagacgcacaaaaagccccaaaagtttcaagacaacgaaacaaatcacattactatgagcacgattgtcaaaatataagttctcatgtattataaagctgagaatagatatgagaaatggtttgaccctcaactcaccacatgtcatcaggaccaagaggctcctccgtcaagaatgcttcaaggcacttgaaaagcgaaacggattcttggggtctcttagttccagatttggaaacctcaggtaaggagctcagaagacaagtatcataaacgtcaagctcttttacaggccaacgtgcaagcacattcaaccgcttggatttatttacaggcttttctttcaacatttcagcttctatcgagtttcctctgtcgtcggtgaggtaaagcctcaacacaggatctggaagagattcagtagtctccttcacatcagtggaatttgtatcctcaactgaagtagtaccatcggtatctgttttatcagtggcttcttcttcagttgggttttcaagattctctgtaaagaattcagtaggcatcttaaatgaactaagcagcttcaggtacaggttctcgacatcagatccattctcgacatcacaaagccttgagaccaaggggattccaaatgccttccaagttgggctagatttcccagatataaactgcctgaaaaccactggaacggttaaatatttggtccccatcagacatataaattatgcttaacactactgaacagttgttaaactggggctg

SEQ ID NO: 29131 - DNA, 1795 bp, Arabidopsis thaliana landsberg
acccatttccctagcattgcgttcatgatcttttgtcaatgctgctatctgcaataaatttttaattgtttccagtcaaaaataactgcaatgaggtatgagcgttggggaatattttccaaggacaacaacctaccaatctgtagagatgaaagtttcaagctgaaatcttccatagaagttgactcagctggagtggtaacaaagaaaaggatgatgagccactctgagacaatatcttggatcattggaagcaactcaagccgtagcttgcatatgtcttgctgtgacatattaacctgcggaaagaaaaagccaaagaagggggatacatcttgacattagtatcaaaatataaactacactgattccaaataagggggatacatcttgacaataatacgagacccagtgggaactgacctgcccagcgatgttaagcagatagctgatgagtaggaagatgtcaaatgccgactcaaacatcacctttacaaactgagaagtggcttggacgaggatagaactacagatatcagataatgcctcaccatcatttttctgcatagattttttagggaccaaatactgcaaatagcgctccatgatagtaaagactttttcccaagatccagccctttgacataaagcagatagagacagcagcctgtcaatggagaatgttctaagatttttatgagcttctagctctttttcccatgctctatcagcaccaagatctgaccaagtacgttgacctatggtcgtagaatatcccgactcaaggatgttaactaagcgaggaacgatttcatccgatgagataattggccttccggtaattgattcataatacatggcataaggagcaccaccccactgtttactgatcttcgaagtacatcttagtacctctgccagaatttcatggtcgctgtgagacacgcccaagtctaagctcgtcaggttgctgtgttcggaggaagaacctatcaaaaggcaaacacagtattaagtcttaagcgattgaaaataaacaagaaatgttttggtcctagattataaatcatgatcatttacatacctccaaggctgtgctcagcgttctccaatctaaaaaacagtgatacagaattatttctaactaaaccaataacatctgactgaaccaacaacgtgcgaggttcattattactgcaccaatgatggagataggatgtacaaaagttttttcaccaatgaaaaactgaaatagaagtttcagctgtaacctgacataagaaaagacataattcagcttttatgacccagggttcatgctaactaacagtagactggatagcatacattgtatctacaagggactctagaacttaacaacttaacaaaaaccaaacctcatgctcaaccagtaaaagaatctcgcttgtaagctcatcaagacttaaagattgaaactcggaatcagtccagtttttgttgtggtccagtaaagttagacgtaaggcaacattgtgaaaaattccaggacaaagaagcctgcgtaagaagattgacgaaatgaatcccataatttgatcctgcaaagtgcaacataggttagaatggacgtaaaaagtaaaatattgtattggaagttttgttcaacaaaacgaaagctatgttttagcataaagacctttgcggatgaaaacagtgaatgagtagtcaaaagaagatcatgtgaagagctcctagaactcagaaatagctgttcagaaatgtagtcttcctgcaacgtgtaagactgggcttc

SEQ ID NO: 29132 - DNA, 2228 bp, Arabidopsis thaliana landsberg
ccgacgcatccttatcaatcgtcacaatctctaccttgaccggttttccccacccaaaatcagacccgtaaatccctaaccgggtcgacccagcaaccgatatcatttgccttcccggttccatcctcttaaacgcttcaaacggtaaaagcatattcttctctatattctccggacacaatccgttgacccatccggtcaaagtctccaccgccgtgatgaaaccttttccttctccttcttccaatattggttctgctttcacgtcgaaatctcccgacccgacaatgcagttcccgaagaacgtcggcggtaacggagggtttaaccgtgaccgaaagtctgatgcaaaaccaacgcacacaaaccgggtcgggtcacctccacgcatcttcaccatgcatgttataacgtaagcgtaagtaatgacaaaagtcgacaaacggagctgcttagcgtgtgactcggtctccactcgttcacgtagcttcttgatgtcttctcgagttaaccggtacgtgactcggagaatatcggatccaattattttggaaggaaacagttttaagcttggtttgttgttggaagctgatatccaccggttcaagagttttgtctcgagtcccgttgggtcatgaacaatgatacgatctaaagacggtactagatcgtgtggcagagcttcttgttcttgtttacagttgtgagcccatgctttgagaaacatggctgttgttttaccatctaaaacggcatgatgtgcggttacgccgagagaaaatccttggtttgggaaaaacgttacctgaacggcgagaacgcgagctgattcgtcggaaaccggtaactcagggactaaagaatgaaactccgtggcgggacgaggttcatctccggaaagatgggaaaggtcaccgttagactcagctaccgtgagatacacggcatctttgtcgtcaggagaatagacaatggatggtttggttttgattgaatcccacacgaggcggccggcgagtgggagatagtggaggagcgtggctgagagagaggacttaagtttagagatgagagaagagcgagtcagctcggggacgtggtagaaaagaactcggtcaacgggtgaagtttgagccaacccaagtcaaagtaagtgagtgggagtgtgagcgagttagaagacggcgggctaacttggaccacctcaagtatgttaacggctgagttgaaattcaccattactgaatttcaaagttttattgttttgactttggctttgagcgttagactatgtatacttgtataggatagatattagcttcttttggaggttatgggtctttacttacttctctcccaagaatatcaaccacctgctaggtttacccaaccggtgggtgtatatttatatatgctattttttattttattttaaataagctttatgtttgagttttttcttttcaaaatttataaacaaggttatggactaaaaaaggaggcgaatttctagttcaagttcatgtaatttatattttctggtaactattaaacaggatacgaatttgttttaatttttatttttaagcttacagaaaatttgttgatatcattagaaataaatatcttacgatataaattaacagtaacactctactctcattgttgggctaattttctgaaattataatgcagctcatttaaggcccaaacaaaaaaaaccacacattaataagggtgaattaaatatatatacatagaaaactaagtaattaagtatctatccatagaaatcagatatttagttgttttttgtcaccagaaaataataagacgaaattgcccctatgaccaaataagatctacatgaacatattagtcatcgttagaatataagtggtttgattaagtgacctgataaaagaaacataagctagctttggttaaaaacattattatacataagaatatcactagtctaataaattttcacatatagataatgatatcaaggaacataaattatgaggatggttgctaacatttttattatccttgattatggtaagaacatttttatcacaattaattttttagtcatcacgaaatcctccagagtagagtgaaaggaaaagaatgtaagatatatgattacctggatagatgacatttatagttaacggtaaaagtagtgataatatgttttaccatgatacacaatagtctca

SEQ ID NO: 29133 - DNA, 975 bp, Arabidopsis thaliana landsberg
  unsure (1)..(975): unsure at all n locations
acggtagcgcgaggcaaggaactgctttgctgcatcggttagaggttgcactgcttcagccattaaaacactagagggcagctcaagatagagcaaagcagaatcaggggtcatgggcatatttcgcagtagtctactacaatacctcatacaggaagcaacctcaaacttgtcagcagccataagaacatctaataaagcgggtgctgttgtgacacttagagagttgctatacataaagtttaaaagctccatcaaagcaccttcctctacaatacacataaaagtagagcatgagaaatcaacaatgtggactcccttaaagctaatatcgtatatcatatgtaaatcaaagtcagcaactgagttaatacaagaggcataaagaatccaaaacaagaagaagccaacagagagctagttgagaattgaagccaatataaagagattggagaatagcagaaatgaattaaaagcttgacttaaattgacgtaccttgtgcactaattctaagggctacatgtctttgttctgattccctcatttcattagaaagcagctacaacagggtgaggtaagcaagaagcaaaagatagcatcccatgggagatgaccaagagcgatcaataaggacatagaagtgggaaaaaggttaataccttgtagaaaaaggggctttttgcggccaagataggagaactaatatgcagttctttaactctaacagcagtagaacaatcaataccccagtttggctcactagatgcatcatcatcacctacaaaaaccattaataaacaaagccatcacgtttcagacaaatgacttcaacaaaaaacgctcttctgaaaattgttaagtatcacaaattcagacccagtcactcaagagacaacgtgaaatttagnncggtacctgataangcatcttcaaccattgcctctcaaacatcgtcaagattatcaccaccagga

SEQ ID NO: 29134 - DNA, 1247 bp, Arabidopsis thaliana landsberg
ctcggcagttcaccaacatgaactgtccacttttgtatttgaatccttgtggcttcgtcatgtgtagagacaacacgttcccggggtaaacagccacctgttgttacatatatatagattaagttcaaaggcaattttcaaacttttatcaaaaagaactataaaataagatggtttaaaagtattagttgaatatttcttgaaacataaggttttcaagagataaatagaaatatatctgaccttgatcatcttaaccggtttgatgcttgatctgaaagcacggagcagcctctcagatgcatatagaaggatgggtacagcaagatacatccatgtctacaagaatcatataaacaggtaagaaatgttattaaccggaaaaaggaaagaaaataagaaattaaaacagataaaatgaggtttgaagagagtaccgtcttctgataccaaatctttgtgaggtagagcttgataccatggacaatgagaagagcataaacaatgatgaccaaatggtgggtgtaccagaaggcgttgaaaccggtaagcttcctgagaaagttaggtaagttaagcttgctacgtcgaaaccaaggcgtagcgagtgtaaaggctatagccattagcacaaccatcacaatgccagtccatccttccactcctttcacaaaccaccagtagctagtcggttgatccccaaagtatttttccatcggctcataggtgtcctcatccgcggcaattaaacgtggaaaatcacacgttaaatgggcacccgcatggagcaaaacaccgacgactatcccgcttgcaataaccttgtggaagttaagactatcatcaaaaggaacgacagtaccaagcttggtcttgttcctaagccaagtgatggtgtttcgacaaacaggcaacaatatgagagccatgttgaatttgagagtctcggcgcctcctttggcgacacaaacacaataacccatcacaccataggcagctttgttcttgtactgaatgaatttataagtaaagaggccaccacagatgccaagccataacatcatgatccataatctctgccaattatcaagtatgaaatatttgattttctccgaccatctcaataaagggttgctctcttttgccggtctaagcttctgacttaacatctgactaagtatcctgctgtctgccatccgcaccgactggttcggtgcttgtaatagcaacatttccaagttttcgat

SEQ ID NO: 29135 - DNA, 1936 bp, Arabidopsis thaliana landsberg
gcaagactgctgttgatggattgcaagctctcagagataatccatatagcaatcaggttcgacacctttccaaacatgagtgtttgatgtgttgtttcatctttttgtctcctaatcttgaagacaaatataatctaaagcatcctttttctgctacatttggcacgattagtatgattttctaattgtttttattctttctatggcctgcagaactttccagaatttcatttcaaaaactgatcccgatacacttgctgctctaagcggaggcaaagctggagacatgtcaccggacatgttcaaaactgcgtcaagtatgataggcaaaatgtcacctgaagagattcaaaaaatggttcaaacagcctcttcgtttaaaggagataaccctttcgccccgactgcgccatctaccgaaaacggttttacacccacacctgacatgcttaaacttgcatctgatatgatgggtaagatgtcaccagaagagcgtgagaggatgtttaacatggcatcgtctttgaaagcaaacgctccagcttcaacatcatacggcaatgcagaagcatctgaaccacgggaaagtttaggagcgagtgggagttcttcgggaaattcctttgtggctccaagaagcggtttcgaaccaagcatcccttctgctccgcctgctgacttacaggaacagatgagaaaccaaatgaaagatccagcgatgcgacaggtttgatcattttcggtttatgttttaccaatttagtcaacataatgtgattgttgatgttcatatagtagtttctctgtatattggtagatgttcacgtctatgataaagaacatgaaccctgagatgatggctagcatgagcgaacaatttggaatgaagctttctcaagtagacgctgcaaaagctcagcaagccatggcttctctttctcccgacgccttggagaaaatggtacgaattcggtttagtaaaaccaaaagaacattcaaagttgattgtatagttgtctcaattgtaaacacgttgttgcagatgcgatgggcggatcgggctcaaaccgggatggagaaagcgaagaaagcaaagaagtggttgttcggaaaaggcggattgatctttgcaatattaatgctcgttttagcaatggtccttcaccgtctcggctatattggaaactagaggaaacaacggtatcttaaggcttaatccttcgtgaagataaaaccagtcttcggtgggttcgtttagtttgtaaaactgtaacatcgttttatcttctttttctttcctctaactctcagctttttgttagtccacttgtgtctaaatttctttacactttcttctgtagtgaattttaaattagagaaaatacgaatatttccttatattcgttattttataaacataattatgcttctggtagagcgcctctacaagaaaattggttatttgcgttgggagattcttttagcgaatagaagaccatttctaatggttgtctctatttttctttgtaaatatagaaagaaaaatagagatttttattttctaattttatatatagagaaaaaaaataaaaacttctataatagaggtaagaataaagataagttagagtaaaatagaggaaaaataaagtttaaagacaaaaatagggatgggttggagatgttctaaagagaaaagttcgagtaaaaaaaaaatctttcgcaatccaacgtttgcaaattttgcgaggagaaatttttgaagtaagtatataaaatcatcttaaactttattaaattcatagatattaaaaaaataaaaaacacttcattaaattttaaattatatttttttttgcgcacccaacaattagatcattcaattattttaatatacgactgaatacacattcttgaaaagtcaaaaataaagaaa

SEQ ID NO: 29136 - DNA, 2141 bp, Arabidopsis thaliana landsberg
tttcgggatcttccccagccccatccatagagggcccattcttctgtaactgcagcagtgtgttttgcaccagcagcaaccattttgattcgtattccctgcacccattacaagtttaaagtgttgatgtaacaatggagatcagcgaaactaacaacataaactcagggtctctaatcacttaatcttctagtttacctagtccgataaattatcaataagatcctaccttctatctgtgttttgcagatagtataacacatagacatccaatttagtatctaccactcctaaaattatgtaacttaaattatgattctgaagacatcttcaccagatgtggacccttaactagtaacagtcatatgtttaagaagatcaagttgcagaaatagacccaacattgacccaattctgaagcatagtatttggcaagttgaggaaactacaacgaaaaaagatgttagaagaatatttagtgatacaaacctcaaaggcttgaatcttctgaggcactagagaatcttcggtgtcccccagaccaagttgaccattctggttgcggccccaactgtataaacagaagtcaaagagatatgttggaaaacaagacaagacagacaaaacgtttaaaaggcaatgtacacaataaccaagatatatagaaatgacacaggacgcaatcgacattatcaaattccgatgaaattcatctaattgagctgagatgtaaactgtaaatgattgcacataaggagaagaacaataacaaagagaaaatacctctggacctctccttccatagtgacagccaaacaatgactatccccacaagcaatctgcttgatccgaataccgtgcaatgctttgattggtagcggagtaaacaagtcgcttgagttaccatggcctaatctcccaaaatcacccctgcaaagtacacataaaggttagagaacacgaggcttaaaatatgtgcaaatgagtgtataattagttactgttttctacacaaaaatctagagaggaactagtggtcatcatctcatcccgaatatatcaaacagactgaagagcaattgattcagcagcaaagaagaagataatgatgagaaacaaaccatccccaactgtagacttccatgcctgattgtgaataagcaacagtgtgatcagcaccacaggtaacggaaacaatttggtggccatctaaagcgctaagctgagtcggagaaggtcgatcctctgcatcgccatgacctaactgtccatcctctcctcgaccccaagaacaaacaatgtcaccagctacaaaatcaaaacataaaactactcattagtagacgacgaaagtaagggaaactcgattaaaggccagatcaagagaattcgcgaagagcacagcctactaaagcagcggatttcacaattccggtgattatttgagtccgtaataaggaaaaaaaacagcgaagaagaagagagacgtacagagaagagcgacggagtggctagcaccagcggagatgataagaaccttacgaggaggagccgtaacttcgtcggcagccatatcctccgccatggatcacagttgcagttttcacaagatattttttttggggagaaatgaattttgaaaaaagtaagaaatttctattttttgataaattgggaaattttgtagcttctctttcactatccgtaatctctcgagggttgaacaaggaaagacagagagagaaagcggtagatggtaataaaggcgcgatggagatttgcacatgtcatatatctgctttttgacttttttacttttgctggtttttttattttttgttttaaccgtacagtaaatctcttttttgtcgtacaggctttaattgcaaaagggtccctcttcacttaataaatccaaatacggacctcaccggtaaagttttatactttcataatttcaccatttctttttttttttgtttcttgaccatttcatttacctcttcacataagtagatttaagccagtacacatgacattctagatcgtaacttgtgttttatgtgttcatcattcacagaagtaaggcgcatagatcgtaagagcctaatcatatgtttttagtcatgcgcaggtgtaaa

SEQ ID NO: 29137 - DNA, 2528 bp, Arabidopsis thaliana landsberg
gacgatataaagatgacctaattggcctgacaaaatttacacaaatgttattcttacataaactaaaaaagttgaccaaataatgacaattttatgtgtaatattagaaaattgttattaaaattttcttagcaaatattgacttcgtttttctcaacgatattatatatatgaaattttatgtataagttattacaataagttattacaatcgcatgttctataatttgaacggataacgaaaagcaaaatttagatttcatttataaaataaaaaagaatgaaaattccaaattcttgtttagcaaaacttttgaataaatgatgtggacaaagcggattaaaccactctatttctagagcggataacaaattatgcttatcaaatttatttctacgtaaaaataatctgtagttaagctgccgcagacaattttttttttttttttaatccgcatatttatggattataacttatcaatggtaactaaaaagcaactcaagccgcaaacggattcgtgcgtcccaagtgtcacaactattcgaactatatatgaagttatgtgtctgttagaactggatttttactattattattactattattattatcatcgattaaaggatgttttttgatgaaaaaaatatattgttctatttagtcaacaaaatgaaaagaattcggtccattattttccatcaaatacaaaattttaacagattctgatcttgtaaaattcaaattgatgtctcatttcttttccaaatactgaaattggacttaatgttatgtactctcaggtcccccacaatgatcactctttttcacaaatttggttcaaatccactccaaaagacacaaaaacaattcaaactttagggaagtcaaacaaaactataacaaacaataaggaccattttgaaatttctactttcttcagttctttcatggaactttcgttgtaatctatctacaacgctccacatactcggtgtgtacacctgaaaccaaacctctatatatagaacacaatctcacttcccaacacatcaaaccataacttccaaatctcaacagaaccaaaaacaaaagaaacctatattaaagaagaaacaaaaaatggtggcttttgcaacagagaagaagcaagatctgaatctattgtctaaaatcgcctccggtgacggtcacggcgagaattcctcttatttcgatggttggaaagcttatgaagaaaacccatttcacccaattgatagacctgacggagttattcaaatgggtctcgctgaaaatcaggtatcattcaaaaataaaaatccaaccttttttttttttggtctaacctaaaaaacctaacttttttttttcttttctgaattgtgtagctttgtggagatttgatgcgtaaatgggttttaaaacatccagaagcttcgatttgtacatcagaaggtgtgaatcaattcagtgacattgccatttttcaagattatcatggcttgcctgaattcagacaagtaagttatattgttgcctgaactcagacaatttcatcacttttggcttgatttggtttcaaagattctaactttattagtttaattccttcaggctgtagcgaaatttatggagaagactagaaataacaaagttaagtttgatcctgaccggattgttatgagcggcggcgcaaccggagcacacgagacggttgctttctgtttagctaatcccggcgatggtttcttagttccaaccccttattatccagggtatgttcaaagatcatcactgaatcacattagaatttggtttagtttggtttgggttctaaatttgatttggtttggtttcaggtttgatagagatttgagatggagaaccggagtgaatcttgtaccggttacttgtcatagctctaatgggttcaagattacggtggaagccttggaagctgcttacgaaaacgcgagaaaatcgaatattccggttaagggtttacttgtaaccaatccttcaaacccgcttggtacgacgttagaccgggaatgtttgaagtctcttgttaacttcactaatgacaaagggattcatcttattgctgatgagatttatgctgctactacttttggtcaatccgagttcataagtgttgcggaagtaatcgaggagatcgaagattgtaaccgcgatttgatacatattgtgtatagtctatctaaagatatgggtctgcctggtttaagagttggtatagtatactcttacaatgacagggtggttcagatcgcaaggaaaatgtcgagtttcggtcttgtttcgtcacaaacgcagcatttgatcgctaaaatgttatccgatgaagagtttgtagacgagtttatccgcgagagcaaattgcggttagctgcaaggcacgctgagataaccaccggtttagatggtttagggattggttggttaaaggccaaagccggtttgttcttgtggatggatttaagaaatcttttgaagacagcaacgt

SEQ ID NO: 29138 - DNA, 1461 bp, Arabidopsis thaliana landsberg
caaaaacacatgcaaaggataaggatgaaccttttgcaggtgaaaaaagatttaaatttaagaagaataaaactagtgaagcagcagaggaaccaaaactagctggcagcaaaagacctttcctttctggtgagatgactggaaagaatcggcattcaaataaaatgagaatttgaaggttagactccttactcttgtcatatctagtcaagctgtattttcctcatctctgtgacacagttcttttttcctcatctctgtgacacatttacaagaatgctaataaaaagtcttttcatataacactacaaaagaacttatagaggtctaagcacactctaggaactgttaacagtagcaaagcttacagcatccagaaataagtgcaaagacgctatactacccaaaaaaaaaacagatccaagcgaaaaatatatgaaatctatggttttcttgctgtgatatgttgtttcctacttcctcttacatctgttaggggatcaatcctggtacaaaaatacacactcttggtgtcaatcataccctttggaatacataaagattgaaagaaaattgagtggtgtggtttgtctttacttgttctgtatagggctggagccagtccttgggattcttcggaagctatctttttcacctcttagagactctcctttcatctcctggcttatcttcaaatctctcacacctttactagaagctaaatccatggaagctggcgccatctgacgacactctacattatacttgctgctaaacaaagctagaagtaacagacagagagctgctgagatcgatgccgatgtatggaatctcttcattgtgaaatttctttgtgatctgttgtggtcttaggttgttgtgttccttgagactgctattgagaaaactttagggtagcttatgtttgagttaaagagcgagaatctttgttgctttgtagattatattatcgattcatgaaatcttttgggatctaatcacgtgatctagtttgactgctgtgccaataatttccttattgttttcccaattgtgtttcagatgatgcagatgtttactattaatctaatagtttctagatcattcactggtcattagtcctcacataggcgtacactgatacacattcattcacacgtattattagccatgaagatatatgtgattaagatgcggatcatgtgataggccacgtggttactgaatactgatgctgtttctattctaatagtgttaagttaagtccaactccatgaaatgaaacgttgcagattaacacagctcatggtcactattattatcaccaactctttttttttttttaatggcaatctttgcagaggaaagaaaaacaatcgagagggattacccttgcgcttaccggatgaagtagacagtacaacagacctaaatgtgttttctgaattggttttttctgtt

SEQ ID NO: 29139 - DNA, 2427 bp, Arabidopsis thaliana landsberg
taagatgccttatcttattatacgtcatagttcttctttgatgttttcacataacttcacttgtgtaaccgattctgttcctaatcgtcattacagttgctttcatcaagtctctttagtgtgtgtgtttgcctgagctgattaaagtttagtcttattttcagaatactatctgtcatgtcactaaacgtataattaattcaatttactgctgctgtaggtggcagtcctcctaatccttgggaaaaagaaggaaatacatctggtcctaatcctttcaggcctccttctaatactagcacggctggttcagttgaggcttctggcacagctaatcctggtgaagtagttcctccgcccgtgaacaggcctaatacaggtggtaatatgaattcactcagtaggcctgtaccgtctaggccttggtaacagcataattatgggagccctatggggggaggtatgtttgtgcaagttatcttagattttttggttgctgagattgcatatagtttagttcttttattgtatgaatgccaggttatggttcacatctaggtaagacctctaggtatgggtcaggtacatatggttcagcattaggtgggtatggttcatcatatggtggtgggatgtatggaggtagtagcatgtatagaggaggttatggtggtggtggtctctatggaagttcaggcatgtatggtggtggtgcgatgggtggttatggtggcacgatgggtggttatggtatgggtatgggaacgggaatgggaatggggatgggaatgggaatgggtggtccttatggtagtcaagatccaaatgacccttttaatcaacctccatctccaccaggcttctggagtatcatttctccgtgtggtattgttcattattcatactttattttgtataagaaataaaagaagttgataatgataaggtagtactgtataacatgaagtgttcatgttttgattgatgacagatgcaaggtgctgtgaatttctttggccgtgtagcgatgcttatagatcaaaacacacaggcctttcacatgttcatgtctgcccttcttcaggttccttcctgtttttttttctaccaactcgtattttactggttccttgatccatttcattgttctcatgttaaccaatcatttatttgtcctcagctatttgatcgtggtggtatgttatatggagaattagcaagatttgtactgcgtatgcttggggtgagaacaaggcctagaaagatgcagcagccaccacaagggcctaatgggctacctttaccacaccagccacatggaaaccagaactacctcgaggggcctaaaactgctgcaccaggtggtggcggtggttgggacaatgtatggggcaactaagttacttctttcattacccaaatccttcaacattgctttaaaacaccatgacaaccagttggttaccgatagaagataaaccgtgtagcagcctgcaacacagattgggatgtacgaaaaccagatgtttgtttgcaaattgagtctcttcttctcttctctctatctctcagtattctctgattgtgtggtaaaggatagatgtcgtactctacaaaatggaaagtgaagttttaagtgtttgttaaagacctttctattgatatatatttataatatccgattctcttcctcttttactggatttgaaacaacactgttgaccagtaaacgattttgatactttattaacaacttgaagcctattcttgaatacatcttttcttgcagtttgcctctagacaagaccaacacattggtcccaaaaatgtcgtatgaacgaacttaaaagaatcatgtactgttgatagaaattgatgcttttattcttgtgcatatagtctccagtctggtcctatgaccatcatttcttctgttcttagtgttatatcggctctatgtaatctgaacatctcaattgctgtaggggtcagcctcgcgttcccgttcatgtagagaatctggaggttcatgcaaccgcatcgtagagcaagcaacccttggtcacataagttcctacaacggttcacatggagtttcttcaagttacggcaccacttccctacggcttcccatcccgaaatcttaacttcatgacaaagagccaagttccactcttggagcaatggacaaccttttgctatagcttcaatggattcatcaccaaccgttctgcacatcctaaggttcaagattctaagttttgatgcaatttcagatccaataggtaccaacccatctttgcgaatgtagcaacttacacctgcaatgtttagaaactcaatcccacctccgctaatgatccccgttatacccctttcgctcaagctgacaagagtcagcatccacatagcctatagttggagaac

SEQ ID NO: 29140 - DNA, 1952 bp, Arabidopsis thaliana landsberg
tgaagacgatgatcacaagtacaatgaggaacgtgaacttcttcgcaaacgacttgaccatactaagtggatcgctcagggtcttgattttgcacatcttcttgagtatgagagaagcagaattccccatttgagtttttctgaactcaaaaaattacttcccctaatcaccacgcttataagagaagtgacagctgcaactaatgcccggactcaagaactgcaaagacaaactgaagaactgctgaaacaagaaaatgatctatctcaccagtagagtttaataaccgagagattgttgcattacaaaacatatgttacatattcccaaaacataatattttctggtttatatcgatcactcatcgtttgtctcaagggctgattgtaatacttcttctagatacttttccgcggctgtaaactgtcttttcttgtcttcgattgctagtgcagctaaagctttgtcctgtttacagaaatgaacaaccaatctactgtgaaccaggactagcaatgaccaataacaaagaggagattgacaatgcagatcaataagggcttggagaaccagagatgaagattaccggaggtaaatcctggtagcttcgtagagtatcaaggactggttttgtcatcttgtccaattccttccggtgctctgccatttctaccagctctctgtggctgatcttaggagtgtagccaacacgattgagtaacatctgctatcaaaaccattcatcttgactctgtcagattatttgaaggagccaaatcatccatataaatcacaacaaaccactagaagcacattagacttcaaaaactcatattgacttacctagtgaacatcatcactgcatttctgatacgatctagaacttaatcagagagtgtgtgtgtgtttttatgatatgagagtaacaaaacttaaaaaaactttagccctagaatcaaatcctcaattactagcaacccttactaatccatcctgtttcaaaagcacctagctattttagtatggcttaccatttttccaaaaaccagtgtcactaaagggcactaaagttacagaacaatccattttgttccagtttttacataaaagtatatgattctcaaatacccctcaccagagctaattgcaggaaggtatctgattctcagtttacctattaccaactgagaatgtaaaaactaaaagaagaaggagtctacctcatacttcttgtactgctgtatgtattgttcctccttcaccgccatcacttccaaatttgttttccagttctccatctgtgattcacaagggactacatcatcttctagctgcgcaaggattctgtaacagctcacacagataaagttagataagtcacatcccaaaggaaaaatggcaaggtttacatgtacaccaccaccaagatcatattataagttatatggtgctttattacgaaacttacttcttcaaatacgtcagcctctgtatcgctttccttgtatagtcaagaagagcattggactccttctgtgctttagccctcttctcttccactccagtcttcctcagagatatgtctcccattgctacaaggaaactatacatatttcttctgcatcagtttcccgattcgagatagcaacacatctaatgagagagctaacagtacagtcacctgctcagttcagtgtcccgtatgttcaacaaattagccacatttgcaagaacttgagctgaagagaccacatttgacggtaagctctcttgtgacattcctgcactctccaatatctctctaatcctagccgctacatcaacaaaatttccacccagagatctaagagagaggaacttggaaattcccaaaaaacacaactttgtttgaaatcatagtaacagatcagatactgataatgcccaaaagatgattttcataattcgaatc

SEQ ID NO: 29141 - DNA, 1092 bp, Arabidopsis thaliana landsberg
aacaatactttaattaagaattttataaacctggaaataagtctcaaactttgccgggagttcactgtgctctttcttaatatcaggcagtgctccttttactctttaaagtatacatgtaaacatttatgcaaaaacaaccatttgcatcaatatatatatatatatatatatatatatatatcttgttaaagaacattctcatacatatcttagtttagatgcataaatgacaaacttatgtattctatttagaactaaaattatgcaaaggaaatgaaaaataaaataaaatgaaaaggctgtacttacccttctatgttgccagctttgagaaatgtgtttgccttcttaagttccttaacaactttgatagcaccgatgctgtattaaaaaaaaaaaaaaaaaaatcagcaatttatatttattaatgttacaattcttatctctatatttcaaaacacattacaaaaatattataactagcctggcgctgctgctttctagccgaagaatgcatcgggtaatcatgggtacctctattggctctcgctccctgtcaaaattaaatcaacttaaaactttagataccaaccattaggcattagccaagtttaaattaaatcattatattcaaatataattcttgtattcatatctataggtgccgtgcaacaattatcagcgcctgtgcaaacaagagtcatacggcctttagataaaggcataacagaacacaataagttgggcccttagtgtttcttcgtttttgcatctactttcaactaaatcttggtttttcattcgaactatgtttcattacattatataagttcaatggcgatgcattccatatttccatggatcaaaatttcatatggaagagagataggaaactcacaattgatgttccaaagaagcaatcacattatgggaactcctaaaataaagagttattatgtttacaaataaaagaagggcttgggtctttcgccagagccttaagctgagtatactggacaatcaaggtacccccgcggtattatttactttgaaagaataaacgaagattccttagaaaaataaccatgg

SEQ ID NO: 29142 - DNA, 580 bp, Arabidopsis thaliana landsberg
ttcttgttacatcatcaaaagcctggttgactgatatcacttatggaactatttaatttacagaccagacccttctctttgctatatcttaattcagcaattgtagcaacacatatccaactcatgtgttcccatttcatacctaatacttgtgcatttagtttttatttcagtacaagtacttcttatacctatagatgtcacaaatcaaaacaaacagcacaatcatctacaacctaatcaactagtgctgttcgttgaggcttagccaacaattgacctaaatatcctaaaccattttttgatcaaaatgatcattttgtgtgggactagttaagagaaggtttcaagcgaagagagatgtaagttatgcaaaaaaaacaacctggttgttgtaaagaaccatgggtatggagtagcccatgtactcgatgccatttaagaacccagtgtatgcctgcaaaacatttgttcactgagagttaaacataggtatacacaattaaaagaacttctgacatatctaataactagatcaaacaatcaggagcatccataaaataacgcttggacacattta

SEQ ID NO: 29143 - DNA, 1642 bp, Arabidopsis thaliana landsberg
atctgaaattgattgctgaaaatgtaaccttgttgagatatcaaaatttgagaagatgttcaagtatatcgcagctgtgttggtcatggagacttgttctgttttgtacatgaccctgttgatgatggtgttaacaatctctcaagaaaaaaaaaaatcaagcttcctccaccaaactttgttagccctaaatttcatggtactgttgtaaataggttttagatcgaaatgagtataaatagattattcctaatcttttatacgcatgggcatttgggccctttaaagttgatttaggcctttcatattgtcaatattatcatttcatagtgttagatcgagataacccaatttacaacgatctaaatttttttggcccaaaagctaaataaaattaccaaaaatcttaatcgaacctaaactctttaaaaattatgatagattactacaaccaaaacttgaattgaatcatgagaatattgttagaacgttttcaatcatggaaaaaaaaagacacaaaaaacgttacatttgtatggaactctcacgtaaataaactggggcaatatttgaatattaatgaaacaaatcggaagttaatagttacactcaagagagacaggcctagacaatcaaaacaatctcccggagaatgttaacgtcaagcaaggcgccgccagagaccaccacaaggcaccgttaagcgacgtcgtcgcaaggatcacgtggtggggacccttattcggctgtcaggtggggcacgtgcgttcatgtgcataatataaacatcttcgccttaagaagtcgacacgagttcttgttgtctcactgaacatggaacgttcgatggaaactcagcggtcgtggggcctcaattattggacggtccagatcgatcacccaactttttttctcctcgtgatctcgggatagtgtcggtcagtaaattccaaaccagaagcaattacgttattacattaaccggttctaatttttaaaccaaccgacacactttgattaccctacgcctccacgtgcattctatttgaaacccgttcatgtttcatttttctctcgtagtatttaattgcatgattctcccgtggctattaaactacttactaaccagtgattcatcgccgaattggcgacaatgtcggtttatgtactgtttgatatatcggaaaagtgtcatgttaaactagtgaatgttgccagcgagagtacgttattgagcttgaaatttttatacatgctgccaaattaatcagaaccagctagtaatgttatcatatatatgaattattattgacaagattaattatctggtgatcgtgttaattatgatcaactcttgtttgttatgtgagttaatgtgcagagtggacgtgattagcttaaaaaagattctatcatttataccctttttctcacgttttaaaactttttaggtcaacaagatcaaagttaactacgtatagtgtaaatttacttgagatccatcaaattcactactaaagtcagccaaatactctcattattaaatcagaggtcaacaaaatactacatgcatgatcactaacatcagtgtaataatgtacataaataggtgtgtattgtgtcgataattgataaagatcct

SEQ ID NO: 29144 - DNA, 1464 bp, Arabidopsis thaliana landsberg
ggcctggatttgctgcgtaagcatcaggtaacatttccatattttgactgaatttattggatctgttcttatccaaatataaaactgagactctttttctttctgtgtgtagtgcactatagatttgaaggaaaacgtcatgactgttggaggaggagaggtctcggttccctttttgcaaggttagttctctactaccttctcaatcttgatagctatgagtgattctaaattcgctgcctttgttttcaattaacctgacaaaaaccatactttctcagagaaagacatcccgtcccgatttctggatgaagagcgtgttccaaatgatgcatctagctctggagcaacggtaagaagttttgcatactgtcttctatggttctgatgaactaaatttcaaaacaatttgttatgatcaaaaacttttggtcccataggttccttctgggttcacagagaagaagaataacactgttgcaaacccaacaagccaacaaccgaaaaggcagaacacatcagaggtaaaaaaactatgtttaaggttttagtctcacatcttttgattctttttcagtctccattaatcaatttcatcacataatccacagggacctgaatttgaagccaagattgcaaagcttgtggaactagggttctcccgcgattcagtgatacaagctctcaaattgtttgaaggaaacgaagaacaagctgctgggtttctctttggcggctaaggattaaattaatctggccccatatacaagtaggccaacttattgtgattttaaagagactcgttacattcaacttctttttctctctttcttttttttttttttgtattttatagctcaagatggtaactgcaagaacatgtctttacgtcaccattccaagttgtttatgctgtcgaataagcagacttaagggtttatagaaatgcaatgcaagtgttcttatttcttttacttcaactactcagatttgtcttaccttcaaaagaatccatagcagcagcagcattcaaataacaattttcatcccataacaaattttataaagaacaccataacatttgtttcttcaaaatttcattacaaagatcactccgaacaaaagcaagttaatgtttcaaaatttcgccattcaaaactattcgttcaatctagcagagacagatctgagcttagagtaaactttcccagcaggagatcccataataagacttgcaagtgaactccttgcgactttaatattaaagaaagctcccaaaatatgaatcctagagtctgcaatcgcaatcctcgtctaggtcgagttctcaatagcaaactttgtcttccctcctttaccagacaacctaccaatggatctagacagatgctcaccttttagagtcttcacatccttgatctcaaaagactcaacataaagctcgggcattctcaaaagatacat

SEQ ID NO: 29145 - DNA, 2216 bp, Arabidopsis thaliana landsberg
cgggaaagatggataatgttggttcatgggttgacccatttaagatttcaagcttggagaggtaacataagtcccgaacgtctcttccacattgttgccgaatccgcggagtctcgattccatctccatctccatatcgatatctctagcgctcaagtgtggacttcaatctgcttccaccattgagctgcaaagctggtggagtaagggtattgactctgttctgccatgatccgccgtttcttggagaggaaggaacaccattagccattggagaaaccggaggagtcgaaactcctgaagaataagcaagaggagacaaccctggcatcatctccaagctgctaaacggagactgagccacggcagagccagttgaagcattaacaggtctcatctcttcgcgtttatgagcaaagaaacaaactttccttgcacaacccgtttcatctttacaaagccgggttttatactgcgcggggtgaagccacgactcgaaaaccccgtgagcatactcgcaagaatctcctttcgggcatgatcctttacggaactcgggacaggggacacaagtgtaaggatacttcctcggatctctcctcctcgcattttctcccggatgaacaaaagcacactcggtccaatcatgagaataagccctagaacatggcttaaccttaaagctatacatcctaaactcatcacttccataaaccccttcgtttatatccggtaaagaagcatcagctggatacttagagacaatcttgatctcttcttcaaccgcctcatcgatcaatcctccaacacctcctcctctcagcaacaactcaaccgctttcctcctcggactagccacaaacctcgaaactcgaacaaacacatccaaaggttgattcccattagcatcaacagagttaaccaaagcagaagcatcaagcaagacattgatgacttcaatcatattcacagaacagccagcaacagcacagtgaagcggagtaactctctcttcaccacaagctctgttcacatcagattttccagtggaaacgatgaaagtcaaaacctttatgcttccatacatagctgcaaccataagtggtgttctttcttcaaaacccatcttcttagaaccgacacgtctgcaataccataaccctgactcatcaatctccaccgatggattctcttcgatctctctcttaaacgatgaaagatcatcacaggcggcgaattcgaggagacacgtggcggaagctccgtcttctgatttctgcctcatgaattcgacttctgttagggttttagatgagcaaaggttgctctttgcaccgcacatatctcttcctgtgattcaaaagtgaaaaacttttaggagaaagcaacaaagaatgaggaagagcaacgcaaattgagttctttcgattcaaagtttcaatttttcattttcaagattcttctttatacacaaaatcaatccccaatttaagcaaagtaatgaataattacacgaccgtttcgtcaaaatcaagccattaaaaccataaagattaaagatttaaccaaacccagaatcctgaatgaaataggaaaaaacagagagagaaagaatcaagacatacctagaaaagaagataacttggagaaaaagagagaagtaaagattgaaactttggaggtttttggggagaagaagtggttggggtttttgaagaaggatcaaatgagaaaggagaggctccttttaaaaggaacttggtttttacgaagaaggaaagaggaaggtacgctctttctttcgtctacctttctcggtcttcttcttccttctttatatcatttttattttttacttatctttgttttgttttgttttgttttttgctctctttctacatggaaatggtttaggtcaaaagtcaaaactgggaaacttttaaaaaaggtaaggacgtcgttgttttgctgactcttattcaattgttttagtgtattttttttgtcttttttataaaaagaatattataatatctatcttcctatctcattgattttttcaatatggctttttaaaatgatcaaaaagcaaagttcatttgaagggaaataaaacaatgcccccattgtatcgacttacataagaaaaagtctcattccggatgtatttattgtttctagataacatcttgtttttggttaaagtttctagatcg

SEQ ID NO: 29146 - DNA, 1764 bp, Arabidopsis thaliana landsberg
taaacctttggaaaactcatcccaccttattggagtccttagtatttagcaaagcctgtgactggatagctatatcatggacagacgtaatttgacttgagccctttgttggtacggctctcttcagaaacacaaaacaagtcagataatataaattgaaaacagaaaaaaatgttaggagacagaaacttactgatctgtttccttgctttaaggtaccattagaagttgattttgaaatctttgtaacaccttttgacactggccccgccatagcttttgatgattcaaatggttctgaaaacaacatcattagcatgaacagaaaaagcaaacaacgaggagaaaacatgctaatcagacaaccagatcatggagaggtaccttgaacgaatcctggtcttactttttcaagcacaagagctaatgctgggccttggatatctttaagattcttttcaatctgagacaaatacagacatctaatcagatattgaattctagccctgaatagaacaagttaacccaaggatatctaccatttcttgtccactgactctcaagatctcagaaatgcatccttcggctgcttttctcacatctgctgatttgtcctggaaagatacattgaagcataacaaattgaaatcattacaaacagtcgtaatcactgttggaaactgataagacggtataacatttttagatgagtcaccgtcattgcagtgctcgcaggttttagtaaatgtatggcatccacaaagtcacttaatccagtaagttgttttgtcaaccaatcaaaaagatctttacgaccttctgctcccattttcccatctgttagggctattataatgtaaggaatctgcattaacagaataaaaaatattttaagtcaacgaaattatatcaacaagcgaagacatggctcaaaaagattatcaccaaccattttgtcaagatgcacagcaccaagccacaagtcaagagcagccaaggtacactctctcatgtgcttcttgttgtcaccgaggcatttcagaacatcagacagaattccctgaggtagataactcaagtacttggtaaaaatggcagacagtgatactatgattacagtgtacatactattttcaatgcatgacatgtataaccaaccttgctcgccttctcgacagctggtcccatagctgctgcaacacctccaatagtagtcaatgtttgcataacaagatttttgttactatccaacagacgtcctcgaagaccaccaaataattctcctattatacaggaagggttcatataaacaataaggaatcgtgacttaacattggtatgataaatctaaaataacagagaatgagagaattatgggggaaatttctgacttcataccagttccagttggttggatacgtttattagcctcttccagaattttattgacagcttcaattgactccaaacgcatctacaaaagtttaaaagactcaattttaactctacagcttcaaataaatttccgcaaagaaattgataggtttagacaacaaaagaagacttccaatttcaagagcaccttccaatcaggactctcaaagcccttaaggagattaggtgtaatcttggtactgatatcttctctaggtaagctatccaaccctccagaagatgttgatgttgaaactgacgtcttaacaactctctttggagccgcagtcccctgatgaacataatataagtacagcaagaaaaactgag

SEQ ID NO: 29147 - DNA, 1741 bp, Arabidopsis thaliana landsberg
gaatttcatataaaagcagaattcatgaaatattttcaataaggtaaaggctagtccatttgtaaaacactcatgccagttgttgattccgtcctcactcaaagctagaactttcgtcgaacacatggtgtgcacataacacaacttataaaaattccgcagaaagtgaagaaatctccaggagtaaattaccttagggacgataggttcctgatctcttccacctaatcctggttcagcgtcgggtgtcggaataacgacatcggcgaccattagaaaatcttgggcaccaccggaggtatgagtcccaaggataagcttatggacggcaaagtaaggataattcgagtacggaatcggcgtcgaaggaacccagtggagagtaagagagaggccattctagtgggtgagagatcataagatcgtagagaaaaggtgtgttccttttccaaatagagaactcttcttccacctgatccaatcccgcctcatctttaccctcttctgccgccatcactctctctctcgctctcgatcgttcttcttctcagttctcactcttgaggtttttttctggtacagtttcccgcccaaaaagagagaggaggaatgaagcgggtaacaatgctgttttcgatgttctatacgaaaacgccatgacgtttatttatatgaaaaaccgcatacattgtgtttcagtaatgtcaggacgacctgttgttacgaaagttatagctgaaaggctggaaattgaaatagtattggactattagctgggaggcccactaaggatccacttcatttaatttcctaaaattattctatttaaaaccaattatcctcctagacgatttttttcttttctttttcataataagttgggttagtttttactaaaagtaaaaacctctttgatctagtagtttagtggtttcacattaaaatttaggattcaatttcgttaaaaagtacgaatttttgcatattaatgaggacaaaaatctcgaacgtaatgcgaccaatcctattcatttttgaggacaaaatactttagagaaaatcctctgctagcttgtcacattgataaagttaaggaccgaacacgctatcgatgtctaaaccaaccctttgtgacaattagtgacaactaaactaataagtaataattcaactttatcatgcatggctaatgatcacaatttgcattatcttttcgttattagtcaattccaccgaactagctccaagggctaacaaactgtgaactttgttaattcttatagtacgacaaaattacttttcttctaagcacaattatttgggcagcttataccgtatcattttatagttttgatttcttttcctaatgttataaagtaataattaattctgattttgttgtacactattatgtcgaatattaaatcacttgctcgcattatttggtcaccggattattaattatcatatttttttgacaactttgttttaaccaccaattcatcaccatgcaatttacatttttttcactcgttcttatcttaaatacattcgtgatggaaacataaacaaacatcaacatccaaacacaaaaaataatcccagtaaaaaaaaattaaaccaaaaaataaaaacatcacataacaacacaagcggaggcgttctcgtcgctaaacgccgtagtataacgaacctcagtggagctagcacgtgcgagacgtgacacatgtggatcatactc

SEQ ID NO: 29148 - DNA, 2130 bp, Arabidopsis thaliana landsberg
agactattctagagaatggagattctcattcaacgatcatcaccggttcaagtggtgattttggagagactacaacgatgtttgagaacagattgaattactatggtggtggtggtagtggtagtagtggtggtggttgtgtcgtgactctattagatgggcaaactgttcatcataatgggttcaattttggtgagttaaggcataggaatgttaatggtagtgttgatggcagtaatgatgagcggtggtctgatactttgagttctgataagaagttatatatggaggagactagtgtggagctaagcccttctgagaatccaccgtttcaagaagtgcagcatcagtttccaagaagtgagattaatgggaatgtggttaggagattagatacagaagcttctttggattggaaacagcttgtggctgatgaccctgattgtaagtttcaaacttttctactttggattggtttttgtggtggtctgaggcttggataatgaatgtttatgtacaatgatgttttgttatcagttctttctgctgagacgaggtcacctatgaaatactttatggaggaaatttatggtgggatctcattacggagcacaacgactcctgggaatgatatcgagcgcgaaagaatatatgatacaatcttccgtttgccatggcgatgtgaagtggtaaaactggctttcctcttctttgacagaatgaacatttgttgtttagctaggtgtgttatttgtgtacctctgctgataagtttgtatggatggcgatggaaatctacctgttatgtgattgtgaagggctacctaaatgagaagtcaatgtatatatatgtatgcttctgttttgtgatttacacagaggtttttcacattgtaaagaattttaatgcagcttatagatactggcttttttgtctgcgtcaactcatttctgtcattgttgacagtcatgccaataagagtcctgctgatatttatggatgcatttaagaacaggtgagtcttttttagattcttcgttgataataacacacttaatatattgctataaactggactttcacaccaaattgtgcatctttgaagcaagtgtaacatgccttgatcatactattcgctatacacatgatcctgctattccctttgttagaaagtatcttaataatatttgtggcaggcagttcaggaggccctctgcatcggagctgtctgatctggcttgttttctagttttggccactggtaccattcttctcgggagaacaggtgtggtaaaaagctcctcatttgcttaagctagtaatatatgtcatgtctactctatcaaaatctctgcagtggtacatgggttgcatagggcattacttaatctgtttattattatatggacaagcttagcacttctgttaaaaaaatggatttgtcttttcagctcatcaaagtgatgggaaaatggattctcaaacagttcccttgtgtgtttttgtttgtttccacagatatcagcctaatttaccacatgattcgtggtcaaagtaccataaaactctatgtggtttataatatcttagaggtaaagtaaaccctttttagataatttatttctgctatgaattttcatgttcatttcgctttttcccttgtatttcttacatggtttagttggtttgtatttgtcttttcgctgcacacttttctgtccagtttaccttattctctattcaactggtattgacacatatataaatattatattccagatatttgatagactctgtcaaagttttatttgagatgtatttggagccctattcagttgtgcaaagggactgtcgatttctcctcctgagaaactgagattttcgacttggagatttgtttctgacctagcattaactatggctgcctcaaatatccttacagcgtgattgctagtttgatttctgataactacttccaacatctttattctgttgtgtccttaactgtcttcacttctccattcattcattttattagctcaggcaattacgttgtcaacttgtattgttgctcacaacaatgccttgttggcccttctggtgtcaaataactttgctgagatcaagag

SEQ ID NO: 29149 - DNA, 1380 bp, Arabidopsis thaliana landsberg
ctctcagtacctttctcatagcagctgctacaactaatgcttccttttcacaatttggcatacaatacaacaaggagtcacacttgcatcaattcctgcttgatgatgtccataaatgggttcaattgctttgcacgtaaggctcctaatgtttacctatataatggagaagaaatatgcactagatatgtgtataacttgttgtgcaagccaaatttccacagctccatccggaacaacatccatcagaaactatctaaagaatgggttaacttcaatttccacggaaatcgcggtttcttggttaaagttgaagtggaagtagctgttaaagaggtaagcttaggtgattatcactcagaagaaggttaaagttaagtcgcttctttttgctttgtggatttggagcttaactatgttgttattgaaactcattaaaaacatgaatatccagttattcattcacataatcagaataataaattaattacaatatatattacattgtacattattatcaaatgaatttcaataagttaacaaaagaatattcctacagagaacaaatgaggttcttccaattcttgattttcccaagttctaagcataaaaagaaaaatctgaataattaatctgaaaaaaaactaaacaaagcaatcaatttccggagctagaccaaagcagccacattaactggttcggtcgggaacttagtgaccgggtccactcgtgctgggacctgaatgcttaccatattcaagcgtctcagtccggtccacgaaccgatgaccctcaccaccagagctaggacccgactccttaatcgccccaagtgacaaaccatcgaagaacttagccacgaggttctcttcagccttcgttaaacccaaaggacgagcctccaccacaaaattcgaactcaccaacatgaaaaacagaaacgaacccaaaacaactttgttcatcatcattttctttgagtggtatttttgagtagtaaaaacaaaaatgttttttattttatttttcttgtgttccctaatttatgagatgactaaatttgttgtgagtagtttgtggacttgggagttagaatatatagtaaagtgaagagccttgaagaagaagaaaagtttgacattttcagtttttgacttcataagcttaaaattcaacaagacgtgagatttgaattttaggctccttcctgggaaaatactgaggttgcttctttgttcttggtcttcctatttctttttaaaaatataatttgcgaacatataaagccatcaacgaggaatggagattagttatttggctgaagaaattaaatgattttaattttgtctctgattgtttggaatagacttttagttgtag

SEQ ID NO: 29150 - DNA, 1506 bp, Arabidopsis thaliana landsberg
  unsure (1)..(1506): unsure at all n locations
gcacaaagtacgtgatgatgtaagtcgttaaagtagttgcctttttgctttttccttttgtacactttgcttggggcgggtcggtgatgatgttattttttcttaaaaaggcttatttctaacaaaattatacatttgttttgtttttgaaatcagaatatcaagtgtataaatttcacaggattatacacaaaaatgcaatgcacttttggtcaaagttcaaagttttggtgaatacataatacgtttcgactaaattttaatcatatatccgtcttatatttacgtctatattaagagaaaacgtacaaatcttctacaatctcgagtttgatgaggggaataactttacacttattatcataagataattgagttgaatgtaatttatgatttccttttttaatttatattaggataacctcaggaaaaatttaagccaatataatctagaatgaataattaaaaaaaaaaattttattagaaaaccgaaaccaaatccaacctaaaccataccaaaaaaaaaacaaattacacgagagtcatgtttaatttgcttaattcgttgaccaagaaataaatgaattttgttaacccaaaatattcgaaaccggattagacggtcaaagagtgacacacatataaatcgaagagtatgggaagtaaataaaaaaaaagaaaaagaagaagagagtaaataataaaaacctcactacagagaaattgattaaacaaacaaacaaacaaccctaaaattcatcatcaaaatcatctctttttttcttcttgagatattcttcttttcatctgtaaaaacaaaaaaaccaaccctaattaaattacacattgaagaagaagaaagaaagatcgatnnnnnnnnnnnnnnnnnnnnnnnnnnnnnnnnnnnnnnnnccgtttttgctctatccatcactcgttatcattctcttcttctactccattaaccaccataaccaaatattctcatccgtcgttgatgatgatccttcttgtcgtctctcgtcttctccacaagctgttttctcttccttcagaatcttcccttttcgttcttcatcgtcttgtctcaatatcacttccaacaacaatgtacattaatttctcttctttttatttgttacatcctttaatttcttcatatatatgtttagtttctttattttatttttgttggcttctaggtttaaggaattagcttaggtacgaggtgttaaattgttattttctattaatttataattaatgttaaatttgttttaaattggaaacagtcgacgtcagaagttgtggtggtagaagaagttgatgannnnnnnnnnnnnnnnnnnnnnnnnnnnnngatggctagagccgccataaggaaggccggagaaagaatctccgtcgtgatcgtgatcggacgaataattcggatgtgggagtcgtatctaatggatctgtctatctcaatgcttttacttttcatcagttaagaacctttctttc

SEQ ID NO: 29151 - DNA, 1864 bp, Arabidopsis thaliana landsberg
  unsure (1)..(1864): unsure at all n locations
aataataaaacaaaacaaggtattacatgaacatgagtgagtcactgtaaaaagtaaaaaacaacaaaaagcctaacatacatatatatatatatatatttattaatttattgtaccttttcatggtttcttttttcatgcctgtaactctgagaaggacacagacacatttgtttgtgtaagtaataaataagtgtgaaaacacaatcagagacaaaagcctaaagactcgagcaaactttttattaatattttgtttgttgctttactttgatttgttcaaatttcaaaaacttctctttaacccaccactccctccattaccaccacaacttcacattctccgatattctctctctctctatcaatctctcactctcaaactttctacatacctgaagaaaaaaataatctacgaattcgagccaaaaagatcgaaactttttaatctatgggtgcttcagggaaatgggtcaagtccattatcggtctcaagaagctagagaaggatgaaatcgtaagttcattatcttttttttttgttctctcgttcaaaggttaaagctttatcgagagatactctgttttcaggaaaagggtaatgggaaaaacaagaaatggaagctatggaggactacttcagtagattcatggaagggttttcgaggaaaacatcggtctgattcagacggtgttgattcttctactgtttactctgctgctgttgctactgttcttagagctcctcctaaagatttcaaagctgttagagaagaatgggctgctattagaatccaaaccgcttttcgtggattcttggtgagtttgctaattggttttgattagaattgagaggaatagaacttagtttaatttgaggatttgttgttaattaggcgagaagagcgttgagggcattgaaagggatagtgaggttacaagctttagtgagaggaagacaagttaggaaacaagcagctgttacattgagatgcatgcaagctttggtgagagtacaagctcgtgttagagctcgtcgtgtgaggatgactgttgaaggacaagctgttcaaaagcttttagatgaacatagaaccaaatctgatctcttgaaagaagtcgaggttcttgtctttacctttttagctcattggtttgatgattgtttattgttttgagatttgttatgttctcaggaagggtggtgtgataggaaaggtactgtggatgatattaagtcaaagttgcagcagagacaagaaggtgcttttaagagggaacgtgctnnnnnnnnnnnnnnnnnnnnnnnnnnnnnnnncttgtccacattcaacatcttgtttaagttcgtgtctgaagctgaatcgggaatcttgttttgtgtagcaatggaggtcaactactagctcaaaccttaagacgaatagttcgatttcgtatcttaaaagtcaagagtttgataagaatagttggggatggagttggttggagcgttggatggctgctaggccatgggagactagacttatggacactgttgataccgctgccacgcctcctcctctgcctcataaacatttgaaatcaccggaaactgcggatgttgttcaagttagaagaaacaatgtgaccactagagtatctgcaaaacctcctcctcatatgctgtcttcaagtcctggttatgagtttaacgagagctcaggttcatcctcgatttgtacttcaactacgcctgtttctggaaaaactggacttgtttcagataactctagcagtcaagcaaaaaagcacaagccaagttacatgagcttgactgaatcgacaaaggctaagcgaagaactaccgcggtctcaggcaatc

SEQ ID NO: 29152 - DNA, 1587 bp, Arabidopsis thaliana landsberg
  unsure (1)..(1587): unsure at all n locations
gagggtcatcctaaacctgagccattgtgttttaaattaatagaccacagattagtttagaatttgctttggatctcccatagtataggagcgtctgtcggcagagatatgacaattctttaatacacatgaaaagtaattaaatatttgcaaatggcaaaagaccacaaatatttaaacaccatagaaaaacaataattgtatcatctttacataaattaatcatctaagcgttagtcagtattttcgatcaacacttaaaaacttttatcaaagctggcttattcatatagtgatctcttgagatacaatttagagattagtgtggtttagaactctcttttgtcatttttttttatttcatcgttgctgagaagtgagaacttatgtactccaattaagaggattcaatgaaatatcaaatacttcgagaacaacaaagtatgtgttacccggggcattaaagtaaacatcaaattatgggcgcttatgtcacgaatgatccactttctcttgtcgttacatgttattctccttaaaacagattcttaaagtggagagatatgaagaatcctcaccgtctatttttctttctaagattcggattctctttcaagattccttagctccatacgtggaatcttcaacaatatacaaagcctaccttacgtatcttgtagcaatgtgcttgttcccctatttgctgtggacatcttttttactttttaaacccttctttacatttcttagtgtgattagtttttccattacctatgcgcgcggtgtagggattatatatttatagctagtttacttttcgtgttggcacgtaactagtttgtctaaattgaatcaaatgtacagtgtatatgatttaaaaactcagtttagatactcaatttcaaatttttatagggtatacgaaggtctaataaaaaaaaaacggatcaagatcgtactctccacaatggtttgcatactgtattaataacacgggatatggctgaaacggtccaaatcaattacaatattagttgtctaaaaaaaaaacatcggattgtcttatatactaattcaagtatttaacgatatgtagataaaaaaatatctgtcgacagaaaaagagaggagtattttattttagtccatgttcgctgttaatcagaagtatattcatatatcatgtcatgtttattgtttagagaacaggtggtaccttttagtacttcttttatactatagaaaggttctttcgtcaatcgtttgcacaaagaataaataaaaagaagtcattataatattcaatcgcagtaaagtaaagaaatctttaataaagtcacaattgttaatatatatatacaaatgttaacgcgcgtcgtcgaagtagaagatntccactgtaattcttttttcaggtaatggtcaacttatgacgttggtcgctttctaacatcgaatgatagattgattattgataagtacgtaaccttaactattttcccttcttgttagatttatagagagagacattttagaacacaaatttatgatagtcagagttccttgccactggtagggctcccacca

SEQ ID NO: 29153 - DNA, 1783 bp, Arabidopsis thaliana landsberg
cctaaaacacggttctttcagtataaaaatttacagaatataaatcattaaaagcaaataactaattagtattgtattaaaaattaaacacttatctaataatacaaaacttttgttctaaaacatgaaaacggaagaagtatgtttcttttaaaactatgaaattcatataccatattcagttttatttaatatcatttaatatgaatcgactacctcataattatacaatatagcaaactagggaccatcttatcttttacgtgattcctaaaacataaatatttatgggaatgttgcccaaaaaaaaatatatatatatatatatatatttatgggaattttatcattttcttcctattaagaaaaacctcaaaaataaaagtattaaaatacaaaaggaaaacataaaagcacaaacgaatattccaaatataaactaaaaataatactcataaacccaaaaatacatttttcctttcccgaaattcttttttttgttaatattattatcatgacaagacgaaatttactcaaaaggctacgaaccaaagccatgtgatgactacatcagtaccacgtgtcaagatctaaggacttaacgagttacgagtgtgtcgtgggccatcgaccatggaaaagcaacgagtctttaggtgaatgttttacttgctataaccggtaacaacgggtctggtaataccggtagctccggtggttggttgagttatatggctatgggggtttaagcaagaaagacgtggtcgtgttcttcttataagggtttttgtttataatttggtaatcgaaaaagagagatttgataaaatcctttgtgttgaaggaaaaaaaaatcatataggtaacgtttgatacaagtaaaaaaaaaaaatttccatcactttcttgggtaaaaaaaacatgggttagaggaaaaactggggaaaagattttagattaagtgcgtaaagaattctgattccttcgtctccgatctctcatttttctggagaaattgtcaaaaatttcagatatctatattgtcttggaactgaagattcatcgaaaggagagaaagatttaaactttttttgatggtttttgtgttctcgattttgccaaaagtttttgtgttggtttgaccatcgagacaacttagtggaaattcgttttttatgtgaacttatatttggaattttcaaattcaagaccttttggttggaagcttaagaggcattatggtatcttttggaacttatcatcatcttctataggaactcttcggcctcttatatgaacagaatcatctcattcatcgatctgcgaactactatctgacaattcgaaggtgtctctctttttgctctaagacgatctggatatcccttaattcagagatcgaagcttctttatcattgaatcacgtaaggtggtcttcaatccggatcttgtgtttattagggatatagaatggatcatcagatacgatttgatattaccgatctgtgattcttgaataggattgagacctcctatggctcttggttgttatatactacagatcgaggaggaatattcgctgctcatcgcttgtggcaatcacatcatctgccatatgcatccaagtaatggcagtcacataaaggcttagaatttggagatgatggatacaaagtacctgctcacgctcgagctaccagatcactccgcgtaaatgaccctatgctatactctccgatgagctggtaaagaacctatcaggtacctgcatgatcactcccat

SEQ ID NO: 29154 - DNA, 1259 bp, Arabidopsis thaliana landsberg
taaaaacaagcactaaatctttgtcaaacgttggaccaaaaagagcttcaacaaaataatttcattgtccatttttagataaaatatttatacgtggtcgatttcctaaataacaaacttcatcacaacgcaaaagaaaataatccacgagttaagtaacaaaagacattgcataagaagccatacttagtagtatacaatgagccaaggctcaaaatgacatttacataaaaccaaacaatcctaaggctctcgggtttttagtaaaacctttccctttgcatcggcctggttctgacccgagagatatcgatatcacctaaagacaaaaccagtttcagtaatcgcaaaggtttttctacaaccaaaaacccaatgatttatatcgaatttttaccgggacgcttcagcttatcgcggatgatttccgcttgatctaggacgtccaaatctccttcttcttcttggaacaggagtagaagcaccgcctgcatcattctgcaaacgaaactcttcatcatcgttgttattgcgctcatcttgtagacccaatagattctccccccaaaggtacggcctatctgaagatgaacgccgatgattcctccatgcccttgacctgtgggatcttgatccaccaccactcccactagcgctagaacctccattgtcaagagagccaatcatctgaaacaatagtaaagtggtccaaaggtcgctcccaccatttcccgtttccctctcacctgcaaacctatctccgttttctataacataatctcctactacaacagcaccgggcatggcagaacggattgcactgactatatctccatactccctctggttctcaagccgcctccaagctctctctcttgatggatcagtgtctgaaggacgagttgttgggtgagtcctcctggcatggcggcgcagatcctggtagttgccagtaaatgagcaggattctcgggagcaacttcggttcttatgatcaagatacgttcttacttcttctacaaccttccatcctaaaacagtaccccggcatagaggacatttcaaatttgtgatatcttctgactcaacttcttcctcaactctcctcctcctcctcctcagtgattcggaatcccaagaagagcctcggtttccagactcacggtgaaaactgcttcgactggctgtaccatgctcgtatagagattcgttattatattcccttgaagccagttcgcctcgggagtagggtcatttgc

SEQ ID NO: 29155 - DNA, 2512 bp, Arabidopsis thaliana landsberg
  unsure (1)..(2512): unsure at all n locations
aaatcacggcatgtacaggcttgtaccagtagtggagcattttggtagaaccggaagcgggcattatactgtatacagaagtgtgagagtgttctcacaagaggaagaagaagaagattgtgatgaggatttgagctggtttagtatatctgattcagaagtttgcagagtttcagagagtgatgttcttggtgctgaagctagcttgctcttctatgaaaggctttgataaaagagaaattaatttagagcttggttttcattggattgatcgagtgttctaaggtttcttttctgcacttggagaaattagaagatacgtgagtggagttgtttttgaatatattttcgcctatagccaaacactactaaaataaccttgtaaccaaacactcttttagttccaggattgtgttataagtaaatccaaacagtccttaagcttcctcgataagtcgatataatgtggcgcgctcattagaatcagtttcaattatatctccgccaaaccgatgtaaattgatggggtctttttttctttaaaccaaaccgaaccgaaatttctatctattatccatcctatctactttgactccaagacagttgagtttgtttgcctcgatactataggaagaaacccccatctaatctctttcatatccacacaattagaatccgcttatgttgttctttgggtttaaattatcaaatgagttaaaaatatatacgatggaaagtggaatagcctacaataaaagttggtaaaagatgtttttacaaatactcaactgtggattgatggttttagaggtatgttatatacaaatgctctaacatatgattgcagagcacacacatgcatggaaaaagggttgcttcatgaaagattcaaaggttgggaaggggcagtaaacagagacagaaggtgaagaagatcaaagagcatatttacacactgatgatttgttcagacctgtacttcactgtagttaccttctgatgatttatcaaaatgatcttcaggttctagacacatgcttagtatttacctttcctgtcaataaaaacacgcagaaagtgtttgtgtgacaattagttgaatttattgtaagatataatgatatcaataaaggagttgtaagaaaaggattccagatattttttagactttgttatctttagtagtattgattagtcgtacttacctgtggaatgattattgttcatgagtttcaatgcttttgaagctttattttcttttctaaaggctccatttcctgcaaatcttttactacagcaccaaagcttacgctgtctccattagcaaactttcgcgatgaagataagccgaaatcaaatggaccccgtgattcagcctgcgttgtcagattcaaatccaaatggtaaaacatatctcaacttatttgcccaactcgtgtattttgttacagcaaatatatagtcttagagaaatgtgaagcagagaccacacagttagaagaactctcacttacccacttgattcctgataatccgaggctgctgtcttgattaaacaccgaggaacccaataatggttttgcggggttcgattcatcaatctgtttctccttctcaacttctccacttacctgccaaattttcatatcccataaccatgagttgcaagttctaaacttctgacaatagcaatatcggaaatgtttagtgataaaataaaataaacacgcagcataacttgagaaacatttaacctgatcgtgaacctttggtgttattgtggtacgctttcgaaatgaaaatgcatggcacgtatcttctgcatcgagtatagacgaatgtgacgactcaggaagaggggcagggcaaggagctcgacggttatctgtttggttcacgaggaaagcatctaatgaatcagagattagaggtaatggtggttgtttgatagctctccttgtttcccatgttttgttacagtcactaatccttccttctcctagaattgatgcttcagatagtaagcctcctatacttccaatagactgaccattatgagctggttctcgttcattgttcatatgccatctgtcttnnnnnnnnnnnnnnnnnnnnnnnnnnnnnnnnnnnnnnnnnnnnngattgtcttcccagagagttgcatttgcattccctgcgtttgaatttttacaatgatttccaaagtttcccttcaatgatacttctgaaagcaagccaccaatacttaggcttgttaatccatcatcccaaaaaagcaatgtcgggccagatccatcgtttatcttattctcctatacaaacaaaagtagtcatgatctcaggtatactgtgatataagatttgaatccaaaacaagagaaaaagaaaacattatttactgagcataccgttgactcaacttgtccatcatgcggtaagttttccagggaggtgtgtcagtcacttgatttggagaggacagcatagtcaatgggttctctgaacctaacat

SEQ ID NO: 29156 - DNA, 425 bp, Arabidopsis thaliana landsberg
ccttgaaacaaagaataaatataagtaaaacaatcagaatcgttggattaaaataaatctacaaaatactccacattatagtagagaacatataatctagatttgctattaaatatggtatcttgacaaatgtcaagaccccggtacattttctatcatctttatataaaccgctagcttttaccctcttgttgagagcaaacaccaaaaacgtttttacttataaaacgttagaaaacttctctagtcatgttttatgcataggtcgctcacaagtcaccaccatgcaacactctctttgttctgatcttcttccgacgaagacttctcctcgttctcatttacttccacaacccaaaaatgcaaatatttctcgacgaattctcattaatccctttcaagataccgacacttgctgatctcac

SEQ ID NO: 29157 - DNA, 777 bp, Arabidopsis thaliana landsberg
ggtgggttaaacccaatagttctcacaattatgctgttgagaaatgtgttaatttattgaatgtcatgtcattggtgaaatctactaaaggagaattgcagaagcttaggaatgatggatgggattcataaagtttcatcattttgcgagaaacataatgttgaaatgcttgtcatgaaagaaatctttgttgatccaaggaaaccaagaaagaaaaccaatataaccaacatgaatcattacaaggttaattgtttttacattgttctacatttagcttcaagagttcaatgatcgttttaacggaagtaaatactaatctacttaattgtatggcttctttaagtcctttgattcattccatcaatttgacaaggaaaaattggtgaggttggtaaagttttatccggatgacttcaactatggggatactttggttcttgagcagcatcttgatatccacattgacaatatttgcagagatgaacgattaaagaatcttaaaaatattggagatcttttttgtttgatggtgaaaacccaaaaacatatttcacatcctctaatttatagacttttgaagttggtcttaactttaccaattgctacagcaagtggtgaggatatttttctgcaatgaagttggtgaagacagctacacgtaatagaattggtgactaatttttaagtgattttcttgtgtgctatattgaaaaagagttgcttgaatctgtcaataatgatgaggtgataaaagaagttacaaatggtaaaaga

SEQ ID NO: 29158 - DNA, 2347 bp, Arabidopsis thaliana landsberg
ttttgtaaggttcctttggctgaaaatggtgagtctaattgttttaattggttggtttgagggtttaatagagggtgcaattgtttgttttgtcgaaatgtctaatggctggattaaagatgtaatgtgttattgtcttttctgcagagttagctgcttcagtacctcgcactgacgtagtaggaaagagtgagtatttccgttttggtatgagggattctcttgcgattgaggcgtctttcttgcaggttcttcttcttcttctaagcttttgtggttttacgatgtatttgtatatctcgacaagttcttgcctcttggctgtttggttcaagatttgaatgaaactatcatatctgataatattttgggatatttgtgctatagagagaagatgagttgttgtcactctggtggaaagagtacgcagaatgcagcgaaggtccgaaactgcaagttaattctaaaaagaaatcaattgaaactccttcagaagcttccgtgtcctctagtctatatgaagttgaagaggagcgagtaggtgtacctgttaagggtgggctatatgaggtacattgtgcagatatttaaagaatgttttagaagtttcttgtaaattttacgtgttgagccagtagagtccttgtgtgcaatccatatttctgaccaaggaactggaatgctgcaggtggacttggtgaggaggcattgttttcccgtgtactggaatggagataatcggcgtgtgcttagaggtcactggtttgctcgtaaaggtggcctagactggcttccgattccagaaactgtttctgagcagttggaggttgcatatcgtaacaaggttagatatctttctgtggaatacaatttgaatttgtgatccccatttgcctagaactagaagtaattgatgcatttctgttaaggttcataaatccactaaagctatctcttgttacattttatctctttcttttgtatagttctatgcgtatatattgttgatgatatgacaatagcaccaattactttggacttttcaaccaggtttggcgcagaagaagttttcaaccctctgggctttttgcagctcgtattgatttgcagggttctagtctggtatgtgtttgatttcatgggaaagaactgtaattttttcgccagtataatggttgcatagataacattatctgaagtcgtatatgtagggactccatgctctctttactggggaggatgacacctgggaagcgtggcttaatgttgatccttctgggttctctggcatcgttggatatactgggaatggaattaagttgagacgtggttatgctggctcctactctccaaaacctacgcaggttttagactattctgatttattttcgtaactgtctttgactctatacttaccagtctctaatgaaaaatcgagttaacttccatttctatatttttcttattagctggttagtgttcttgtgattgaacacacatttcttgtgcatttttttaggaagaacttcgccagcaaaaggaggaagagatggatgactattgttctcaagtatgttttagtatacttttgttttccatgaatggcatttgcatatctgatctctgtcgtcttatttttaaaatatctccaaatttgaagctctctgaaactgttcttatgtgttattttttccaggtccctgttcggcatctataaataaatggttcatggtataggccaaaaaggagaaaagtctaatcttgttgacgatgttgttaacttttgtcaaatcacggcagctttagcggaacgtcatctaacctctcatcagctcagcactcaacgagttcttttcatcccatgccaggtggctatacatgtatttttatccccttctgttttcatctctgtatagtatgatcttactttgtagattctgtctttctctattgtttttgtagtggagaaagggtctaaagctaagtggtgaagctgctgttgataaatgtactttagacggtgtacggcgtttccgagagatgctaagcgcaactgttcatgatgtgttatactacatgagccccatttattgtcaggctataattgattcggtattgatatatcccaaattttatgctctctctgtcttcttaccaaattgaaacctattcgtgattgagtttttagattttgtgacaccagaaaaccttaatagatattgttactttaattttctgtattggtataactggtaatcctgtttagtatgaaaagtgaattgtgctccattttcgttttgcaggtttcaaagcaactgaatagactgtatctaacattttaaagcga

SEQ ID NO: 29159 - DNA, 886 bp, Arabidopsis thaliana landsberg
catgtgctttacctgacttggtttcagttgaagatagaagggttggtattatcgaatcagtagacacagaagagacacatgaatctgttgatgtatcacaagagaatggtgatgaggaagatgtgtgggatgcaaaaactaattttaccatcaagggtgattctgatgatgaggaggaaaaacctcagcctgtgtttaagaaaggtttaaaagacactgcatcaaaggcacatgattcaggtcagtagaaacaccctaggaagaagaacctcagcctgtggttttattatcttttgtctctgatttatctaatattttgggtttcaatacagttcctggcgcagatagaccaacagtgaagcctggaggttctggcaagccaaaaacagctgccaaaaaagctatgcctaaggtggatgatactacccggccgaaagatacttctaaaaaggatgaaggcttagtactgaatgaacttgctaaagaagtagaagaaaatcttcgctctccaatttgctgcatcatgggtcatgttgattctggtaaaacaaagctgttggattgcatcagaggaacaaatgttcaggaaggtgaagctggaggtattactcaacagattggtgcaacctttttccctgcagaaaacatccgtgagaggaccaaggaactgaaagccgatgcaaaactcaaggtgccaggtttattagttattgatacacctggccacgagtccttcacgaatctgcggtctagagggtcaaagttgtgtgaccttgcaattttggtggtggacattatgcatgggttagagccacaaaccataaaattttttaaatcttttgaaggatgaaggaataccaggagttcatttgttggcatttggaat

SEQ ID NO: 29160 - DNA, 2896 bp, Arabidopsis thaliana landsberg
gataagaagaagtatggtttgtatctctgcaagtcatcatgcacgggtatgcttagtatgggtcacgttttgcaatgccaaagccatagtgtgcagatcccacatgggttttctgtctcggatgacccgtccgcatcttgttaggctgacattaactatctggcacgaataggaaaagtctagtagtatatggtcattgacacgttggtttttcaggttcaaggccatgtgcatcccgacggttacaaagtagtagcagaccatgtctgaagttggttcattaaccgcaagaatgcggtaacaatgttcagctgtacaattggcatggaattatatgcacataaatcgtactttattgagcgcttgtgcctccgcagggacaccaacttcattagtttacattttcttttgtgttcaattgttagctcaaacccaattaagtggggaaagtaagaagcaacaactcctcttcccggacccctaacaaatcaactaaactcaatatcaaaccattttaaaagagctcatcattaactagctactaattattcttaatcaatcactgcttaatacaaagcactatatatacacttgtatcttccattagtttcccaccacaactacaaaacattccaatacacaacacacaaagcacacactttttctttcttttaaaccccaattgcaagagaaaatggcgaaagagtccaccaccatcgacgtcggcgagccaagcactgttaccaaaagttcaagccatgtcgtaaaggacgcgaagaagaagggctttgtggcagtcgcctcaagaggtggtgccaagagaggtttggctatattcgatttcctcctccgtttggcggccatagcagtcactattggggctgcctctgtcatgtacaccgccgaggaaactcttcccttctttactcagttcctccagttccaagccggttacgatgaccttcctgcgtttcagtacgtcccttcctatcttcataattacttattgacataatgtttacaaatttaatgcatattttatatctttaagtgaaccatatagatacttctaatttgttatagttttcttgaaatcaaatatttaaattcgagttattagtaagacaagtcatgttccggttatatcattgtgcggttagtaacctaataaaataatattctcgttttttcaaggtactttgtgatagccgtagccgtagtcgctagctatctcgtcctttcacttccattctccatcgtatccattgtccgtccacatgctgtcgcgccccggctgatcctcctcatttgcgatactgtaacttaccttataactctattcttcatttctttcataatttgatataactcacactcttttatgttatgattgtatatataaagctggtcgtgacgctcaacacatcagcagcagcagcggcagcatcaatcacctaccttgcacacaacggcaaccaaagcaccaactggctccctatctgtcagcagtttggagacttctgccagaacgttagcaccgcggttgtggctgattctatcgcgattctcttcttcatcgttcttatcatcatctcagccatcgccctcaagaggcattgatttcatctttaagtgtcaagatcgtaatgtacttgttgtatatgtttgtggctttgtgtaacatgagaattggtattattgtgtgaaaatgtaattgaagttgttttatgttttaaagaaatttgtcttttcttttggttcaacttaaaagcttctgattcatatagaggttctccaaagacaaaacacaacaagcaacacaaagcctaaaataccaaaagctacagtcaaaatgtcaaataccgattctaccctcatcttcttctccttcatctctctcttcttctccataaactcttcgtgtctcttcttcgattctacttccctcctacttccatttacccttttaccctccatgacactccttaaaataaccaaactgtccctcccgtttaaatgcgttccctccatcttctctaccttgagactcacttccctcacgtgcatctcctcctcaccgcacgtgaccaccgtgatcacacactccaccgcccccaccaccgtcgcgaattgcgcctccacttctccgcttatccagttcctctgcaccgacaccggccggtgactcgaaatattcgccgctcgtttcccgatcggatcaatcacgatccagctcaaagtcaaatccttctctagatcacgacacgtgtcttccgtcctctgtcttctcttaatcggcgtcgccaccgtatcctttgtatccaccagatcaatcctcaacggcgaactcttaaaccacgccgtcgtagtctccgtcttcacgactctactaaaaatcaacttccctctgtagtgaagatccacggcggagatcaattccggaaacggacggtcgagatcagagactgtaccggcggtttccaccatagaataagcgtcggagaagaaagaacgagaaccaccggagcaagaaggccacgtggatcggcagattttggaccagaggatctcattggaagcgagatgatgaagatgtgaggaggcgcaagagacggatgctaaggttgcgccgtcgagacgtgtcaagatgtgagactctatgatgtcgtcatggacggtggagattaaatctgttacggtggtagagggggagaaggaggaggaattagccatctctagactctgttcacgttgccctgagtgatgattagtactaattgggagtgattatttagttaatgatattttggttaatcagtgaagggtatttatataagagcgtcaaagtctttttgtttgacaaaattccatctttttactttttattacaataata

SEQ ID NO: 29161 - DNA, 1825 bp, Arabidopsis thaliana landsberg
tagtacaactttctcttccttatctgattcaacaactttcggttcttcgactacgggttttggttccgatcctggtacaggcggcataggaagtccaggactatacgcaagtaactcaccggatttataaagttcacctgatttcatcaaatcaccaccataaccagtgaaactattgtttcctaaatgaatactgaagagagattcattcgaagtgcagctccattcagctggcacattcgatttgcttctctcgaaaaccgaagatggaatcctattcgggtcatattttccgttgttatctctatccattacttgaacaggtggtgaagaaatctccggatcattcaatgattcttttagtacctcttcaggtagatctttcggtggcgataaatacgaagaagaagaagacgacgaagatgacgaagacgacgataatcttgaatgtgattctgagttaataattacagtttctgtttcttgtaaaggtatcgttttatgctcaacatctccattttcgtcgtctaatgaaccttttttgtttacatcttgatcatgtttttgtttggataacacatgttcttcatgtttagactccataaacacctggagaagcaatcatcaatgcatcatttaaagcaatttctcgggctattcgaacaaatataacatcaaaaaacataccttgaaatcgatttgaccagagcctgatgagtgaagttgtgaaatttcgtttctttttcttgctagagagaatgaaggaagaaagaaaaaatttaagatgaggaaaaggggatcaagggttgggttcgttgtctggagataaacagaacgaaaggtatctcgtaaagttcggaactttaactaacaaaaccatggctgcatttcgcgccatgtcttcttatctgttctgtttaataaatgatcctctgtgttacggtctatttaagaaaccgtgttctatccagtagataaacgccttgacttttaacacgtggcttcagatactagaacaaaaaaaaaaagcatcattgttcatcttcttcctcttctgtttactgtttggggaaagtgaaagcttgtaaacgaaaggtaacgtttttatggaatctagggtttgtatttccctttactgtaacatggtctttgaaagtttcttcctttttaggattctttgcttttttcgggtatgtatttggaattggatatggatactgtagacctaattgatcggtgtgatttgtattggatagttttaacggatcgaattcttagaattaagatactgaatctgagaattggatcttctttaactgcaaattttgtgacttttcttcgttttagtgtcttaagaacttaaacacgaagttattcttgataatttgatgcagcttccaccatttagaaaagtattgtcttttgttctgtgaatttctcaggttcgttggttcttcaagagagatcatatgaagaaattgaatttgagtttcatgtcaaattttgttgttttcaggttgtaaactgtggccaaaggtttacttggactccttctgtttcactggaaactgttcatttgaatggtgagagtttgattctgatgcattagtaaattgtaaggaagagaggattgagcaaacatgggagaacaactagatccattttccgcttctaatcttccggatttcatatcttctcaaaaaattggtagaccggttaattttgaaggacaaactaaccgtgggcatcctttttctggtcttaagaagagaggtcaatatagtcgttcttgggtgaaaattgatcaagatgggaactctgcggt

SEQ ID NO: 29162 - DNA, 1685 bp, Arabidopsis thaliana landsberg
tccatgaggacatgtgaaagtggttttctcttgatcattagggtgaattggtatttgaaagaaaccactatatccatcaagaaagcaatagtatggatgattggctaagcgttcaagcatttgatcaatgaatgataaaagaaaatgatctttcctacatgcagcatttatcttcctataatcaatgcacattatatgaccagttatagttctagtaaggatcagttcatccttttcatttttaactacagtcattccaccttttttagggacacaatgcactggagaaacccaagtactatcagagatagggtagatgacaccaacatcaagcagtttcaaaatttcttttttcactacttctgtcaagttgagatttaacctcctctgtggttcaatgatagaatagaattcgttttcaatgtagatcctatggttgcataaactaggtgaaattccattaatgtcagataatgaataaccaattgctctcctatactttctaagttcagataatagcaggttcacttcgtcattatttaactctgcattaatgatcacagggtaagtagagtttggaccaaggaatgcgtaccttagacctttagaaagtggtttgagatcaactttcgggtgccttgagttcagaccagtcatctgaagttggaatgatcagctctccaaagtcgctagtagtcgaggtcgagtcattggtcgagtatgttctcgagtgtgcaggttgaacttgtgttgacccttcttcgctcattaccattaccttgaagatatatggacatcagggagctgatagacatcagggagctgtaagcatgaagttgctgtaagcagggagctgctgtaagcaaggagctgcgagactcaaatgctgatgacgtggcgagctgcgattggttgctggagtttccagaacgtgatatacaagtaattcaagatataagcaaatcaaggaaagaagatttgaagatatctttgaattaggaaataggttaatgacgtttgtgtcattacctaatcggagtgtaaactttaggtttaggtagccgtctgatatataatcggagtctaagctttaggtttaggtagccgtctgatctcacgtctttgtgaatctcaagttctaagctgtaggctattagggttcttggtgagtgaacaaagagggatacatagctgttgttgtgtttgtgagttgggtagattaggaattggtcagtgataggttgtgttaacctgtttaaaactgattaaacagatctgtaagattgtttaagtgatttctaataaagaaaagaaagtcttttcaacctatcgatatctctattattctcatttggtatcagagcgggaaaccgacctgagtaaacactcaatacaggttgagatcctgcggattaaggatgtcgaagtctgaactcatgcggcttgtacctctcggtcatagagggtatggttactggaaaacacggatgatacagctaatcagaggacaaggagaagatgcatggactgctttagaagatggctgggaacctcctttgaccacaacacaagagggtcttaaggtgttgtgaccaaagccaaactagactgagaagagaataatctgtcaaagtttaatggaagagctatgaaagttatctacacgtggctagatgacaatgagt

SEQ ID NO: 29163 - DNA, 2661 bp, Arabidopsis thaliana landsberg
  unsure (1)..(2661): unsure at all n locations
gaacactgatggttatgcatatcagtacaccaccaacaaagagttccctttttcttcaatcactagctcctccccaaggaactaagaacaaagttgcttcttcttcttctccttcctcttgtgctcctgcctattctctaatggagatccatcataacgaaatcgttgcaggaggaatcaacccttgctcctcttcctcttcttcagcctctgtcaaggccaagatcatggctcatcctcactaccaccgcctcttggccgcttatgtcaattgtcagaaggtgatgagagaaacaaacctgaaaaaaattactttgaaagtttcttcgtaactctaatgatccttatttgattttcttgcacaaaaaagaagaggaagattctagaaaccctaattacccaaactttaccttttctttctttttaatataaccctttacttgatgtctgagtttgattttgatatctacttttgtttactagttacttaacccaactaagtatatacaaatcaaaggttgaaatttttcctatattgagaaagtttcaagaaacaatttgtaaaaaccctacttgcaagagattatccaaaatattgtatgtaggcttgaagaataggacatatataattatttcatttttctctttactatattataaatccacaataaacgtgaggatccttatattagttcaattaatgtttttatgtctatcatttactaattacacaacttcttaaggttggagcaccaccggaggttgtggcgaggctggaggaggcatgctcgtctgccgcagccgcagccgcatctatggggccaacagggtgtcttggtgaagatccagggcttgatcaattcatggaagcttactgtgaaatgctcgttaagtatgagcaagagctctccaaacctttcaaggaagctatggtcttccttcaacgtgtcgagtgtcaattcaaatccctctctctatcctcaccttcctctttctccggttactctctcctctctctctagttctctgtttttttttttttaattgatattcttgctaattatggcgtcaaattaaacgtaagatgaggaaagttgtttttttttctttgtgggttttaagaaagattttccctttttctgatttttcttgggtaatacccctttgatggttgttactagggttagcgtcagattgttatatatagcttactaggtttacgtgtataatctatctatacataagttagtgtatgtagttgttttcattgcattaaaacagttnggttactgttttttcgtttcgattggaattgaattcatttgctttggtacaacaacaatcactgatcttgtctctttcttctccgtttgttttggatctatttaattcaaatgcatcaaaaagaatatctggatctagagtctgctcgtccttagatctattgctcaatttagacatacacatgtttttgtacgtataatcacatatacatatatctacacaatgtcatatcactcttcttttcaagaatgtagttaagtttatatagacacacaaactcacatctacttaacatgttactttgaattatttggatcactagcctattctttttcatttccctagacacatgttcttgttgacaaatttgtcttgctttcacatgtttaatcaatataaggttatggagagacagcaattgataggaacaataatgggtcatccgaggaagaagtcgatatgaacaatgaatttgtagatccacaagctgaggatagagagcttaaaggacagctcttgcgcaagtacagtggttacttagggagcctcaagcaagagttcatgaagaagaggaagaaaggaaagctccctaaagaagctcgtcaacaactgcttgattggtggagccgccactacaaatggccttacccttcggtaactctcttagcttatactctaattaaataatcattgcatgtttttttaaaaagcatttatatgattgcaaatcctactcaagatgaatgaattcaattaagttgtctattagcttgtttcaatatgtttttttttgtgatttttgcatccatactatatcgttagggacattagtttatgttagctcacgttggcattgcacaatatgcatttgcataatttgaaatcctaaaagctgaatgaagtgaacttatttagtcaatgtgtactgtttttggtctattagccgatgacaaacttgattcttgcttccatactttttttagggtccgaataatatgtcaatcttggttaagactacgatcaatttcatcttatggctgtgtaccataacttagcctaaactttgttgcacatatttcaagtcataactttggaaagtagggtgcatgaggccataccctaatgcaatagtagctcatgtctttattacacttgtatagtgtcattacccatgttcgtatgcgttagatggattctaggttctccttccaatctagcaaatcgtgatgtagctgtgatcatggactgaacttatatcggagagaacacttgatgattgacatgttttttctcgcatgtggatatgaaatggcaggagcaacaaaagctcgcccttgcggaatcaacggggctggaccagaaacagataaacaataa

SEQ ID NO: 29164 - DNA, 2133 bp, Arabidopsis thaliana landsberg
gatccttttcacctttcgctaatacatcaataatatatgttatgcgtgctcagctcttgtgggagtaggaccgtagaaagcctatccatttaacaaagaatatcaaacaaagtcttgtttttcttttaatctttttttttatggctgccttcagtagtaacctctgagcttgagggaaactcatgtccatggcgctaattgtccggccattctttgttcctggtaattttctcttctttcttctgttcagtgcctttgttttcggctaaaagctctcttctctgtaatccattagataattttccgatcttaaacaatttgtgtaaagaaaagcgacaatctgattctggggatgtttcgtttgctcctccttttcatttttataacataaaaatgggcgtcaaaggttttatgtgcatattgtttcaactacaggagtgattagattccatatcatgttctcactgtttttctttatatcggaaatgaaatgatatatgacattttaattgccttaggaagtgctggaatttctgggagtagaaacatatgcaagaaaaatcaatggaggaagtatcttctgaaacccagtggatcatccattaattgctcatttagtacagagaagaatcctctattaccatctatccagcagttagccgatgctcgtctcatatacagtgtatctgcagcattgggtcataacaaggtttttacttgctatattttggtgtttctgtccctctcaatccttttttcacattcatttaagcaatcttttactcgcaggaatcacatccagaatgcagcgctagagttcctgccattgttaatgctctcgagatgaatgagctcactcctaaggtatgaaacaatccatctctatcgtttctatctgacattcttctatattatgcacatgtagctagggaagtttggttaaccgtgatttacaatatttaaggcaaatctcaagtggatggagaccaacataatgcttgtgtaaagttgcattagctgaaattttgtacttttctggagttagttagatagacttgcacatttcttctcaaacaagtagattcttttcgaaatatgtttgatgtatttataggtctgcttttgttgtatacaccattcttccttttgttggtttgcttcttcgatggtgaagatctctgtcactatttactgaaaatgacctacgtcttctatcaatgaattctcatatgtgaatcttttttccttgtgtatttcagttccgtggctcacagattcttgaactcgcaaatttcaagactgcaactgtagaagacattgcaaatgttcacgacaaggcttatgtctttggcctagaaaaggttattaactttactcatgttatattattagcatttactcacaactttttatttcataaccaatacattgacacatatagcaaagcaagtaggattgaaaaatgaggatgtacggtacgatttttattctgaccattacaaagacattcttagtgtaggcaatggatgaggcttcagattcgggactaattttcattgaaggctctggaccaacatatgccacttcaacggtaactgctttgtgctcatccggtaacatctccaaaggaaccattttacctacctaaacatcttccctctgtgccagacattccaagattcacttatcgcagcaggagccggaatggctttagttgattcagtggtgatgtctcgtctcaccatgttagtctgcttttactgcttcagtttcattatgttgggaatggttgtagatttcttatatgattatttgtttcagatcgcagcatccagaaacagcgtagatccacccattggttttgcattgataagacctcctgggcaccacgccgtgccaaaaggtccgatggggttctgtgtttttggtaatgtggcaatcgcagctcgtcatgcccaacgcacacatggtctgaagcgcatcttcataattgacttcgatgttcaccacgggaatggcacaaatgatgcatttactgaggaccctgatatattctttttgtcaactcatcaggtaagcctctaacatttttgcgtgacatgtttctaattagttcattacaaaatatccata

SEQ ID NO: 29165 - DNA, 2112 bp, Arabidopsis thaliana landsberg
ataatatgcgtaggtactttcttatgtcaccagatagaatctctgagaatggctttgattttgattacccatactattatataaatgctacagttggttttgacaaaaaaaaaaaaaattgctacagttggttttgtttggagcttttgttggaagagtttatcagtgacaacaatgagtttagccaggttttagatacagtcaccaaggacgatagcaatggcaattaaggcttgtaaattcggtaatgaatgatatgaaatagtgaagtaaccacccgaagagagtactagtatttagtaacgtatagattatttcatagcatttggtattcgagataaatgtatcatgagattgaaaactcatagtttgtatttgatgaaagctaatagggagcatatttgccgcgattattctcttgtgttgactcttctacttgtagccatagcctataggacttaccaaaggtttcgttagacagatattaacacactaatttatccatctgcttggtactaaaaaggtattttgagagtaacattgtggtgggttctcttcatgtctctcttcgatttcttccgaacacttaatatgtagcaaacaagattgatatatggtagtcactaccttttccaccaccagaatctgatcaactaaatgcagagtacactaaagaacaaaggtagcaaaacaacgagagattatagccaatcaaggattatagcaatgtgaacttagttattccaagaattacatctatcaaaacggtaaagtcattacacagtcacactgtgaccaaatcaaatcgaactggcaatgtagcaatcaccatgtcgatatatatatcacaaacagtgccaaaaagtctcaacccatcttaacagactatgaaccaccttcaggagtagtagttctcagcgagcttcgtattgaacaactgcaagagaataaaccatcaaataaattagccggaaacaagtttacaacatctacattttgtacaagaaaaccaacagattaacaatctcaagataaattcggaaaccagatccttagaacatttgcgttatataagacacactgaaaatcgttccatcagtatcataaactatgatcaagacttaaaaaaggatcccgatatcatgtatatgttgagaggcattcaaaatggtgccatcacttttataaactaggaacaagatccaaaaaaagaggaatcaaagaaagcaaaaaacattacaaaacaaaaggagaggattaagaataagtcacctctacgggtacgcttcttgtagagaatacggtacccacactctctgcattggatcacatccccagacttcaaagtgttctcttgaccacaatctgatgatacagaaaataagaaattaagcaaacccataaaacgaagacaacctttttacttatgaattttggtttaaaagtgtatatgtctgaggctgcttgggagaagcttgatacttagcagaagcaaagctcctcctcaaaaagacctcaagtcaaatagatcaatacaatacagtaaagtattgatgatcaagattgatttatgcctcctaactaagccagattatgaaatttcctaatagattaggattcatatggctactcaaggaggcggattttatccccaaatatcaaaacacaaaacaaaaacgatagagattaacaaagagacttatgaggaagatgagttacgaagaagacaagagtggcgcaaccctttttatgcactctgttttctagggcttttcttgggttgggttgtgaatgactattttaccctccctaattgactgactggttaatgtaatgtggtctggttttcttaaaccactcaatctgttttaaccattggcttgagaaaaaggcagagtaggatttgtatgtcagcaatattctttgtattacaaagtttgtaaggttacatgaaattgtgatttatcttggctgatgatgtagtacaaagtttgtatgagtttgtattagctatgcctataaagcctgacactatcttgttaagaagtctttgcaatgcctgcagcatttatgagagactgtaatgggtgaagacatcggaaagggtcttcc

SEQ ID NO: 29166 - DNA, 1176 bp, Arabidopsis thaliana landsberg
  unsure (1)..(1176): unsure at all n locations
catacattcaccgtattgtaccagagagattattcttcgacagatctaggtatcttaggccagtcaaccctcttatatctggaatgggcccaacaaatgaattcccttgcagcgaaaggaattctagtgagagacaattcgccaaggtttgtggaatctgtcctgatagtttattgtatgaaacgtctagagctaatagaaatttaagctttccaatgtcttgtctcaaagggccaaccaacaaattaaatgagacatttaagacgacaagagatggaagttccataagctcatggggtatgctgccattcaacttattagtaccgaggttcaagtctagaaggtagctgcaacttccaagacttgaagggatgcttccttcaaaactgttgttaagcagatacaggtatgttagcccactgatattccccaaggaagatggtatctctccagacagtccatttgaatagagcaagacttttctcaattcagaaagttctcccaatgagggaggaagtttgcctgtcaacagattttcgcccaagtctaatgtttgaaggcttacaagattccctatgccatgaggaatacttccagagatgagatttccacctagagagagctcagttcattgggtggagagactggctataaagacaggcaactgaccgccgagtttgctgaagccaacattgaaatactgcaactgactgcagttagtcagcgcaccaagaaaatcaggatcaccagnnnnnnnnnnnnnnnnnnnnntattattaaggcctagcagtaatagattctgaagtcttccgaaactcaatggtatctttccagtaagatggttagtcggaatatcaagttgtcgaagacttgagatattggaaagtgtctctggaatggtacctgtgaaactatttatccccatatatagtatttgaaggttagggagaagagaaccaaagtcaggtctaagggtgccagagaaactgttgccggtaatggacaggaatattagtgaggacaggttgtaaattggaggagggaaaaccccattaaacttgtttaatgctattcggaaaaagatcatctgtttcagtctggctataaaaacagggatctctccttctatttggttatatataaaatcgagcatctggagtgatgacaagtttccca

SEQ ID NO: 29167 - DNA, 3009 bp, Arabidopsis thaliana landsberg
  unsure (1)..(3009): unsure at all n locations
ttctttctgttggtggaaacctgaaaagggtgaagaaaatttatttagaagaaattacttataatttgtcttcaaaacatttatgatttgcaacttaaaggtataaagactagcctgcacttcagcttcgttgatcatattgggaaggtctctccatacttttgctgaaattggtaaatccaatggagcatcttgatttagatagttccattcctctctcagaaatctgcaacaataacttgtaattaaaaccacaaatagaatatagttaagatggtcttagactcttgacactgagaaactttatgcaatcagcatcaatgatacggattccttgggtctcaccttttgacattattgaaaatcaaatttcttgggtgaagtcccaatgaatccaagtgaattatagtcaatcccgattcgtcctccttgtctgggatgcaaattatgactaagctccagtgaagactgaaacattcaagagggaaagaaaacattaaccaatctaacaattgatgctgagaacatttctccattagaaagagcagactgagatgtgataactctgatctaagataccatctttttgcataatcctctaagcttagatgacaaaaattactcttcatgccaaaaaaatgcattcatgggattcaataataaacagtcagtaaattacttactcttcatgtattggtataaatatatatgatttacagaatagatcaaaacccttccaccaccgcctgaacttcacaaaatatgcatccctgtcattaccctaatcatagtgaaaggacaagacaaagagaccgaacaacacatgagtcgccagaagaaaaataatgttaaatcacaagattcataaaagaggtagtattatcattttttttctcaattcttgttacagttgcaaatgaaatatttactcaaccttctataatagaacaatgaaacataaagcatcttgaggacttgaattttttttaaatgcaaacaaaatataatgagctctgagaactaataattatctttatagaaaccagggaaagcaatcaccttgtatgaaacagcttctgtgagcttcttgtagaaaaacgtattgaagaaatgacaattagcagcagtcttatcagctgaaaacacgtgatgttgcacgtacctagtcaaacagaagcagaaattattacaaagctataacacgagacatataatgcaagtatcccagtcggtacttagaagtcacctgatgtagaaatttataactggcgatgtaagatattccccaggtgaaaggcatttcagatctttaagagatacttgaacaaggtctcgcccatcactttgatcactagataaagtgaaaaaaaggtcatatatcttattgacgattacaataagtaaacaacatgatagtttttctacctaccttgatgggtagtaaatatcttctggtaacctgcagatgtcatcaaaattaagttatctccaacacaaaagtgattcagacacttaatgaagataaacaataataactctgtttttacccttcaggaagttcacatgcttcctctactaccattggagacagaggttcatcttcatccaaattaatcactttatcatctgatttctataacaaaagtgtcagaaagggtgctgaggtccttctatgttaattaagtacaattgtatggcataagaagacataccttcctgcagcttgaactctgtagtggcgatgcttttaaactccaatgcctgtgagagaaagagcaaatcatatgtcaatacactaaattctcttatgaaccatatgtcaatacactaatcatatgtcaatacactaaattctcctatgaagcagtatcagggagaaaagatatggacctgggagtttcataaccaatgacttnnnnnnnnnnnnnnnnnnnnnnnnngacaagtaaataaggggaagattcatttggctttcccttaccataagcttcattgggtcttcgatcccctttaggatccttagactcagaataaaagttctttaaactgaccttacacttgcttaatcttggcagcgaccgccacacattatttttctctattattgagtctctattagctttgcttatccagcttccacgtcccaaatcttgtagtttgtcattaactagtttcactggttgaggtcccatctgttaaacaaggactattaagaagcagccacctaaaagggttacaaaaatagagaatgtaaaaaacaccatactttgagattgtcactaaaatgagcagcaaatgttgaccgagacacgtctttcgatcccgaagtcccttgtccagaggtgtcttttgaggctgtactcgctcgcataaacacatctgcaaacactttacatgttagacacaaaattttgcactcaacaccaaaattaactaggacaaacttgcaacaagatacctgagctttttggtttctcgagaatctgacatccgttgtctgcatcctgctaaaacaaggtaaagtcacatggcactgtatcagatcaattcatatcattttgtctaaacagagacagagtattatacatccataaggaaaaaaagataccaaacaaaatcagaactatactaaacaagtgaaaatgtaaaacaatggagaagctttagcagaatcttgaaccaatcgagacactcaaccactgatcctcctaaatacatactacattatcttccacacatcatcaaactctaaattccactgaacaattagcttcagctacaaatacagagatcacaaaaactttcatttgagtaacagaatgatgcaattgcagagtaagtaaaaaaaaaaaagacaaaaccattttggtccgttgttggaacatccttcgctgcttctcgtactcgagctctccgattctgtttcggattttctcacccttgtctgccaacttatcaccgagacgagttagaagtgatctctgacgcttcagatgatcgtcgagttcg

SEQ ID NO: 29168 - DNA, 684 bp, Arabidopsis thaliana landsberg
gaaattctttgtcgccactgtctgaatgataaaccagtgcagtttcaagtagtcagcgaccagacagtaaattttcagaatgcgtgagactctatcctttctgctattaatctaatcataacaggaaataatttcaactgaactaattaattggcaaattggctcaaattcgtgtatagatctacgtattcttattaatcccttgacattattttctggctacaggtttggtcaagtcaattacgaggatccacacttcaatgtaggcttgcccgtgttcagtattcatggaaaccatgatgatccagccggagtggtacatcacttacatatgcatgctcttgttatgcaaactcatttgaataggtatatagaactggattagttagtcaataggtaattcattgtgtttttgttctatgtctcttatggagacagacgaatctttctgcaattgatattctttccgcatgcaaccatgtgaactagtttggaaagatggttcttggtggttctggtgttggccagattactgtctcccctaaacgtatgaagaaggttggtgtaaagaatttctagcctagacacctggctccccctgacttcttggacaatcatttaatcaaattaatgtctagggctcaacaaccgtggctctctatgcgtttaggaaacatcagagat

SEQ ID NO: 29169 - DNA, 1253 bp, Arabidopsis thaliana landsberg
agtaggacgcggcttgcaatcctcagtagttccctgaaagtatggattctcttaaaggtaccttcagcacactcttactcctctgtcgtgattcgctttagccagaagcttgcattgatgaggctgtgtctgaatattagcttttctgacacaaccgaggaataataaatgtcttttgtaggttgctagacatttcaccagaggaacctttgaggttaaaccgttcatggatgagaagacagtaaacgaaagacagcatcaagttgccatttcactgctcaagaaagctgacgccatagcagactcctccggcaagaagaagctcactctaattccaattaagaaggagaagaccagtggtaaacaaaggcgatgagactatttttctttcttggcatcacttttgttagttgtatcaaataatactgtaccgaatcaatttttgtgtatcaatatcatcttcttgccaagattttgcattccaaagaaatagaaccaaactaggacatatattagtctaaaagtcactgagacaaaacaacagtaatggaaaatacaaagctattctacaatacaaaactggaaacaagtggtacaagacgattcaaacaacaaataaatgaggaatatgacagagatcaggaagttgcagcattgcaggtcccaactccatctttacaatcgtttgtaagatcgttgaatgtttcaatctgcttcttccctctcaagaatacttctgtgtcaacagatgctctcatgtaaccatcaaattcgaccgggttgcctccattaagcttagtagtctctgaataccactcactgctctcatcccaaagatctttgttgtcgcgaaggaaatgagtggcgtacttatctttcaaagggctgaagaaggataattctccttcattcgttgcgatgtagagatgccttacttcttcaactatgacctgcaaggacgacaagagagcgctgggggaagaatccgcttcaagatcagggcaaacctccttggaacttgcttcctctcctctatcaatgtgtacagcattgtaggcccagtttaacctggatgcaatagcagagacgattttcatcaacctgcttgattgccataacaaatgccacggacgtttaacaacagattctgaatctccttcacaaaccctgcaccaataaatgtctggttgtacagatccaaacttactcattatcaacgtatctttgacagacccgagcttaatgggagtgac

SEQ ID NO: 29170 - DNA, 1461 bp, Arabidopsis thaliana landsberg
tgtcggggggggtttgtttacacgacgcccattgtctcaagatatcttcaactctgggatgtagaacatcaagaactctctttattgtgatgatgaaagttcccagctgcatttcacaagagagaatgaatgatgtttcaacacaaatccttaagtcagaaaatgtaaaaacttctattgtacacgattgatgagtgactcttacttgagttggaagagagtagagaaccgatgattgccttcttgtcagcttctggacatgcatatttagcctctttggaatgctgtcttttaaaggaatcagaatgtcattgtattgcttctccagtgatttaacaatggctctctctacaattgaagcagtcttccaaaagtgtacatgaaaaagagagtgaaacctaagttagtctcgataattatctggtaagctgcaaaccacttataaatctgtagcttacattttccaagatcaatgtgtattgtggccatcgactaattaccacttcatactctataagagaatcttttattctctcatatatgtcttcagcaaatggggatgttgagtgatttgttattacaccagaccatggaacctgccaaaacaagccatccgttgctaattacaatcagatgatatcagatgataggctttgtgcttttaaggatcaatgcaaaattatcaggatggttaccttttctgctctgcatctgtcaagtagtctaagttccatatcatgtatccaaaccattatgtagttgtggaataaccccctagagtctacaccaccctgtaccggactgcgtaaagtaaaatgaaacggttaaagagaaagaatgagttcccacatatactctgattgattccgaaatgataatgtctaacctgattccccatgaatcgaggtttctctcaaaatctgaaactgctatcagaagctcattgacatgaggcagtgggcaggatggtggaactgctgacagaaatgctctgagccggtgacacagctgagtgctgtatacggcagcagctatattcgctaggtcgattgagcttgaacgataaacaaggtaatgagaacataagaccaaatcaatatcaagactcagagataatctcaagatgaaaaccagatgacaattgtaagttctttgttcggattgaatcattttaccttgggagtacatgctcattggtgatctttatatcagcctctatctcattgcttatgattagacaaagattcttcattttcaggtaggctgtagaaattgtgacggagtccaaaagaaaaccttcagagttgcaggaaacatactcatcggtttcaaccatgtgctttcgacacctcttctttgctgctgtctgcagtaggttttccataaaacaagaaatcgtgaacatcatagtcttgatatgttacaaaatcaagacaacgtacaggtatattaaataaaaac

SEQ ID NO: 29171 - DNA, 1471 bp, Arabidopsis thaliana landsberg
taagtaaagtttttgctatgctccttctttttcattttcaattcgaccaagtcaactaggtgtatggttgcagctgacaaaaccgaaacacgtttgtgggatatgcaagaggatatggaatcatttggatagtcagagctgggtaaaaagacatacaatttatgttatatatttgtagtgtagaatcagctaatgtgttctgacaatgttaccgtttgattacttattgtgaatcaggtgcgttgtgatgggtgtaaagtctggattcactcagcgtgtgatcaaatatcacataagcattttaaggtacatgttcatgttgctctttgtcaaagttatcgttcccacttactttcatgtattgagatcaatttcatttgttatctgaaggatttgggggaaacagattactattgtcccacatgcagaacaaaatttgattttgagctatcagattcagaaaaacaagactcaaaatccaagtagattttctttcctccaactgttattgtttattctcactaacaattgaattgtgaatactgaataccaaactctaaatttgagagttttattatagacttggcaaaaacaatgccccgatggtgcttcctgataaagttattgttgtatgctctggagtagaaggcatatatattccaagccttcatttgtaagctgtcaccctgtgatctctatttcacattgtctaactttcctgcctagtaattactctagaactggccaaagcaaagaccttttttgattgattgatagagttttcttacttcgtttggtttatttacagagtcgtatgtaagtgtggatcttgtggacctgaaaggaaagcacttagtgaatgggagaggcatactggttcaaaagcaaaaaattggagaactagtgttaaagttaaaagctccaagctgcctctagaagaatgggtttgtacaaattttcttattttttaggaatatgatctcattcttttaaatttttccatcagttacaaaaagtttgaatgacatattccttcacattgtagatgatgaaattagcagagttccacgcaaatgctactgcagcaaaacctcctaaacgaccctctataaagcagagaaagcagaggttgctttcctttcttagaggtattaagcaatttcggatctctgaacatatccaaaagtttctgctgcgttgcgcgctgcttatgctggcttgtttttttcactattggcagaaaagtatgagccggtcaacgtgaagtggacaaccgagcgatgtgcagtttgcagatgggtggaagattgggactacaacaagatcattatctgcaacaggtgctgttaaactgcgtagtttctctaaaacttttctacaaatcatagatgctgattgaatattaagtcttctgttcttttttctgatcagatgtcaaatagcagttcatcaggaatgctacggggcgagc

SEQ ID NO: 29172 - DNA, 2204 bp, Arabidopsis thaliana landsberg
gaatttctttaaggtttcgtttactaatatttcttgtaacacctgttttaacttgtctttaatcgcttactgtgttttcttcttctacagagccaaaaataataaagattgtcgggttttatgtgcgtttcaatttgggaaatatgagaccaaaaaaaaaaaaaaaaaaatctgttaagaaatagtgaaaaattgaagatggtcgaatccaacaaacggtagtgatgggatacaacaagttaacgatgaacgctgaatcctgaaaagattaaactataaatgggccactaagtaaaaaacaatatgggctagttgaaatcatgaggagataggctcaattctcctcaaattttccactcgcaaagttagcggttgataataactcgcctaattctcctcaattttttttctcataagtgttgcctttcgctaaatcccaagagtaatcatcttttatgtttaaagactatctgacgctcaaattaaatttgttcaacgactagacatgtagttggtttaacgggaaaataaatggtgataagtgttcaaagcttgatcgagaagtggtcaggaactcaacattattttttttgagataagatgacaaaatgatgtttccattgtgggattgaaaccctctaaacagcaatgggacctcggaggatcgacgaaagaagaagagacaattgaacgatcgcgatcttcttcccaaaatgtaatatggaaaatgaattccatatgatatctatttagattacggattcaaattttaaataactcctatcatgattaataaatcaaatttcggcgggtattgagtttgtaaggagatggataaattaaattagatgataagatgataaatttaagcccattacatacacaaacatacaatataggaaaggtgagtggggagaagagaaaaaaaagggtatgcaaagattctgattccttaccatatgggccaacacagtccgagtctgacaatatggtcttaaagacggaagaagtaaggatttgtcataatttagagtagttgttccgccatggacaacctccttcgaatgcattttccaggacgtcttccattctctttgccaatatcacctgtttccaccattcacaccaattttaaaactattcaaaaacatttctagtgtttggtggttacccggcagactaatccgcaagaggtaaccagggtcaaattaaaaccggggtatcatatggactgaactaggccggagtagcatagcgcaacatttctacccccaatgcaataccgagaacaagactaaaggttgaagttaacaacttacctccagactggaaagtacagcggcgggtacttcaactaagtctttcgagttcctttgcggtagaatcactcttttgataccataccggtgtgcagccaatatctgttcatcgatttaacatatgttttgaattgtcccaaaaaccatgaatgatggtactcaattttggtttttatttttaaccacatgtgaagctccgggatgctagaactagaagcagcttaccttatctttgatgccaccaacaggcagaacgagacctctgagtgtcatctctccggtcatggctgtgtctgctctaactcgtttctgactgaacaacgaaaccaaagctgtcaccaaagtcactcccgcagaaggcccgtctttcggcactgcaccagcaggaaagtgaatgtggatgtctcgtccatcaagaacattcatatcccctgcaagtgccagcttaaaatccgacgcacgagctcttacctaaaaaacatcaatagattatcaactaaaaagttctcaagtattttacagtctgtaatgagcaaggtttcaagtgaagataatgttacccatgtaagagctaattgagcagattctttgataacatctccgagttggcccgtcaaatgcatttcgcctttgcccaccatagatgtagcctccacgaactggacttcaccaccaaaagtagtccaaacgagacccactgaaacgccagctgacgccactcgatcagcggcttcactgtcatcaaaccttggaggctgcattggacccaacaaaaagtatgcggttaagtttcacaaatttcacgtttgtaccacaatttataacagccatcaatgattttctactctaagaactatttagaagtgaaaactgaacagagcagag

SEQ ID NO: 29173 - DNA, 886 bp, Arabidopsis thaliana landsberg
ctatcggttctcccaatcttgcaagtactcagctccagccggtgaatgagacacgagtgagaagacagattcttgtgaagagttctcgactgatcaaatccagactatgatttcttatcttagtactaagcttcacactgcatcaatctcacccatgccgataacatcttctgcttcgacttctgcaagtccctccgtacctatgatctcacagatctcaagtacattcctgtcactattctcaaatgcctattatgacatgcttatttcttctatatctcaagaaccggctgtgtctcctagagcttgcgtaatagattcaggagccattcaccatgttacacacaatagagacctatatctagaattcaagatcttagaaaatacctttgttagactcccaaatgattgtactgttaagatagcaggcatagggttcattcaactgtctgatgcaatctctctccacaatgtgcttatattcctgaatttaaattcaatttgatcagtgttagtgttctcacaaaatctttaaaaacaaaagttagttttacgtctgatgaatgttttgttcaggaacttacaaaggagttgatgattggtagaggtagtcaagttgggaatctttatgttctggattcaatgaaaataatcatactgtgtctttaaaaggtaccaattctatgagtcctgagttttctatttgcttgtctgttgttgctgattctattacatggcataagagattaggttatcctgcttattctaagatagatttgttgtctgatgtattgaatcttaaaaataaaaagataaataaagaacattcaccagtttgtcgtgtttgtcatttgtcaaaacaaaaacatttatcttttcaatctag

SEQ ID NO: 29174 - DNA, 1270 bp, Arabidopsis thaliana landsberg
  unsure (1)..(1270): unsure at all n locations
gaatcctctacgactctcaccggagatatagatgaagaacaccgcacgtcgtcagtggcagaggaagacacgctttctcattcccatcgacggcgctggagcactcctgttgattccggcggcgaacctcttcaaagcttatccgcgagcagatctctagagataaaatcagaccacgagaatcccgacgacgagtgcagggaacatagaggtgtgtgtggagtcattcttgacgaatatttctcgcgttcttcgaaaaataacagttacagtttctatctaggagggaagatatcgccgtggggaccgtatggaccgnnnnnnnnnnnnnnnnnnnnnnnnnnnnngccgtcgccgcggagaggaagaagcgtgacgaggaagcgagatctgccaccatttttgacgacactggattgtaacggacggccgagatttcatcacaggagagtgagaagcgaaggacggttagagattgccagcgtggcagtagattcaccggagatcgttagtgttcgtgggagagaaggactaagaatcggaacagtgagaatcagtcaacaaaacgacgtagtagaagatgataatgaagataaacagaatcactgatcttcctcttagaattttgatattttcagctaatttgccgggggaaaaaaacgacattgtagtccgatgatccgttagaaacaagataagaaaagggaattatgggctttacttatgaatattaggcccataataatattttgttgcaaaacaaacctgggcccgaagcccaaataattcgctcaagccgacgtgttaatttatgatttgtccgtcacagtgatacattaaagcacaggctgtgcggttatcacactgttcgcaggaagaggcttatttgagagagttttacttttgggggacacaaagatttggagaaaaactttactaaaaaagaatctggggaagtaagtgagatgaaggaagaggaggagatcggaaaaccagcgaaaccaaaagccaaggtagtcccacaatgacttacatatatttcgctttccattttctgggttccgttctttgcgtttttcttctctttattgtgttagatgcgaaccttcttataattccggtcaaagtgcatgcgtttttcgtgttcttactgtctttggagatctcagatcccgtattagtagttactattgatggaggaagttatacaaggcatagaattctaggttatcagttttggggttcacgattttttggtgcttggaagtaa

SEQ ID NO: 29175 - DNA, 2262 bp, Arabidopsis thaliana landsberg
gaaaacacaaagaattaatgtcttactgtattctcttttttctcgttactatatgaccattgatatattgaccctatctcttataatcagatctcatcttcatctctttgtgaattcttttattgtttgtcgtgcaagtaacaaagatcaagatgatatcaagattttctcttcttctgttcttgttcttggtcatagttcctctatcaaaatcttcaatcttcaaaaccttcatcaaatcctctccttcctcagtcgtcttccctctctccggcaacgtcttccctctcgggtaagcacatcaatgttttctctatcttgttgataatacaaaaacaaaccaaaaaaatcattttttgtaactttttcctctgtttctgtagatactactcagtcttaatgcaaataggaagccctccaaaggcatttcaatttgatattgataccggaagcgatctcacttgggttcaatgtgatgctccttgcagtggttgcactttggtatgatttcttatctttgttttaagaatttaacttcattctcttcttcttatgatctcggttttgttgttttttgtagcctcctaatcttcagtacaagcctaaaggaaacattatcccgtgctcaaacccgatctgtacagctcttcactggcctaacaagcctcattgcccaaacccgcaagaacaatgtgactatgaagttaaatatgctgatcaaggttcatcaatgggtgcacttgttaccgatcagtttcctttaaaactcgtaaatggctcgttcatgcaacctcctgtagcattcgggtgagctaggaaatagacatgtgaatcctgagatgatgaaaatgttaaatttcttgaaagaaattttttgtgtgttgtcaggtgtggttatgatcagagttaccctagtgcacatcctccgcccgcgactgctggagttttgggacttggaagagggaaaatcggtctcttgacacagcttgtctccgcgggactaacaagaaatgtggttggacattgcttaagttctaaaggtggaggctttttgttctttggagacaatcttgttccttccattggtgtggcatggacaccattattatcacaagagtatactttcttctttcatatttgcctcgacccgctttagagagattatattgttgtcttatagtactgatgattcatctattcgtgttcagcaaccactacacgaccggaccagccaatcttctcttcaacggaaagccaacaggtttaaaaggacttaaactcatttttgacaccggaagctcttacacttacttcaacagcaaggcataccaaacaataattaacctggtaattcttcaagaaacacaaagacttaagaaaattgtatgaaacctaatgcatcgatctctttcgcgtgttaacagatcggaaatgatctgaaagtctcaccgttgaaggttgcgaaagaagataagaccttaccaatctgctggaaaggagctaagccctttaaatctgttcttgaggtcaagaactttttcaagaccataacaatcaacttcaccaatgggagaagaaacactcagctctatcttgcacccgaattatatctcattgtctctgtaagaatatcgacacacccaaaatctcattcatcactttcaaagaagtattctagtgaaatttttattgtcttgttcagaaaactggaaacgtatgcttgggactactaaatggaagtgaagtaggattacaaaactccaacgtaatcggaggtaacaaccaaacacaaacaacatcaacacttaaacgctaattaatgtttctgtctgaaactaattttttgtttcttttgtcttgttttgaagatatctctatgcaagggctaatgatgatctacgacaacgagaagcaacaactcggatgggtttcttcagattgcaataagcttccctaaacatgacaccatcacaattataataactccttaataattttaaaatttacatatcataaaacatttttttacagtaattggaacatctttatggattaattaaaatgactgattagaccaaacaatctcaatctctagacttctatcagaagaattatctttcttgctttcatcatttagcttgaatattccactgtaacttccttctgacaatactttatcaattggtacctcactttccaagattttctgcaaattttacatcaaatacaaagttacgattctgataagatggaataaaacaa

SEQ ID NO: 29176 - DNA, 1310 bp, Arabidopsis thaliana landsberg
gcctgagtcaagcatgtaaaaagtttaaaactactggtagaaccaaaaattgggaaaatggaaatatgctttaaaggcaaaatacacacacagccaaatcataactgatgtgataaacccaagatcatatcaataaccctttaaaaactttgcaatttcctagaaacttgcaaattcatgtgcataattcagaagtatttttcaaagagaaatgacaaaaagctgagtgcaactgcaaagacaaatgggatagtgagagagagagtaaagaaaataaaactcaccggatcattttctaccacattgtcagcctcatcaaactcctccatgtctggaatatcatcatcctcctcacctccaaaatacgtaggtattgattggatagtatttttcttcgttatatccaaagcatccatggatggtaagatatcctctttccttgcctttatctatggcaaaaaatcaagacacaagttgaataagagataagtgaatttcagaggcacaaatctgtaaatacaaaatgtacctttcggtttcccatgtgtagccagccaaccatcattatcttcatcatcaaccaacacttcacctccagcagcttcataatcctctgccacagatgcagctctccgtagacaaggtactgtcaacccgtaaaaagtccacaacataatgtgcaatcagaactacaaagccaacagaaataagctttaaagatttcaaatttaccatttctagtaatcaaaaactgtttgtccgagggcaagtatggcttccttttgcttgcgtcaccagattccctactcaaaagtaaaagccattgtgtcaagcttacccattcaagcaaagatatagatatcgccaattagcttgaactagcagtcatatactaaagcgtgaaaactaatatgttatagacatatagtattgagcagcaagatatcaaagatcaaacttgttggtccactcaactaatcgaatatcataaaagttattaagatcaaacttgttggtccattcaaggaagttgtgaccttaatgccaccagaaaagcaacaatttgattgatcccatcacaatctcacataatttgtataaaagtcaataactatcgccaacagagagagacccattcacccataatcatcaaggatcaatttcacatatcatagatcacaaaattcacaaacacaaaattgtacaattggccattgctgtgtattcaaactccaataaaaactcaaaattcaaactaaccaagaccaggtgggacacttggagacgagattatctccggcaagtaggaa

SEQ ID NO: 29177 - DNA, 2556 bp, Arabidopsis thaliana landsberg
aaaaaaaaaacagacccataaagtggtgatctaacaacgtttagcagatttcaaagaaagaaataaatcttaaaatagaagaatcttgctttttgtcagtaaaaacatataccattttacccgtatttttatcactattttggcaaatatcttctggaatttaattccatttgaccttattctaaaatattgagtttctttttggggagaagttacttgggacatggatttttaaatagaattgagagactagtttattactttattgtgtatacaaacttacaaagtacaattcctatataaactgttttttttgtttccacaattctttagctaatttttttgtcgctacacaaaaaagtaaaaactcgtaaaaagctatctttaactcgaatatttactcggcatgaagcccatacatataggaggtctaacgccggccaaagcaagaaccgacgacggcaaaatccatagaccatctccacatatcaaaccggaagcaaccgccggtaccattaaaccggctttaactcgatctctcatattccaagcaaacacaatcaaacttcccacacacatatcaatagcaaagtaccctccaacaagaaacggaaccgccattgccatcggtaatggaacccaattccctatcttatccggtaacctatccctaacgagatttgccgccaccgcgaatgccaaaaaacccgtaacaaagctgtaaacaatgtttgaggcaaaatagagaaaccttcaactccaagaattgccatgtttctgtataccaaagcgtaaggagctttgtactctccctcctggttcccgacatcgaaagctttataaaacaagaagaaagttagaggcgccacaacgcatccgatcgctgtaccgatcgcttgactcacaagcatcgacctaggtgaagtcagagtcaaatgtcctgtcttgaaatcgtgcattaggtcagaagaaatcgatacaatcgattttatcaacccgcatccgacaagtcccgcgactacaccattttgtttccctgccatagcggctaagataaacagagcgactttaccatagttataagccatgttcatatctgttagccctgctccataagcgttactgaaacctaacgatggagctaacatgtaagctacgactatgaagtaccatttcagctcggggaacattatagggatcgcgatgatcgagacaacagagaacgctgcgtatcctactgctgcaacccataatggaatgctgtctcttacaaagatctcatctcttttaagatctgcaatagattgcttatctttctccgaatctgcgatttacgtttgaacatcagataatacattattgaaatgacgatttttctatagtttttttggtgtatacttactagatttcccagagttgcgattgtttaacttgacgtacatgtttattcctgtcttaaaaagtatcttgatgaattggtaaagcccgtctccgaggatcaatgagattgatataaacacctaaagagttatgaacaaattaagaacgaaagtacgcgaaagaaagggcggagtttattgtagagtactagtgttttttgtatggaaccttgtaaccattgagactcttcatgctgttttcaggaagagttgatgggaaccaatctcctttaagacctttaatgagtggccacatgattccccaagacagaaccgcgccaaaaagcaaagatatattgacaatatggggacagatcattcctgctccaacgtatgtcatgctaaagtcgaagtagaatctgtcaagttttttcaagatcatcaagattctgtttctatctgttgatatataaacagtcaatagaactaagaataatactcacgtgttcttcaaagcttctaacccgaaagttggaaactgaatgaaaccgcactctgtaccaccagagaagaaccattggaagaaagcccaaatgaagctaaatgagaagtacttcacaaacccaaacacttgtttcctgcatataaacagattttatttaaatcaaaaactctagaattagtggtgaaagagagctaagagactgccaaaaaatcgagttaatacttggccattttattgcctttaggagtgtggaaaccgttgatcaaaaccgcggtagctgttccacttggatatgtcagcttgtagtctatgatcatgatctggttagccaaaagaaaaagcataatgaacacttagcaatgtagacccaaaccagccaacaggggattaatagtccaaacttggccaatattaatctccgtcctatgttggatataaggggtttggccagggccatatcgcaattatatggggcggaatgacccgcaaactttggcctaccgcaacatctctaactacaaatgcaatgagacagaatcttgaataatctctacctttcttagaggaaccaatgctaaaagaccaacaaagcaagtaaagaacaagaaaaacggtcatccaaccgattccaggatctttcgtgccttccggataattcccatcagtgtagtt

SEQ ID NO: 29178 - DNA, 1739 bp, Arabidopsis thaliana landsberg
ggtactaaatcctaacatgtaccaagtagacaatattttgattcaatttcttggaccaactgtgaattaatacactaaaaatgtatagttgaaagagagtagaactcaccattctcagtgacatatattaaagggtcaccgtaagtggttttgaagtaatccattacgtagtaaatgccttttgggtagtagtaactggctgcattgaactgagaaaataaagtatatacatcagaaaaaagaaaaaatgaacgttatttttgcttaaacataaatgtaaaaaacggataatacataccggtggaccaggagcatgaccagttgcatttttagctgtgaacacaagggtgaaataattgatggtcactaaaaatgttatatagaaagattgtaactaaggagaaatagagtggtacatgtgagagttgtgcgtgagtccatcaaggcagtgtgtacgtccgaaggaacaatcgtctgattattttgggcgtattgagtgacgtaatagttgataccaagaaaatcatatgaaccctttacaagtgcggcttctgtttcactgaactctggaagccgatcaccaacatattccctcatgatgtctgggtatttaccttctgttagaggccccatgaacctgatgtacatttatatgtttattagcttatatatacatataactgttataaaatcatttcattttttttatatatatataccatccatggaaaaatattttagcccgctcagttgcatctttgctctcttgactatgatcaaatggaagaaaccatctagttatcatcactggtccaatcatacctttttggtcatcctgtggtcacgcagacatttatattacacaatgaaatgatgattggatcaatagaagggttaggttaggttagattaggttacaccttttaaaaaaaaggagaactcaccttatatttcgtcctgtaaacatcaacggccgctgcatgagcaagaagctggttatgtgcaacaatatagggttctgttgacgaatttccaccgttacatcttttatccacccattgggaacatcgaccggttgcatctgttcccaatgcatagcctctcgtaggcactgtgaaaagctggttgatggtgatccagtgctttactctatcaccaaatctctcgaaacatagatccgcgtaatctttgaaatcgtctctgcgcatattttatatatatataatcatttccttaatgcaatttcaaatatttacgtattttgtaatctttcttattaagcagcatgacatcaataacatacatgatcgttctgtccaagaaaccttcatattcatcttgcaatgattgaggaaggtcccagtgaaagagtgtaacgaaaggcgttatgttccttgcgatcaggccatctatgagaccgctgtagtagttaataccatcttcgttgattcccctactcctctttccttctgctcatttatatattgtatatttaatactcttccaaacaatcacaatccaatgttactatatacatatatggatcaataatgtgtacatacttggaaggattcttgaccacgcaaaggagaatctgtagcctttaactccaagctcttccatcacgtctagatctttctgcagtttatatacaaaatcatatgttaatccacacgtagttaatagatcattcagtgcatatatatagtgatgagaaattaacctgccaagtccggtat

SEQ ID NO: 29179 - DNA, 2585 bp, Arabidopsis thaliana landsberg
atttactcataattagtagaaaagagtacatttaggttgccaacgaaaacatacttttttctcttttctactaataataatgaaagtacaacttttctctgcttgacttgtccacaatggccaatgggtagtgttgtactaaataatattgtgaagactttgttagaatgataaacggcataatgtatagagatggattcaaaactcgaatatttcaattgttttctattgaaagtgtagactagcctttgcaatatataatatacacatctacaaagactgcaggttacagcgacacataacattgattaatgacttggtaaacgtacctacatctaattcaaattgagacattttaacaatcatgtggttttaatattaaaatggatactaagtaaagttatatagaatgaaacttcgattaatatatcattgatcatttctttccacattatcggtaatatctctctactcatatgctctattgatattgcatcattcgagcgacaaatttacaagtggctcaatttcttgtgaaataatgttttatactaatatttaatgtacaaaataagataacctttcacaaaaataacgaccatgtcgtattgtccagctaacaatttatttttaaactaaattcctatacgattaattggtcataagtcattacacttgcttctgtttctgtatatataaacttcctttttgtatttctttcggacacaacaaagaaagaggaagatgaagtttggtaaagaattgtcgtcacaaatggtacaagagtggcaacaagcttacgtaaactacgattatctcaaaacccttctcaaagaaatcatcaaactcaaagaaaaaaccaaccctcctccacctccacatcatgccgtccccggtgaaggaattagtcggaaaatgactctataccgagcatttagcggtcttgtccaaacgccgggaaagaaaagacaaagctctcgtcaatccaactattcttcggaaatagacatagaagaaggtaatctcaagtttcatatagttttttaacttaatactaaaatggtaatgagtgcattagtccatgtttttaatgtatttatgtaagtttgtttgcatttcctatgtgggattcctaataggtaaagctccaatacttgttagcaaatcgactcatggattagagacaacatttctaatgacggcagaggaaggaggagagtatgaattggtatttttccggcgactcgacgatgagtttaatagagttgaaaaattctataaagagaaagttgaagaagtaatgaaggatgcaattatgcttaataagcaaatggatgctcttattgcgtttagggttaaggtggagaatcctgttgggtggggatgggaggaacggacggtggagatgactcgtttggcctccgatatcgcgacttcgactgcggctatcgctgcttctacacccgccagaacccgaaccagtaagacaattaaagcagttaattctgtattttaacatacataactaaaacagttgcaacttgagattctccctaacactacatatttacaatttgaatagatcaaacttgactttaatttatgtgacaacaattagtctccgtcaatttatgaccgtttctaatgtttctttttaaatattttttcttcaaaaatcagtttttaaatcacatttaaattactaaccataagtactctctatggatgttcaagaaaacgatgtgttaagcagcgtctaaaatgtctaatttgatttaagcgattttagacgatttaagcgtttttaacataaatcttataaatataagatcatacataaaaatatctattagagaaataaaaatattaagtcttaaacaaaaattagatcaaagatttatttagtttataccaaccaatataaactaaatagagctatgtgtatggacataaaacttagttcgaaactgaaaaaattatattaaaacgaaattttaagcgagtttaagatgtcaagacggttgtttaggtgttgtttgagtgtttagcatttagtcggggtctatacagtttttattttttgtaatttggttttaattagagttcaaaagagtcattcttgtaaaatattgtttacataagtgatgtgatacggttcggaatgtattttccgtgccgaattattcgcttttatatttgcgcaatgaaaattaaagatgaaaaaaaatttgtgaactcatttttcacaatcgtagacggcttttaagtataaacttctttttcagtaaaaatgatatactaaaaagaaaaaattgatctcactaaaaaattccggtttataaaagctatcatcgtaaccggatcgccaatttgaaattgatgaatttatatatctcccgcgcgtttggttacagtgaatcctcgagctcaagctcacatggaagcaattcaagaaggaagcttcagcagagaaaacgaagacgaagatcacggctccgtccgcggagcaaccggcgacgtgaaaacgagcagcttgaacacgatgagaggtgcgaggccagcaccaatcgaagttctagatcaca

SEQ ID NO: 29180 - DNA, 3130 bp, Arabidopsis thaliana landsberg
cttcttcatcctgaaaattttagtaaagaaaagataagtttcgatgcctaacttgaaaacaaatgaaacataaaagctaatggcaacgtgataagccaaaaatcaagtccagcactattgagatatgaagtgtcgctgatgcagactttcaaaaaataaaatcagatgagactctttatcaatgcctgaacacttcttcatcattagctattttcagatttaaaggctatcgcatgtaagggttttaagaaacaagaccttagcctgaggctgagccacttttctcttagctggttgtttagctcccagtcctcgtttgttatgttttggctctgcttgtagaggcaccaatataccctgttcagcgattccaagaccagtgccttccttccagccatgcttctttaggagctgaaacccaatgttggacgaatttatagcagccaatgaactgcttgatccagaggactcacccataacgctcgacacctgaacatgttaactcacaattgtcaataaaaacaaaaggaatgcacattcagttctgcttacttcttatagtctattcaacacaactagaaacagacccaaaaaattcctaaaaaatatgtatccagaaatgacttatacctgaaaactattagcagagtcaatggcagcccatgaacttgtcgaaaccgaagaatctcccataagaaatcaaaacctatatacaatgaatcaaccatcagaaatattgttatcatctaaattcagggttcaattaaagccaaacacacgaattcgcttatgttgaatcttttctggaataaattagagcaaatttcacaaaccatgagcctgaatcatcaaaatattaagataataatagatagacagaactcaccaaaaacgtgaaactcaagcagtcaccgaacaaaacgagaccaagggaccctaaatcaccgatacgatctgatgaaaattgagtgaaaatcgcttcaatttattcctctctctatcgaaccaccgcctctgctaatcgccggcctgaggcagttggatcgtcttacgggaattgagaaaattgtaaaaagacgcctcttatgtttctaaatgctaattgttccaaatactttataaatatttcatattcgacccacatagtttacgtttatcgaagtttaggatagtttcatacctgaccagaatatttgggcctggaccaagagaggcccataaaatagtgagaagcttaacgtcaagaagacgcggagtaatctaaaccaaacagcttatctcgagttcgtcggtctcaggtgggcagtgattataacttcgtctccgtgtctgttcaagctcccattcttgtggccttcacgcttcaggaacaaagaccagtatctctctgaaagactacttctaggaaatttttgtctccatggtaagcaatctcttttcgcgcactcactttgatgatctccgttttcatttctaggttatacgattttcttctcgatcgcatttgttagggttttcaaaattaagactttgagtgtatttatctcgaattcagctgaacaatttcaaaatgcggcatcttcttatacatagatctagcgggttatgattgatctggtcgagcttatcgatttagagcgattgggtttattcacctgcttttgttggttttgtttggtttcctagtgttgaaacagcgattttatacgcgacacttaactcctgtatcatcaattttactgatttcgtgcttcaattttttgtatgcttttaaagtagatcatgtgttactttgagttaatttgccatttaccgtctttgttatatggatttgatgataggcacccgtgagggggattcttggcttgcaaagggcagtgtccatttggaaggaaagtaacagactgactccagctttgagatcattcagcactcaagctgcatccacttccaccactccacagcctcctccacctcctccgcctccggaaaagactcatttcggtggtctcaaggatgaagatcggatttttactaatctctatggtctgcatgacccatttctcaaaggcgcgatgaagagaggtgattggcataggaccaaagatttggtgctcaagggtactgattggattgtcaatgaaatgaagaaatctggacttcgtggacgtggtggtgctggtttcccttctggtcttaagtggtcctttatgcctaaagtttctgatggccgtccctcctatttggttgtcaatgctgatgagagtgagcctggaacttgtaaagatagggagatcatgcgtcatgaccctcacaaattgttggaagggtgtttgattgctggtgttggaatgagagctagtgctgcgtatatttacatcaggggtgaatatgtgaatgagcgtttgaatctagagaaggctagaagagaagcgtatgcagctggtctcttggggaagaatgcatgtggttctggttatgattttgaagtttatatccactttggtgctggtgcgtacatttgtggtgaagagactgcgcttcttgaaagccttgaagggaagcaaggaaaacctaggttgaagcctccgttccctgctaatgctggtttatatggttgtcccacaactgttaccaatgtggaaacagtggctgtttcgcctaccattttaaggcgtggacctgagtggttttctagtttcggtaggaagaataacgctgggacaaagctcttttgtatatcaggccatgtaaacaagccatgcacggtggaagaggagatgagtatacctctcaaggaactgattgagaggcattgtggaggtgttaggggtggatgggacaatctacttgctatcatccctggtggttcatctgttcctctgatccctaagaacatttgcgaggatgtgctgatggatttcgatgcgctcaaggctgtccaatcagggctaggaactgcatcagtcattgtgatggataaatcaaccgatgttgtggatgcaattgcaaggctatcttacttctacaagcatgaaagctgtgggcagagcactccttgcagagagggaacaggttggctttggatgatcatggggagactgaaagttggaaatgcaacagctggaag

SEQ ID NO: 29181 - DNA, 1480 bp, Arabidopsis thaliana landsberg
ggaataatggctacagctacgtatccgcctcctccaccatattacagactctacaaggattactcagaaaaccctaattctgctcctgaacctcctcctccgattgaaggcacctacgtctgttttggaggcaactatactgtgagtctcctccacatttccccctctttaaaatcttcatctttatgtgttttagtagttttcagtttttttggttcgtagactgaagatgttcttccaagcttagaagaacaaggagtgcctcaactttatcccaaagattctaatcttggtatgtcattgttttagctttgtgaatcaaactcaaaacccaattgttatttgctttctagagtacggtttttggttcttcccttaattggaatcaaacttattacatgagttcatttgcctctttgtttcgttgaagaaagtttcaaatatctttgtgtgtagattacaagaaggaactcaggtcactgaatagagaactacagttacatatattggagcttgctgatgttcttgttgacagaccttctcaatatgcgaagagaattggtgaaatttcttcaatcttcaagaacttgcatcaccttctcaattccttgaggcctcaccaagtaaagaagctctcatctttcgattaattacaacatggtttcaacggtttttgttttttcatcgttttgatctttctcttgttgtataggcgagagcaacgcttattcacattatggaacttcaaattcaacagaggaaacaagctgtggaagacattaagaggtttgtgtatgctacttaagttttctgtctttagggtgtgttaataatttaatatcaatctatcaagattcttcggaagctttgttggtagttcttatgggtccgtttgatgttttggttgtgtgcaggaggagagaagaagcacaaggactccttaaggatgctttcgtcactttagatggtcaataaagtatactatttttttttaatcccattttgtgtaaattagcgctaataacctatgccctcgaaacttttttttattttgtttttttataatgtatttacctttgtttgtttttgtctttgcatcttaaaagtaagtaagctcagtaatcatcacctgccttgatcatgtatgatatgtctttctctggatgttagaaaaaaacagtagtaaggtggatccaaagctattacaatgcaacctttgttttctaattttaacaaaaatggatccaaagctatctttgaaggtgatttcaaacaagtcattgagttggtcaacgggaagagtcttaattttggattcgggaagcaaaagcctggcaacatcggtttgaagatatccagtttgtttggactccaagatcaaacaatcatccagcagatcaaacaataatctttttttaccatcatttttatgctccacaatttattattgatgctctacattaccaagtactacaagctt

SEQ ID NO: 29182 - DNA, 3861 bp, Arabidopsis thaliana landsberg
atttgggatgggccaaactacatttcaaaacatcatgggtagagactaaggtcatctccaacgttgggttctgttgaaatttcgcaaaggctctgttgtttattttgattaaaatttaatcaaactgaaagaaaaactagagaagcgtttctatggagagagtttatgagggaatgagagaggcgaacacgtggcatacatttattggttatcttctttaaacaaaagaaaaaataaaaatgattgatttcatttcccttgttttgcccgaacaaattcttttctctctctccttctctttctcttcgcgacattgacaaaagaaaaattgctcaatctttgaaaaaccagaacaattaacgccggtgattgtttgtatttcgctatgttatctgagactttcaacgatggattcatcaaggcaacaaacgatgttcacatcggcggaagtttgcttaaatcgaaaaatagcaaattggattcggagagttatcgccgacgccttccccacattaggtatgaatcaattctaatctttattacgtgattagatgttgtatttggtggtttaatcaaaaaaattagggttttggaattgaagaaaatttagggttctgttttttaaaattagggttcttcgtttatagcaagattagggtattttttgatatatcttgaagcattttctatagttttgtatggtcatagatcgttttggagacatgttgtatagatttgtatggtcatagatcgttcgatagtttgattttctttttaatgtatatgtagatgtgattgattgggtttagtaaatgtaaactttgttgtttaatatctgtttctgtgattgaatcaaattggaaagttaactgtaaatgctaattgttgtttttttctctatgcttttggtgagtgttaatggcggatgagcaagtggttgtgagttaaggagaaactgtaaaggaattcgtctatgcacttcaatgaaggtaaatatgtacttgattgattgttatatagcattgattgttatttttttggtggatagacgttacatagattttcactgtgataaatggtttttgagaaatgataaagcttttgatagtgataaatgtgagctttagacagtgataaatgtttgcttgaaggtaaatatgtacttgattaattgttatataacattgattgttattttttggtggatagacgttacataggttttcactgtgataaatggtttttgacaaatgataaagcttttgatagtgataaatgtgagctttagacagtgataaatgtttgcttgaagttgatttcaactaataaccataataatggcttgaagttgattacgactaataaccataacttttgcttttaaaaatctttttgcctttactgaaattattaatgtcgaagcagtttatatataacccaaacatccaaagctactaacttaaaccattctattccttaaactcatagcttctcagttaacttttctcttctttaaacacatagctacccttctttctactctaaacatccaaagcacttgaaaatggattcttacaatccattatttcaagcttccggttttatggacttgttacaaagtcaacaagaaagctacaacaatgaggccaatcaatatgaggttggatcctcagaaattcccgtttttggaactcaacgttgtcaagaaagtcatgaggaacgctctgcttctagggtggccattgcaagaaagaaatgggcagctaaagaggatatagtactcattagtgcctggttaaacactagcaaagaccccgtggtcggaaatgagcaaaaagctccagctttttggaagaggattgcttcttatgttgcagcaaatccagaccttgacggtgttccaaagagggcgtcggctcaatgtaagcaaagatgggcaaagatgaatgagctagtcatgaagtttgtgggctgttatgccacaaccacaaaccaaaaagcaagtgggcaaaccgagaatgatgtcatgctctttgcaaatgagctctttgaaaatgatatgaaaaagaagttcagtctagatcatgcatggaggctgctgcgacatgaccaaaagtggttaatatctaatgctcctaaagggaaaggaattgcgaaaagaaggaaggttcgagttggtactcaagctgcaagttcacaacctattgatcttgaagatgatgatgtaatgcgtcggcctccgggtgtgaaggctgcgaaagcaaaagctaagaagacaccaacagttaaaggagaagaagtgaattcagttgaacacttgacttctttgtgggatcttaaggaaagagattgggatcgtaaggataagcaaagcaaaaaccaaatgcttgaaagtcttctttcaagaaccgaacctctttcagagtgtgacttggttcttaagaagaagctaattgaggagttgttttcataagtaccgaacctctttaaaatgtttaatttctttctaagtacttctaggatttgtttcaatgtcacaacaatggcatgtttaatttgctttgtctgtttttattgcaaatcactttgcttatgtatgatattgtcttaatgttatgtatgtattgctttaatgctttttatgatattgttttgtctcttatcttatgtcacaagtcatatttggccttatatgtcacaagactttgttgttaacttttgcagtttatcatcacgggttggagacaaagatagacaagacacgtaacttgcaactcatgttccacttgatgccaaaagagacatatgattcgtttgctttgttgtcttgtttttagctttgttgtcttctttttagctttgtatgtttccaccacttgtatgtttttagctttgtaattttgaccacaactttttcttaaaaactttagctttgtattttggaccacaagttgtcttgtttttagttttgtatgtttgtagctttgtattgtcatgtattccgaccacaagttgtttgtctttttttgttttgttccgatcctatatataattgatgtttttctttaccattcacaatcttcttcttattcacaatcttcttcttctcaacaattaacaatcttcttcttctttacaattcacaatcttcttcttcttattcacaatcttcttcttctcatttaaattactacctcaaaaacatcaacaatccacaattttcttcttatttacaatctttaaatttctttaacttcaaacaatatggcttcttcatcccgtactcctttcgatgatgccatggaacaaagctttgaccaattacttgattaacaattcgataatatgttcgttgatttggctagtgacgatgaaggcaccaagaaaacacggaaacaagcctttattgagagaaaacgagaagaaggacacaccctcttgaagaacgattattttagtgataatcctatattcccaaacgattattgcccaacctcttggaaaggccagtatacgcgaggctctgcaaaaccaaccattgttttagaggcagtcgcatcacaagatctctggatatggcacgcatttttttggacctccaggtaccttaaacgatatcaatattcttgatcgatcaccagtttttgatgaaattttacaaggtcgagctccaaatttgcgttacaaagtcaacgtcaacagacgagagtataatttggcttactatctcacatatggtatatatccgaaatggacgacttttatccaatctattcgacttccacaaggtcgaaaatcatctttatttgcatcataacaagaaaccgtccgtaaagatgtcgagcgtgcatttggagtatt

SEQ ID NO: 29183 - DNA, 2561 bp, Arabidopsis thaliana landsberg
  unsure (1)..(2561): unsure at all n locations
aagcctttcaatgtcgaatttcatctctgtacaagatcgtatctacgattatcaactcgaattcgtgtcgtttactagaaagaacgatctcttcgtaacattcactggatacaacgataatttcgagatggaacctgaagagcgtaccaagaagaaggtgttcttgtacaaaaccggagacgagacatctgaagaagtccagttctgtaactctctagccgggttacggtttctctgtgaatgtgtggagactcttaagattgttaatcgcatatttgtttgacaaaaaaaaaaaaattcgtcaacttacgtgacaaacaattcaataaattttatatactttaacgaaatttataagttgctcgaaatgttgacggtccaattgaaattaaagatccaaacatctcaaaagacttggtggcaatagtagtgaatattgatcaggcagagctttggaattctatatgaactagagattgttatcctctcgagggaatatacacgatatacgaagcctttgttttgctctcgaaggaacaagccggattggtctttgattcaataagtcaaaccaatttcatctaaccggtttgggctagccggttttggttttctattttgtcattcaagtgaggaggaaacactttatagtttatagattacacagaattgattaaactcgaaaaagagattaagaaaggatattaatggagagaggaatgaacaatgggcaatcactctggcactctcagtcaccgaaaactccaacgacgatgctagatcgggctctttcctctcgccgtcctcactccgacgccgatctctctgcnnnnnnnnnnnnnnnnnccgacgaatctaaaaccaaacgcccacacatctacctccttgcttccaatttcctttctcggatcggtcatcagtggtggccttgtctcattctcgctctcctcttcctcgtcctcctcttcctcatctccgttgctttccattctcacagctttgtgtgcatctcccgcttcgatcccgctgctcggatcgggtttttcggtcttgacggcctcgaatcggattttggtgccctaggtgttccttggtgtaagcacttgagatctctgcttatttttaagccttaatgtgttttgtgttcgacattgtgaattggttctagtggaatctctagtgttctcatgtggatttactcaaaatgctttggttagatttgatctacgtttccattactgttgatagtattcaggtcaatttgaaaattgttctctaaatctgtttcagatgaggttttagtatcattgaattgaagccttgtagcttccactggttaatctctggatagtagtggctgtgctgtgtgttgacaaatcaatggagaagaaccattaactcctctagtacactttgattacgatttttatactgttagatagcgatgttgttgttctcaatttttccattaaagcaacaggaagatgatttattggatttgttgtgttatggaagtatttaatttttttccttggcaaaaggcagatcgaaacatggaaaagaagttgagtggacatccaaagatttactcaagggtctagaagagtttgtgccgatatacgaaacacgaccgattaagaacaacatgtatggaatgggttttgatcatagctttgggttatggttcatggcccgttggctaaagccagatttgatgattgagagtggtgcttttaagggacattctacttgggttctgcggcaggcgatgccagatacacctatgatttcacttactcctaggcaccctgagaaatatctgagaaagggacctgcttatgtagatggaaactgcacatactttgcaggcaaagattttgttgattttggaagtgttgattggaagaatgtgttgagaaaacatggtataacagatctcagccgtgtaattgtctttttcgatgaccatcagaatgaactcaaaaggtagtttttcatttctcatctctttcccggtattgtatgtgctaagcattcactgattttattttacatattttcaaacgagcaggctaaagcaggcactgaaagctggtttccgacatctcattttcgaggataactacgatacaggaaccggggatcactattcactgagacagatatgtgatcagtcatatataagaggtgggagttctaaagccttcacacaatagatacacatagggtttgggattaaactggttctcatatggattggtttgttttctccaggaggcggccacagctgtttcaaagacagcgatgaagctaggatgagatcaaagaggaagaagttctgggaaaaagcagttgatacagaggaactgtgcggaccaggggaaacatggtggtgagttaaaggagaaatgagagacgatttcaaccacacgaacacgcagatctcatacaatcagcattttcaaaacagtcgttacgttgaatcgattctcgacgtctattgggagctactccggtcgcaggaccttcattacccatcagtcgcgatatgacctgctcga

SEQ ID NO: 29184 - DNA, 2763 bp, Arabidopsis thaliana landsberg
atgcttcatggggggttggttatgtttttgacaaagccatctaacttcacatctgttttctttgtttttaagattgtattggttcggctttcaatgcaaagggagtgatgcaatgccccaactgtcggaaagtagaaaaaggccagtggctttatgcaaacggttgtcgttcatatcccgaattcaatgtcgaggattgggttcacgaagaagatatttatgatattggagcatactctgaaatggtaagaaactgataacacaatccttctcatattccattgcgcttctgcattacttttcacttctttgtctcatgtgctgagtttttaatttttgaaagattgctgttcattttatttgattgcttcaattatgttccatctcgaaaataccttgtgtttatgtatatttgtagtcttttggagttcactggtgcccatttggaagctcagcccgtcttccttctttcgagtaagcaactgcataacatccatttaactctcttttctgctacttttggcaatcaaaactggcatcctcttcccttctttgctgatgaatctctttcaaactttgtagggatggagaattttcaccgagttcatgtaagactatttgtcagatcggttattccatttttgtcctcattatcttcttcttatgttctggaattcgggtttatcgatctattaattctaatgttgtggtacagatcacgatcttttgggacagcaaggttactatactgaaccagcagcgccaaccgcaggtcatccatgtccatatgtaacctattttggcccggttcactcgccttcctcaagcagtggtggtgctgcaggcgtttcagacagttcaagtttcagtagtcactggaacactggctcttcggtttctggtgaagtcccaactccttatggtttccctgtggatccgcactatcacggctgggattatcatccgcctccacccccaccgccacagcatttctctgcttctggcgctcatgtgggcagtccaactcagcccacgcctccaccagccgctgcgaggacttctcgagccaacggctcagatatgatcagacccagaccgccacatttcacgcgtccatttcatggtcacaggtaaacattttctgtcttggtagaggtatatcactaatgaacataaaatatgaccttaattacaaatgtgttgagaatttcttcacataaagaaactaaagtgctcacagaattcaaatttggttttgtgcaaagatttctcaaaattgaagcactgaattgttatattggtaactacactcttgatttgtggaaataaattagttttgcggaatggaatggtggaattgaaataagtaggaaaaagtcaattttcgtgaaaacttgtgtaatggcatatttagtttgcattttagacatcttgcggaataaattaatgaacaaatctgcaaataaacgtgactaacaaaagcccgttatttcgtgataccacaggtttaccaattagaccttttatcaactatcatatttttttgtttgttaaaacacatcttatggcttgtttgtgcagttccagtggtagagcgggtagctcggtggcatctgttccgaggacaccaccatttccaggaagcaacgctcggacccgagacagaatgcaggctcttcaagcctattaccaacagtcttctgcacagtcacaccagccggattcgcctatagtctctcgagggcctgtattcccatctggccggaggcccgctagaggaatagcttcagggatgggatcaacgtcatcttcttcagatcaggcaggtgggagtggttttatccggtttaacatatgggagagagatccttatatgcaatcacaacaagcctactcggttaatcagatggacagagaaccaaacatttggacatcttcatttaatgaaggatcaggaagcttccatcagaggcacggtggcggaggaggatcatcttaagaactgagtcagtacccgttcgagattctcaccggtcgggcaattctcatgatggacaaaaaaccaaaaaaagaaaaaaaaaacattgggaatttgatatttgagaaaacctgaaaaactgcatgctcaagttatgtgatgaattgataatctaaaaacacaaaatggtatgtaatggtttggagagagactgcctcccccagtcggtggtgtgacccccgtgcggttcgaggtctgggtatgaatcgggggagcgaaagaggtctttgggtatttgtgttttaatgtggcgacattgggtatccaagttatgaccctaaggaaactttctttcttctatctggttttgttaaattttaactgtcgagtttttcttcatattactatcccaaattttgatggtctttcttttgttttgttttccctacaacataaaaattgacgtcaaatgaccaagactatagtctatacgtgacatcaaaatcgaacagtccaaaccaaagtcaaatgaccaagacctgtctatagtctataatgttacaacaaggccgccttttttcttctaattcagcgtcgtaattgcaaaataataaaatagtttaatagtaaaattgagggatacaaaaacaaaaggtagaactttcctcctccgattttatctcagcctatataaattaccggcgaaaggctttatttttcttccaagttttgatttatccaacaatggtggaatcaaagacgaaatttgaagagatcagaaaatg

SEQ ID NO: 29185 - DNA, 2867 bp, Arabidopsis thaliana landsberg
  unsure (1)..(2867): unsure at all n locations
caatatctgaaactctgcgtccgaatgccttcaaagtactgataccttttttatgtatataattatgagttacttagtggctttttgttcaaacttaaaaagttgttcttgggaaatcttgctttcatgtgttctgttaagctaaagcgaaactgatatcttagttcgatctttgtttgttatctgaaaatattcctacctttaattatcctacactaaaaagaagcattcattttttcctcaaacaaagactgatctacacagttaattactcttaaacaatgtatgctataactattacaaaattttagattttttttttttgttgttgaattaaaaaagggagataaaaatgaaagaattggataaaatgaaaagagagaaaaaagaagaaggtcaaagtgcaattgttgcaagttgtgtttggctattgttattggtgcatgttgcctgagaactgaatcttaggcatgtagctgttcccttgaagaaccaaaaaagaagcaagaaagttttggtttttctcaactttttttttacataaaaagtaatccactttagaagagtattcttgtcccacagagtaaaattctctattgtatattgctgccaaaattttaattatataagggaaaaaagaaagctggtagctagatattgtgtttaaagatatgtcctgattttgttctcaaggttcatgcaaccgggttcgagttgccgcccaaacattctattctttattcctagaaaatataaacaacaagtttctgttaattaacttctcacagttctaagagaagttgtaccagaaacagagatattaatgaaaattagggaatatgtaaaagatgtttcttatttggctcttggaatttggaactgaaaatgtttatttttttggctttttttataaaaaatgttgtttgttagaaacaaaaacacagaaatgaactattttaacaacaatccatactatgtgatatgaacaagtcacaaaagtacaacgaaatttgacaaaaaattaaaatcatagagggatttgaacacagcaaagctgtcaccgtttttccaaaaccacgactgagtttacccgtaggccgtatctaagtcctgagtaagtttcatgttcaaatggaagacgataaattagttttgttagaaactctgtttcgaaaaacagagaaagaaaatagattagtccgggaatttttggctttgtacgtcttcatacaattttttgcgataggtgtgagtgtgacacattgactaggattaatgaaggttataacccacttatatcatgcaaaagacataaacatatgaaaagaatcagctacttttttctaatggcattaattaagcttctttactttangtgtcactattgtgcattcaatcttgaacggataacaagaagaagcaaacttggatttatatttgagggaattaaagtcactcatgatatatggataagacaaacactgttggagaaacaaaaacctatctagaagcgatcaacgatcctgaggagagcttgagtcaacgccaagtatacatccatatggtaacggaaacttgaagggacttgaatgttgagtgcctcgagactgttgcggcacgataccggaggattcaccaccttcacgctgacgtcatacgcagccttgtcgtaatctccggttataagttgagtgtcggcctctcccacgccatgcttagccgttgagaaacccaaaccgcactgcttcaacgctgctgcagtatttggattctggtagtgctgcgagcccaaagtggaagcgttcttggtgagaacaaggaggtgtgagttgatgcatttgaggatgatacgagccagtcctactttgtcggcctcatgagaaccagggtcggagcttagacagcgaagacacaaggtgggattgtcagagttgtgacattgttgcatcattagctcttcattggctctggatattactgatattgttgttacaagtgtggtgaggataagaagttttgcaagcaaagccatttttttgttcatgcatattagtaaaaacactcttcactttttggtaaaggtgaatcactattgtctatggtttacctacttaagaagagttacgaatttgtaacgttcggaaatagaaaatgtatttttctataaatccactggttgcagtatgtatattggtgacatgtggttcaagcgttagtttcaacattaacgataagttaattacttaagcacaaatataacgtgagtggtcttcctcactattttcttcccaaaggtgataaggttaattacctttcttgtttttaatgggccagatatgggcctaaaataccgtggggcagtttacgaatgtgtgacggcgccaagccgagccgtatattgttgattgatgaccgttacgctctcaggacaaatctgtaaattcatataatattttaaaataaaacccaaaagagccgttaccaaagagcctcaataaagtccgcatctttttttctctgcgattcacaaatctacacttctctctctctctctaaccacaaagcttccatggcgtcagatcagagcacgaatccaccgatcatggaggcaaagacaagacatcctcttcaccagatcgcagatacaccaacacacaagcttctcctgaaacaatggttaaaagaagaagagctaattctaagccgtgtctctcacaaagaatctcagatcgattctgttcgaagagaaatcactcagctctacatcttcttctttctcttccactccatttctctgctacttctcttccacgctgtctcatcctcatcttcctctgcttcttccagtgcttgtaaaagatcatgga

SEQ ID NO: 29186 - DNA, 1047 bp, Arabidopsis thaliana landsberg
  unsure (1)..(1047): unsure at all n locations
ttttttcatgtgtacattacagaatttaaggttcttgatcatgaatattggctgatacaaagtaaatgctcccattgcgtttctacaaaatgaagaacataatcttctctcatctttttttttttttttttcaaatttgaggcacctctctatattcttatacatccatttatttccattggtgtcagctgattcccacattttcatggtggaaggggaaaaataacatataaaagaacacttgattgctagaatttagagatgacgaaaaaaaaaacaagtgaagatcaatgagtggaggtaacctttagataattcttcttatgcttagtcacaacatgttctcttttagctacctgaaagcattttaaaactgactaggagcaatgcataaaatcatgccaagagccagaagttcttatgtgtctttgtgtttaaaacatatcctccattttgacctttcttcgttacaccaacacaagtgcatttactgatctcgattagatattccgctgtgtctactccttttgaacctcttagtgaccctccaggcctgctagttctgtcaaatccaaaaaccatccgaaannnnnnnnnnnnnnnnnnnnnnnnnnnnnnnnnnnnnnnnnnnnnaacgagttatgagaacacataccctagaagagaggatgagattgtccggcgttggcctatgattataacatcaacaccaagcttgtcaccatgaagaagaatcgctgtagctttgacgccatctatagctatacactcggtgtgtacacgcacctttggctgagcgatttcacatattcgtttcatttgttccaagaaattaccatctccttgaccaatctccgaggctaaagcgtttgctgcggcgttagaagcggttgtggtaccgttagaagcgggagaggagccgctgctagaggaagagattgagcttggtaatctcaaaaaacttgagaaagcatttttccaagaaccaccagagttttcaatatgtacaagaataagctcgtcttgctcgagcacggcgtgtgaaag

SEQ ID NO: 29187 - DNA, 1980 bp, Arabidopsis thaliana landsberg
aacgttgtttttatgtgtgattgtgtgtctaataaaagaatattaattttggaaacatcttttaatagtaacaaataattcatttgttttgtccaatttaaattctcagttcttcgttctttcgctgactttagctatctctctctgtaaagacttcgttttttttttgttgccgtgtgacgacttcttcttcctcttcttcttcgacctctttctctcggaagcttagcttcttaaaatccatttctctcggaagcttagcttctcaaatcctcgatctcttttgtatcgtgattcattaaccacttcatgataattataatcttccttctcttctgacgattgaattacatcttcttctgatagctgttctgatttttttctgtatacaaagtaaattcaaaggtgagagttgtgtcatcttttgctttttatatacttgttcaataagtcaaagttctttatgttgctgttgggttttagtttattggaatcaacttgcgaaatttgattacttttagcttcgagatcccttctatgactcactggaacttagggtctgtgttacttggaaaagaatttggatctgttgggtctaaaggccttcctctctgttaagtggttttgtacttgggggaagccttaactttggaaatgcttgtactttgcagattagttgttcgataatatgcttcaatggttttgattttgtggttcggtatatgttatatgatcattatcagtgttttattggtgtcctgcagtggacaaacatcggtattttaatctcctctcgataatgaagtgtttcttgttctctggtggggataagagaggggaacagaagacccctatttcggtttcattgacctctatcttctctgaccgcgaaataaaccgaagcgggtcagagttcaactctcgtgatgtctctgggacgagcacagaatcatccatggggaggaagaactcgtaccctccggtgtctactagagcaagtaatctcagagagttcagcattactgatctcaagtctgcaacaaagaactttagccgatctgttatgattggagaaggcggtttcggttgtgtcttcaggggcacagtgaggaacttagaggactcgtcagttaaaatcgaagtcgcagtgaagcagctcggtaaaagagggttgcaggtatgtctgttttttccaatcttgttctcaagatctgttactcatccactggtttaacactattatctcatttcttggatgttgcaggggcataaggaatgggttacggaagtgaacttcctcggaatagttgagcatacaaacttggtgaaattgcttggctattgtgcagaagatgatgaacgtggaatccaacggcttttggtttatgaatacatgcctaaccgaagtgttgaattccacttatcccctcggtcactcacagttcttacttgggacctcagactgagaatcgcccaagatgcagctcgcggattaacatacctgcatgaagaaatggagtttcaggtaatatgatgactctgctacgttactgatctcatttcactctcttggcgtaactttgatttattggcttttcagataatattccgcgatttcaagtcctcgaacattcttttggatgaggactggaaagcaaagctctcagatttcggtttggctcgtttaggtccatctgaaggattaacccatgtttctactgatgtaagttctgcattcacttcttttggttgcaagattgaaaaacaggtatgtttttgaacgggtttctttggctttattaggttgtaggtacaatgggttatgcagcacctgaatacattcaaaccggccgtctcacatcgaaaagcgatgtgtggggttatggagtcttcctctatgagcttatcactgggaggcgaccggtggacagaaacagacccaagggagagcagaagcttctagaatgggtgagaccttat

SEQ ID NO: 29188 - DNA, 3206 bp, Arabidopsis thaliana landsberg
  unsure (1)..(3206): unsure at all n locations
agaagcgttgtacgagcctcaaaaggatctcccataccatcatcgccctcctcattcaaagactcaacaacatgtacataaggagaaactacgtctttacttaaacgtgccatgtctttagaataacgcccaaaatccacaacaatgagaatcgacgcattcacttgttgccttagaaatctgaaagcattaggatgtgtcatcggaatcacatgatctttacctcctgaacgattccaatacttcgaattctcaagaaactccattaactcaacctgatcacacaacatgaaacaataatggtggcgattcataaagattcaaactttgcaaaaaatagtcaacgaatttgccattacccatcacccaaaatcaccggaatttcaaaaatttccgatcaaaattatacctgtaatagccgatcaaattcagtatctggatcagtcatgttcttcccatgagtattaaaactcaacgaagagaaaaaaggaacataaaacacatccgccaaatccggatcaaaaaccctaattgcttcattctcatcctcaccaccgttaagaagagaagccataagccaatactcaacgctatgttgtcttttaatcccagaagtctgaggccaagaaggtaaattcttccctgtgataggctcaatatctgagctatgaggatccatcatcgcgatattaaactttcgtgggagatcgtacatgaagacacggagaggttttccagaggagctacaaggagaagaagctccattgggttgggattggaggaggtttaagtatggtcttggatcgacggttcccatgtagattgagaatgaagcaacgaggaagatgaagaagacgattgtacatattgttttgccgtacatttcttcttcgagagagatgatacagagaagaagaagaagaaagtgagagatttagatccaacggtctctgttttgggttttttcgttgcttggtgattgtaatgagttttgatgaaatgaaacgtattgagtcattagacatttaatgatttatgatttaagaaagattctttcagttacaaacaaatttactgtagttgttttttctttttcttttacacacaacataggtgttgtaattcaagaaattgcacattcactttagaagttttaaaagattaggtaattgcacattacaatcaatatttttttgtaaaatgatcactatactataatagaagctaaggatgttgaacacacaaaggattcaaaaagtaaatgtttggttttccggttcgatgttgaaagactgagttatagaggtaatggttcgaattaccatttttgcaactcttgttcatcttatttgattgtggtcaattggaaaaaacgtttacgggtttcttttggttttcagttttgttaccaacaatttgatcattgagacattgacaatccgattttgttcacatgtttgaaaataacgagcgaatgggccgaaccctgctgactcagacttggtcaaagtttttctaagcaaatttcattcttgggccgagtctagggataaagctcatatctagcatttatgtataaccaaaacacataggtgcatatagactagacgagtgacagtccaggatacatacatatagatatcctgataatgatatccatccttgctttgtgaggatcggacaactttgaagaatggactaaaattgtgcttgcctgaaagaagaaatttggtttcctcgacgaccaacttgtaaaaccagaggaaaactctccccagctatgatgattgaaaatccattaattaatactctcttgatatcttggatcaagataactattggtccgagacttggctaatatctcacacaaatagttggtacgtgatgtgtgggaacatatcatcacgtaaagaaaggaaacgtagtttgctttatttaacatacatagacatagttatgttcacgacactttaatgtctacatgtttttttgcgtgttggattacatcccaaaacaaaaaaaaaacatttgtgtcaaatctttttaattaaaacaacgtgtcatttccttttaaccaaattttcttccctagatatataccccaatacatggtagtagatcttttttttggtttttttttttggttcaaaggtagtaaactaattaagccttgattttattcctcttattcttcttagactcgtatttagttcacgagttacgtacaaagtttgtttttttgtctaagcaagcggaaatattttgtaagattataccatctacttttgctgcatcgtatttaaaagtcagaaaaacaacnnnnnnnnnnnnnnnnnnnnnnctgtccatagacatgcaaaattgattcaaatttatgaaatcacctttaaattgtctaagatattcaaattaaatgacttcaaactttaaatcaaaattttaccaaatctacacttcagaacaaaatgaatctgaataaaattagatttagggaaacgtaaagacttcattatggaataaatcgtgaggacttttaagtcattttgcatctcactctcacgccgtaacagtctctctctatgacacaaagcgacggtgttcccgttctgttccgttccgttaagtttcggacttatattacagaactgaacaatcgttgtcttcaagtacgagatttgtctgatttttccaaagcgccgattcgaagatttgaatccattttagtgatgccgttttggaagatgagcgcaagagatgtcactggattcaaattcctcttctcgcttgtcttcatctacgctttaatgtcagctattgtttactccgtcctccacatgaaattcatctctccgcttccggcaaacgctcctctcgaacgattctctgaagctagagccgtcgaacacatccgtgtcttggctgaagagatcgatggtcgtcaggtgatgattcgccgccgtttcatctctctcttttctctgtctctctctgatcttgtttttacgacatgggttttgtaggaaggacgacctggacttaaagaagctgcaacgtatataaaatcgcaattggagatggtgaaggagagagctggaccaaatctaaggtttttttgaataacttaaatgcttgagatttcatcactctccaagaaaagaatgtttttttcttgtaactttttgtgtctgagctgaaaaatgaaggct

SEQ ID NO: 29189 - DNA, 1903 bp, Arabidopsis thaliana landsberg
ttattgcattgttctagaaagcgtgttttgtttcacctgtaggcttataaatgagcgtggaagtattgcaggtgcgataagagcttgaagctgctcattgatgttaatgtttctaacacttatctgcaaggattccacggaactggattcagattgcttctggctaaacaaaatactgaaggcttcgaaaggcagacaattaactgacctcttcaaactgaaggtagatgtttcgactagagaccttatcaaatttcgcggtaacaacaagtgttgcaccttcttgctcctgccaaggattcatttacagtaactgtctggacatatatgaaattgaaagggtggttacaagtagagaagcaaaaacctccaacaagcttggaagactccactgaacaacattccgaatgatcccaccgtcggatctatctctgcactcaaacttctgaaagacctgccctacctgatcaaaatccacacaggattaaaaccgaagcccaaaactaaagtctctctctgctttgttcattatcattagtagtatatacctgaaagaagggaagtcttgaagcagcttcaaacagaacaacaacatcaggtgcagatgtatattgtagcctccatgttccatctaacttcactggatcaatttcttcaccgccattaaacccttccacagtcacctgaaaagtttctaccaaatccagactcattgaagaatataacatcgtcactcaatatcatacatcaacagtatccaatgcaatggctgtaccagagcctcctcaatgatagatcgttgatcagaagtggcagtgagtcctcgttgagtgtcttgaacagctctcagtagatcgtgtttcttgtgttctaagtcaagttcattgtcgacgacgacctgagttatcaccgaaacatactcaaatcatttgtttcagacgagccaaaaacaaaaatgtgcagagaacaaaccctggccgaagtctctccagaagctacagctactcgacacgagaatctctttctatggttggttttaatgtttaagccaaaagggctgattctacagacgcgggacaatgaaatcgcagggcaagagaaagtcgcagacgcaattcgatccattttcgaacctgatggataagcttgtacaagataaaaattttatccccaaagagtaacaatgtctaggagaaaaaaataataataataatttagtcgataccttcaaagctcaaaagctgctcgaggatggtgacaaactgagaactgaggaagatgagacagctttattttctataattactcttcatttttttattttaatacgtggcagtattttgacctgacatcgtgaaccggctcaaaccttaaccgagcctttgagcaatgaaagctgtcaattattccaccagaacatgaatcgaaaatgaccaagtccgatttacccaagtaacaaatgatccatagactaaaccatcaaaatggcactgtacaacaaaaggaaggccacattttgtaaactttgtaaagcagttttcttctttcttcagttagagccattgattagccattgttgtctggttggtggtgagcatcatgtgcaatctcatcctctccatctccaaaattagcccatggaagtattgactcaatcaacacagctaatggactccgatttgccaaatcacgtggacgtggtggtggtgcttggtgttgacctctcccgccaccttcagccatttgctctcctcccaccattcttggatcagccacaaagttctgcaaattgtctggtgggagagttggcatcgaatcagagaaatcatgggttgataaatgagagtacctgcaatgggttagaaccatacgtgatcagctctagccaaaaaaaaagaaattg

SEQ ID NO: 29190 - DNA, 5128 bp, Arabidopsis thaliana landsberg
attcaggttttttcgtttgtgtttctaagaagtttattgtttcatttcccttcattttactgtaggagcttggggcaacgctaagagagatagtctctctgaagcgacagattgacgatgtgccatgccaatctgaactcctccagtatgctcttcttcccccactttcttacttctaagataatatgccttggatttggcactttgtatttgtgtacttgttcgcgttgaaactctttcatctcaacaatttttttgatttaaccccaccactcccactggtttgatgagcaagtatctttgattatgttgtaaaatatatgaatcatcatgtcaggagtcaagttaatttgcgtgtagctttgtggaatccagttttactatggctaatttcccacttggtgtatttatttcacgctaaattccaatatttcattccgtgcagatatgaaagaagattctcagagctgaatgtctgtattcaggttcgaatagtcaaattaatatttgcctcgttgctttgcaggtttgtttcttagttgaaaatgaacttgctagcttgacgaacatttgtttgatatctgactaaaaacaggagaaacttcaacaaactaggaagctctatgcaacatacaatgctcttttagaaatcaaagatttgatgcttaaggagacatcattattgaattccataggttcacaggtaaaatacaggcattattattttgttgattttctataactagcatcatctgctttgtactgttctccacgttgtacctttagttgtcatgtacttatatcgttgagaatagcttatgttcattactaagttgatttacgtctctgctttccccttttagtatatctcttggtgagtcaaagtttcaccataattccgttgacttgattgtagtttcaagacgtgattggtactcctgctggccgtgtgaagcttattgattcaatggaaggagtcatgaaaggaatccaacaggtaatctgagttatattgaatcaggtatttgaggcacaaagcatgaactaacccatcttacctatctatagctgtatgatttgtcataacaaaatgtttaaagtgcagaagattggaaaaatacaacttgggcttcaagaagagcagaggctccgtgatgcttcaaaagaaaagtatatagctgcagctgcagagcaaagaaaatgctacactgtactaagagcattccaggttagcacaagataggaaataagtgtttatactgaaaagcccgagagtcatctacttacgtagtgctaaatttctcaatggcaggaggaatgtactaagaatgagaggctgagaagtcatatatctgccatgaacgaacacctctgactcgaagaagggtttgaataaggtgatatgaagtgactctcctttcgagttacagctaaccagagtagagccagagttgatttagatatgattctcttgtgatgtgatgtatccatatgctcagccttacatggaaatatacgaaaatcgataggcctagaaatagtaggtttggttgaccaatatgtttatatatgagctatgagaaaatattattctctaaatcattgaggagatgagtttgaatacaaacctagaaaggtacagagcattgtacaaagctatcaagtcaacaaataacaacttagaagaagttgaccaaaaacaaaaaaaaatcaaaaaaaacaacaacttagaagaacagccacactcatcgtctctcatattcagactttaatcatgtggcttctttttcaggatctgatctgtgaaccggatctctgatatctcgtccccttgagatgatgcttccttgatgctctctacctgcaaatcatacatgtacatggttttatggctcctcaaacagattcaagttgataaaacccagaacagttgataactctttactgttgtatcctcattttattatgtcacaatgcaaaataagacctgattactctactccactcagtatttgtaagaagctaaccaaaatttctgctgaaatctggttttctttaaaaagaagtcacctggttgtgtaaagatccggtgacaggcactggaggtaggttgatgactcggccttgcacgaaattccgggggcatttgtggtgtttccttagagctgcctccttcatacatttggcctagcttgtatggaccgtcacttgtgttgttcttcgacttcggtttatgagacaaacccgtagaccatgagcctccgcttgatcctgccaaggccattatcacatccgcctgcaaaaaaataacattcatcagatgaacttctcaattctctacctttttagatatcaaaatgtagtcaaataacttgaatatcaagtgtataagtgttagggagaatcaccttgtttgggtgaacgtcatcaaagacatgagcttgaccgccatagaagatggtcatttgcttagtactcgacgccaagtctttccgatttccggtactgcaaatacaaagtgtattgaaatgactcgaagagtatcgaaagaccagagacacaaaacactagaagctaactgactttgaaggggcaaaactttcgagcttgcttgagtttggcattgtaaaagaactcaagataccgggacctttcatccctgttcgtgaaccttcatcagcagctgtctgagcaataactgatgggcctacgttctcatctttgaacctgctagtagacagctgatgaagcaaatgactgatctgtcctcctccgcgtggaggctggtttgccaaaggattcacattcatggagaagcttccaggtccgtttctaagcaactaggttatgacaatgacatattacagaaactgagttctacgtagctgtgaccatggtgaagttgtgtaggttctgttttttttttagttaccttggaccaatgcagagtctctgggtgctcctgagtcgtgaagtgagaatcagagttacttctcttatttcctgaaaaccgattgctcatgattgagccagaaacatcacttcttggtccaaacaattgtatcccatcaagatgattcccaccgccgctgtgtctttcgactaaacaatgataaaatatggataagtaacttaaagattgttgtgggagggaactcaaggagatagagagagaaaacgagaggcaataaagaagggccaattcatataaaaaaggatcacaacctcaaatggctatgacccaccaaactcatcagtcaaattcactctcaatgtcccaactaatccaccagagggcattatggttgggcagagagagagagagagagagagagagagagggagagtccttaacactacaagaggtcaagcaaccacatgcccacacacaatccatgttcatgtttcttaaattgtcgaactaaaaaagcaatgaggcaagaaatgaaacaagacaatgtacattcacattttgttcaaccttatgaacccaaagatgttccattttcaacttaagagatctaatcataaatgaattgactaaaaaatttgaaactaactcacatgatctcttacattttcaaatcatggtgaatcaaagctcgatcgttaatccagactagggggaaaagaaagaatccaactttaaatcgaatctatgtaacaaaagttgaactttctatagatagaaaccctaaatgtacagaggaatcagctcaaaacctcatcagcgtaagcacactacgtcaacaacaacaaaaacatcaggagagagagatagagagacagagcagaaccgagatcggaggttgaggagagaccgccgagtccaccggcggaggaagcagaagccgtggaaggagtcatcgccgctttagccgccttattatccggtggtagcctatggtcagccatggaagtggatgctaaagtaggattcttggagcctaaaaagtcatggaacaagagcttatcttgttctgtctgtcggagacgagaatcaatatcagtgggtcgctggccattgttgtggttcaccatcatgaaaccagtgtgtcagtgtggccacttcgccaccacatcctccgttacagtctttctctctgtctctggcagagtattatttcatggacacactcaacgagagagagagagagagatattatcagttttttgttttttgtttttctgggtaagtgtataataaagcttgtctttttcttcttcaagctactttattgggtttctcttacatgattttaattccctttaatattataataatcacatctttcaaataatatatgattaaaagttcagcccaaaagaaaaaagtacgattgtaaaatcatggcattatagactctttttaaattaaggttatcatagattcataatgttattgatttgagaaagtgagtttgtgtatctaatctaaccaacacactataatttggtgtagtagtacaatgttaactactttactcatatgtggttgttagatcgattagttaaataatttttatacacataattttatcattacgcgccaaataatctgttttaaaattaaaatgcaaaatgtatgcatataactttacctaaatatatggttttgagatgagagttgttgaattttgaattattataagtgtttgatttcttactctaatatgagtaagagagagaactcatgaaccaaccactcatgacgaatttctatactcttaaatgaaatcgattttacaactactcatgacgatttttcccacttgaatctagtttaattatggagtatttaagatgtttattgaaaccaccaaattagtattagctgattttttaatcaactagtctccggactgtgattaattgggttgatagaagtataatggtcatttatatgggaattgggaacacgtgttgtttttcttgttcttactacacaaaccttaactagatgtttgtgatatggaggctcaagtatctgggttaacaatagaggtaggggtaaactttccagtaagctgaagatttccaattggagctagatgttcttagattcctttgaatgcccatatgaacatatttccttccacgttaagactaactccatgttctccaaaca

SEQ ID NO: 29191 - DNA, 2924 bp, Arabidopsis thaliana landsberg
aatcaacgtcctaaccctcctcctcctcctccttcaaccggagacaccgtacctctcaaaacagacggtggagaaggcggaggaggcggaggcggaccaggattatcgagaagaatctctctttaccgcgcatttagcggtttaacaaaccgagcttctcgttctcctaagaaatcacataaacatcataatcctttaagcagcaaacgccatcatcatcatcatcatcatcattatcatctctttgaagacgacgaggagcaaatcattttgattaatgaagacgagacagcgagttatacgacgacatttcttaactcagctgaggaaggaggggagatggaggttcagttttttaggcgactcgacggtgaattcaacaaggttttgagattttataagcaaaaagttgaaaatgttatggaggaagctgatgagcttagtagacaattaaatgttttgattgctcttagagttaaagttgagaatcctcacgttcatcttcctcctgaccttaatagcgtcgcgagtgctccttcttctcctcattcaacaatgaggactccaggtttagctccattttacttaatcctaaacgttaagcttcttacaaaggttgatatgaatgtttttataatgtagccccttcaccaatggatgtgattagagaaatggaaaagaccgaagataagaaagtatttaaacctgctccagtagaaatgttggatcatgtaaagctcaaaatcgatcccgaaactccgttgttaactctcaaaatgatgattcttggtctcccaagtgagcaaacctttagcaaacccgagcttaagagagccgaagagcttatgaaccgcgcttttgttgagttttatcaaaaacttaggttcttaaagagctattggtaagaatgcttttataaagatcctctggtttctcgaaaactttggtttctcatcatctctctttgcagcttcttgaatcaattggcgtttgcaaagatactaaagaagtatgataaggtatgtaatctcttaactaattaagaatcttgtttttttttctttttaatgtatatgttcttgcggtgatatatcgatgtattgcttgcgcagactacttcgaggaatgcatcaaagccttatctaaatacagtggatcactcgtatttgggtagctgtgatgaggttaatagtaccatctattttcacatcatcttttctttgatgttacaaactaaacttatcttttacattttcaggtctcgaggctcatgtcgagagtggaagcgacgtttatcaagcatttcgctaatggaaatcaccgagaaggaatgaaatgtttaaggcctaaaactaagagggagaaacacagaatcacttactttcttggtacccaattaatctatttaagctctgttatgagtactctttctcatagactaaaacttcatcttcatatatatataggcttcttttccggttgcgctgtcgctctcgccattgcgataacggttcttgtacatattagaggcttaacaaaaagtgagggcaggcatcaatacatggagaacatttttcctctttacaggtccgttgtaaagttacattcatccccgctgaaccgaggataaaaaaaatcctacatcggttaaatcactcattgacacttaattagttttgagatggaaccacaagaaacttactgaatcctacgattttctaacacttttttctgcagcttgttcgggtttgttgcggttcatttgtttatgtatgcggcagacatatatttttggagtcgataccgagtaaattacccgtttatcttcgggtttgagcaaggaaatgatcttggttatagagaagttcttctggtaggctctggtctagcagttttaacatttggaggagtcatctcaaatctcgacatggaaatggatccaagaaccaaaagtttcagtgtcatcaccgagctcgttcctttagctcttctagtcgtacgttcttgaaattagacattgatattaatctttaacaatacattaacattgttagttttttgagacatcttttacttatgattgcagtgcttgatgatggtactgttctgtccattcaatataatatatcgctcgagccgatatttcttcgttggaagcgtctttcgctgtcttttaagtcctctctacaaggtaacgttcaaaccaagtaataaaacctgaaaacgatgttacatatagttcatgagtatgtttttctttcccaggttattctcccggacttcttcctcgcagatcaattgacaagtcaggtacaacaagctgcttggtttagcatctcgttaatctatcggttttcttcttgacaaatcattaattaggttttggttccacaggtccaaacattcagaagcttattgttttatgtttgctactatggttggggaggagattttaagagacgaacacacacatgttatgatagtgagatttacaaagaactctaccttgttgttgccatcattccttactggttccgcttcgctcaggtacttagaaaaaattatcctagtttacgtcgtaaaccgtatcatttactgtttcataacattttcaaaatgttcaaaactttgtttgtttttttttctttctttcagtctattaggaggttggtcgaggagaaagacaaaatgcatggccttaacgcgctaaagtatctatcgactatattggcggttgcggctaggacaatttttgagatgaagagagggacgtactggctcacggtggctgtaaccacttcgagcattgccacgttgttcaatacttattgggacattttcagggactggggtctgatgaaccgcaactccaagaacccgtggcttcgtgacatactcttagtaccttacaaaagcatctactt

SEQ ID NO: 29192 - DNA, 1773 bp, Arabidopsis thaliana landsberg
ggccttgttgaagctgatcaaagtgaggaacagagacgagctcacgcacgatttgtggacgactctctggacaatgcatgatacatcgttccaccatgtggctactgaatttctgcatcgaaagctgaacgtaatgcccttttaattgagccagcatcatcgccaccgcagaaggaatccttagttctataacaaattggactgcgtagttcctgcaaaatattgatcatccaaaaaaagtttgttattaggttcttccgtataaatgtttgttttgtttgataaatttacccaaaggggtcttgagcaagaaggagactgtttctagagatctcagcgatcagtttctctcgttgttgtctcattgaataagcaatgcatttttgtagcacacaacatccatgtcgatgtgttgcgatttcagtgcagaactttgtcgccgcgtcaaagataaactgttgaaagaacagaacaagatttagctataatataatctgatgattgagagagttaaaaggaagtgactttagttatttgaccttgttatcttcagtgctaaggcattgcaagcaacgttgaatcacatggtttccatttaaatctttgatcaaatcaagaaaaccgggtctcaaagccaatttcaccagagaaatctgttttccgcttctgattgtttccactaatctttggacaactcgagtactacaaaacaaagataaacaaaaaatgtttaataagcataagataccaaaatgatatcttagaatgtaatattttacccgtatgcattgagagatatccggataagttgaccaggctcctcagttgccacgagcacgatctgtgtcctctgttcttcagtacaaacatctaagagtttctgcatcaggtaattcccaaaaggatccatcataagctcaacaacatgagcaataacttcattgaatataatcatcgcgtcaacggaagttccttcatcgaaaatcctctgcaagaatcgacatccgtgttgatctttagccattaagtaaacatatccttgaatgtcacacatgttaggcagacttggatgacatatctccgtaggatttccattattagacatcaatgctcgagtattgcttctctgatgatcaatgcttttaccattcatgaagaaactctcatcagagctaaatggctcagagcattttgaaaccatagggacttgagttcgttggcagaacaatggtaacatgtctgatgttgttgttctgtacttttgatgcttataagaaacttcgggttgatgtgggggcgagtaagctgagtactctctcattccgcctcgattttcgaaaatctcctgaccattgttgtaaggactagtaccactattactgcttgagtagctaggccatccaaattgttgaggattgttcccaaacatgtttctcttgtcgtcatttttgctttgatcgaatccagaccacgaggcacatgactggttaatactagactcctttggtggacgaaagaatccatatggaaagcctccagagacaaatccaccattgctaggttcatagtgtttaggtgaaaagttgtagagtggatctggagtgaagtcagtgtgatcagacttaggaagaggatctttaagagtctcggttcgtgcgtaacgtatttgatcttcttcaacatcctccttgatattcatacgatagagatcttcacacaaacctaaatcatcagtaccattaacatgactcttttcatgatccatgaaaaaca

SEQ ID NO: 29193 - DNA, 1177 bp, Arabidopsis thaliana landsberg
tagaagcagagaaagaggagcttaaaagtgaagttaaatgtaacagagaaaaggctgttgttcacgtagagaactcattggctgctgaaatagaagtactgacttctcgaactaaggaacttgaagaacagttggagaagttagaagcggagaaagttgaactcgaaagtgaagtaaaatgtaacagagaagaggctgttgctcaagtagagaactcgttggctactgaaatagaagtattgacttgccgaatcaagcaacttgaggagaagttagagaagttggaagtagagaaagatgagctcaaaagtgaagttaaatgtaacagggaagtggagagcacattgagatttgagctcgaagctattgcttgtgaaaaaatggagctggaaaataagttggagaagttggaagttgagaaagctgagctgcaaatatcttttgacataatcaaagataaatatgaagaatctcaagtttgtctgcaagaaatcgagacgaagctgggggagatacaaacggagatgaaactcgttaacgaactaaaagctgaagtagagtctcaaaccatcgcaatggaagcagatgcaaagactaaatccgcaaagattgaatctttggaagaagacatgagaaaggagaggtttgcttttgatgagcttaggagaaaatgtgaggctcttgaagaagagatctctctccataaagagaactcaatcaagagtgaaaataaagaatccaagatcaaacaggtctgtctccaaagttcaggtgttagttaaacttagactgtgttccatcacaatcacttttttgtccactaaaacttgattactataattcaggaagacatagaaacagctgcagggaaacttgcgaattgtcagaaaacaatagcttcattggggaaacagttgcagtcccttgcaacacttgaagatttcttaaccgatacaccgataattccaatggctgcaaatggtgtaagcagcagcagcaactcagagagttggaaggttcacaaaaacgaaactttcatgacaagaaatcatcctgagtccatcaaaccaaccaaagaaacatctccatcttcttcttcttctactgcgtgtgctgctgcttcaatgccagtttcaacagaccgagggagttctgagaagaatcgcaatggatttgc

SEQ ID NO: 29194 - DNA, 2799 bp, Arabidopsis thaliana landsberg
  unsure (1)..(2799): unsure at all n locations
ttttaagcatttatgtgtgagaaaacttctatgagccatactgatgttgtcttttttcttggatctttctaaggaatgtcgtgaagctgttggaggccaaggtttgaaaacagaaaaccgagtaggtcatttaaaaggagaatatgatgtgcagactacatttgagggtgacaataatgtactcatgcagctggtaggctaaggaatataatcaaaggtgaactttctttgttttgacaatacaatttgacttatccattcttatggggaacttaggtgagcaaggcactttttgctgaatatgtatcgtgtaagaagagaaataaacctttcaaaggattgggattggagcacatgaacagtccacgtcctgtattgccgactcaactcacatcatctacactaagatgcagccagttccaggtcagaaatactttcactctcatcgtttattttagatgagcttaactttttgttgaacatctcttgtaatttgtccctgccagaaaagtgtgttttgcttaagagagcgagatcttctagaacggtttacttctgaagttgcagagcttcaagggagaggagaaagcagagagttcttattccttttggttagcatttcttctcacataacctttgtttccggtttctcatatagtaatggtttttttgcttctcctctgcatctcctccagaatcatcaactttctgaagacttaagtaaagctttcacagaaaaagcaatactgcaaaccgttttggatgctgaggccaaattgcctcctggctcagttaaggtaaatatgattactgtcaattagttgaatgatggttgtttttcttctagctaagggtcactgaagaattcagttaattagtttccacatcatgtgatttactgtggaataactgattatagtcaagaaaatgtagcaaatgtgattgaaatccagggcaacaccaggtgattgaaaatgattctataaacctgctgcatctttctttacagggctgatttgtagactctaagagtgaagactactacaggaggaactaaaccaaactaataataaccttcatgtttgcattttgatgacaggatgtgttgggtcttgtaagatcaatgtacgcattgatcagcttggaagaagatccatcgctgctaagatatggtcacctctcaagggataatgttggagatgtgaggaaagaagtttcaaagctctgtggagagcttagaccacacgcgcttgcactcgtcacttcattcggcattccagactccttcttgagtccaattgcattcaactgggtcgaagccaatgcttggtcttcagtttagttacctgctagtaacaatctcttccataattcccatatatctcttataaaagttatgtttccacaatatctacagaaactgttgtaagctcgtcataataaaagggtatatatgatatgtatccagggtttattctttacttaaactggtccaaacaaaaatgtttggtaataatttcaaattcttataataattgttattattatgattcttgattggtttgagttgtggataaatttttttgagtacttaatttgtaattcattcaattttcactagacatgtttatatttttaatttatattgaagtttgccagattaattaaggaaacagaaacgactacgttaggagtgaaaacaaattgaatttgtaacgtttctaacgaccaaatgactactcaaatgacaggcaaacagttttcttaacggaaaaaatacagtaaaaataagaaaaaacccgtttgagcacgtttataaaaaattgaagtgggctaattttgtcaagttgatttagctaatgaaacgggcctaactgggcctattttaatcaagtgtacaaaagctccattaccggaagattcttctgtacatatattatatatgtatgtctctgatgtaataaacatgtcacaaacatagtattttcttggactcctgaaaggaatcaaattacacaagtctcaacacgaaacaaataaataaatgaaattcaaagttgtttctctccctctcttactctggaacatcgaaattgatgctgctgtataactgaaaccctattctcggaaaatccctagaaatgtcggataatcgtgcactccgacgagctcatgttctcgccaatcacatactccaatcaaatcctccatcttcgaacccgtccctgtcgcgcgagttatgtttgcagtactctccaccggagctcaacgagagctatggattcgatgtcaaggagatgagaaaattacttgacggacacaacgtggtggatcgggactggatttatggactcatgatgcagagcaatctgtttaatcggaaggagagaggaggtaagattttcgtgtcgccggattacaatcagacgatggagcagcagcgtgagatcacaatgaaacggatctggtacttgcttgagaatggggttttcaaaggatggttgacggagacaggtcctgaggccgagctcaggaaattagctctgcttgaggtttgcgggatttatgatcactccgtctccatcaaagttggtgtgcatttcttcctgtggtatgttcgaaatcataatttcattgacatatatatatctctaatttacgtcaagctatgattttttttcattgtggagatgtgctctgcttggtattaatcctaatctgagattgaaaagttcaaatagaaagattaatttgtgctttggtcaatgaaatgtggttatagaatnttgaagttattta

SEQ ID NO: 29195 - DNA, 2363 bp, Arabidopsis thaliana landsberg
ctcattttaatcagagaagagaaaaagattagagagagagggaaggagatcagtatacactgaaattttcttcacacttgatgagtttgacttgaacacgaagtggatcgagtagtcgtggggactccaaacttgttatcctctggcatatacttggaacattatgttatccaagtgaaacaagtacagagaaagacccataattgaaaatgacaagaagatattgatattagtaacctcgagaaaagctgcattttctggatcatccaaactcttaaacggatcataatcgacagtgaaaccgttcctccaaatagttaaagtgtacgtgactacttcatatggctggtcttcttgctgttgttcttgaagctcagctgaatcagtttctccagacaatacctttgatgattgctcagatctttctatagctgactccttagctctgtcgaaaagcgtatctacatctttagctttcgcacaagcatcccattaaagctacaacatacattcaaaaaccttcttctacaagacttgcaaaaaccatcaacatctttatcctatacacaagatccttgcagtatcatggattcttgaacagcacatttcttcagagttttgagaaattaacgattcatctccttcagaaaagcacattgtcatataacctcattgctaaagctggtggtggcttagttgaggcagagtctgatccggcttgtgattcctgttgttaagatataagaataagggctttcactttaccggcttatttgaatcagagaagagagaaggagacaaatatacagtgtagttttcttcttcacggctaatgattttgacttgaacacggacttgaccgagttcacgtggggactccatacttgatatgatctggcattgtcatggaacataatgttatctaaagtaatacagagaaagaccaatacccttgtaagttgtaactatactatgttgtatgtaacacaacttgaaaatggcaagaaggtattgaattaataacctcaagaaaggttgcattttccgggtcatccaacgtctttaacgagctatcatcgacagtgaaaccgttgctccagcttgttacagtgtgcgtaaacactttttgaggctcttcttcaagctcagatgaaacagtttcttcagacattgatcttgatgattgctcaggtctttctatagctctgtcaaaaatcgcaacaacatctctgaggatcttgcacaaataatcactaaagctagcacaaacattcaaaatattgcagaactgagaccttaaggacttgcaaaaaccatcacaatcctgtaatacacaagatccttgaacagcacaatttggactaacctattctcttctccgccgtagtgctccaccgcttcatcggaatcgcttccagttccgccggagaaatcatcgatacggacattcccagcgccttgacggcgtttattctgcctagaaaatggattagctgctgcacgttttaacgacggccacggtggtcgtaactgtaaccgcgacggagagtaaccggaagatccatcaaacgtagaaaaagatgaagtagggattttgattcgtcgatttggaaacgaacttggattacgccggagaagttcgtcgttagggtttggaacatttggcttggcggcgtcggcggagacttcgttcttagtaaaggtggaaacagcagcattgagattccattgatgagtttcaagaaaagatatagctacttctctcgaacaagatgtgacctcaataaaggagctgatcaatttctccgtcgtctccggcgagttaacgtccatcgcaagattacgtttcttctccgatcttcttctctaaaacctctgttttataacttcagtatcgactaaagagaacaaaacgcgtcgttttgtagagttcttgaaagagcaggaaaaaaaactatagtaactaaatttttaaaaatcttacaaaaaaaaatacaatccaaaccatatagtaatctttctatttcatacacacaatatactaaaaatacaaagacaaaatgaaatcttcaaagcaaataacaaaaccagaggttttttttcttcttctaaatctggtttcaaggaatgtccttaagctcaaattcagagctctctttcttcgtcacttccttctccactgaatcatcatcagtcacaagaacagtaatcacatcagctttatactgatgtttcatggcaaacacaataaaaatcaagaagttcaatgctcccaagacaacaagtaaccagtagaagtagttcaatctcgctttgttaaggttacttctaagccagcttttgtctgtaaccctatcaacaag

SEQ ID NO: 29196 - DNA, 2733 bp, Arabidopsis thaliana landsberg
tatttcgcggcgacggtatgcaactgactgagctgagcatcgatcctcggaatctggtcaacgggagtcgcaaccctaaggcaagccacgtgagccgcaagaagctgctcgtacatcggatgtcttaaaatcgccgccttatagctagcactccgccaatcttcacctcctacaacgccgagtatcgtttcaccatcggcgttgactccgtcgataacttcagaacgtacttctccagtattttgcatctccgaatgaaaggagagccagcgtgggtttgtatcagcaacggaattgtctccgttgcggtgcggaggagcgagatcggaatccgcagtggtaagggtggtagggaggttgaggaaactggcggtgacaagcgaaggtgtttcagagaagtgacgctgcggcggaggttgctgtgattgatcggtgaagtgtcggagaggaaggtcttcttgtggaggaaggaggtgggagctgttaaacgacattgttttcctgcgttttggggatcggagaagagaagactgttttctctttcccctagttatttatctctctgaagaccaatattttttaattaatcttgaattttatatttatatatttttttttttttggactctacttcaatctctttgttctaatgtcaacataaagcctgtaaccaaaatgaagcataaaataactcaacctacaagagcctgtaattctgtaattcacaagttttgtgagcaatgatttgcttaaaacttctgttctagagtgtaattttcttctttaggtctttattctccaaattatgataagtatatttaccattaaactcattgtagatatttctaagacccagatatttttttcttttttacatgaaggaatgtcatttttttttaatctctatacacaaaagacttgggatccatgaaaaagaaaataagctcataaacaagttggcaattttttctcaaatttattgggcatttaaaaacgaatctttttccatgaacacgccgacaacccaccaatagcattacacctcccaagtttatattataaaaattcaaattaaatagtagaaaaatgaatgtccaaagagattgatagatcttcttgtcttggattagttgagcggaaactagggttttaatataataatgtatggagaatagtgaagaagaaaatgtttggaacataaaaagtctattagttgtcctactttttcctctttacaatttccaacaaaagcttttaaatcggtacaaagagaaagaaagaaaaaaaaactagttaattttgcattaaaaattgataacaccatctatttaaaacaaattttttcttctaacacaccaaattaaagaaaacagagagggagggagggagggagtaaaaagtaaaaaactaattttcaccctcttcctaagaaaaaatcaagaagtaattgagcattttaccccaaaaaaagaaggaaacggaaaaccagaatgtgacgggagagtttcattacaccacttattacattcacttttcttagttgacatctctagctcccttcttcccttcactataattcgatcgcaaatcttcatataggccagtttttagctagttccgtacaatatctcttcctcggatggcgccatgttgagatcagggaggacgaagaaactcccctgattttgcgagtcactggttttgcaagattttgatccctgtagccgctcgagttgtgatttacgaatcaaatcaacaggtttcttgtttgtgacacggcctgagtttaagtcaagctgaaacaagaaaacacaagagtcgatgagaccagcaaatagagagaagggatctggaatatctgattactgtaaagatggttagggagaatctaaattttaccttaatcctcttcagcttttggttcctaaggttttgttcatcgaatgttgctcggagacttgcaatctcctgtggaaaaatattgggttttttaagaatacaatgaaaaccatgataataaaacagagaatagcaacgaaaatctaccttttcaaggtcaagtctctccttcaacttcaagttctcttcatttttaagctcaaaagatgactgccaaatattaaaagaataaaaaaccatcagctcaataaaatttgaattttggagtgtgtacttgaaattcaaaaaggagactttatatttaccttcctcttcttcaatctcttggagaaacaactggtgatttcgtttgtgggaaaaacctgcaaaacaaaaacgcatttgattagtcaactattaaatggctgaagataacgacaactgttttacttttagaatcaatacccaagatcttattttaacataccggtaaaaagtttcttttcccacaacacaaatttcaaacaagtaagaaaaatatatcgaagaaaccaaatagagcataaaattaaaaaatctcaaatatataattgggaaataatttttatagtgaggatttgatgccacatcatgattattccgtgtcatgggcattgtcatctatcgtcatcactcttttaaagatcacgtgataccaatctctccgacaagatcattttactcgtttcaactttcaacccacaaaacgctaccgccttgagcatcaaaaacgttcaataaaacccggacgcgtttgaccaactagctgttaaagctgtactacccccaaaatctaaaaggagctttaattattcc

SEQ ID NO: 29197 - DNA, 1306 bp, Arabidopsis thaliana landsberg
tctccaggatacctgataagacaggagtttaaaacactgtaaaagaatgcagatcactaaatttctctatcagaagattagacgaatctttcagcgaacttcatcctgcacctcccgagtagtcttgtcaaatataaggcatgtaggtatctcggggtagttcaccactgctatatgttacaataaagtagggagaaatggtgtagatgtagtcgaggttttgatttggtgcttatgaaatctgtaaaaattagcatttaaggcttgctctactggttctgattcacttaggtgcataggttagtttctttataaccccttgtgtttgtaattcaacattatttatcatcccactgtaaatttagcaagatattcatatgggtttctcagggctgacttatgttcttgtaaatttatggttatcttaggctgaacagcatttttctctcttgatcagtcacataatggatcctgaatgttgtatgagttgtgcagctgaaagttctgacaacagactcgggttctcagagtctctctatgtctctgcctcgggaccatcttgatggtatctgttttcagcatacagactgcaacttcctcaggtgttgctcccctttcttatctggtaagctacctatatctagattttgctttaaaagaactgctgctataaacagtgtgtctttatccattgaacttgtgattttcaggacacataagaagagatggagagcaagtaaatggacagataaaaacggcggccatttactacggcgtttctctctttccaggcaaaatagacaacttaaatgctatggtatggtcccattcttgttgccggccactttcttctatgcatcacatggcttaatcagattctttgtctaaatcgtcccacatacccaatcttacccttaagcttattctattactatatatagaagacggagtaaaaggtttgattagatgagagaaagtaatggaagcttattgggtgggtggtttagtatgaaaagttgcctatgaatgtttcaacacttagctatgtccaggaagatgacttcacattttacatgtcttgttattggaacttgcccacaatcaaatgcttttgtacttaggattaacatgataggtattggcactcagttttgtgatttagattatgttttcgactctcaagatcaaaagcatttagcgttgatgagtttgcaccattagctttgattatccaccccttttccttaagatagaaaaagggaatgtaaattctggtaaagtggtaatctatcttgagttacaccct

SEQ ID NO: 29198 - DNA, 2037 bp, Arabidopsis thaliana landsberg
cggcacccagcaattgtctgcttgatctctgaggaaagcccatctaccatgataatcctccgggggtactccttcccgttaaccaataagaactcctcatgagcagattcttccttcccatatatgtatgccagagaggacgatgatacccagccaaacagtgaatcccacatcacagcaaaatttgataactgaggaaggaagaggaccagtgagtttatttcaacgcattcctaatgggtgagtatatttaaatgcataagagacttactgtgagattgaagccctctggaggtccatcaaaccacgattgatcacggtcaaacaaatcagaatctggaatcccgggcttatttggccatttgagaagagttggttcctcttcagtcatttcctcctcactatgttcttcagtaacctcttggtcaagttaatgtgtgctgggcaacaaaatgattccagcttttgcagctatataaagcatgtcaaagggcaaaatttaggaatttatgcaagtccacaacatatggacatccaaagtatcatagctaaattaacacctcctatgtacttactggcatcacttgcatctgaatttcccgaagaaacagcttcggcagcctggctcaatgccgtagcaagggcttctgctaatgcaaggcgtgataaactattgacatcctctatatcattagaagacaggctaggacctgctgcgttatcattgtttctaacctcacaaagatcaccacggccatcattctgatcggcccaagtaactgaacgactaagcttcttcgagccagaaattttaaggcatgatttagtgacgatttcacttgatgaacacacatcctgagctttatgtctttcatacgattcagctgcaaggatttcttcaccatcttcataagaattagcatggtattcaacagaaataattttctttcttgatttctctggttttgtcttcgagcccttcgtattagaaccagaagaggatcctgatagggtatttttcccgtccaaagtctgaagatctccttttagcttgcaactaagagaatcttccatcgaacattgtggctgcttagacacactatattctacgccgtatccatcactcatcatagcagaactcgcaagacccatctcatcaaacccaaaattcttaaaatccttctctatttcattacaaaaacctgcatatgttagacagataaacagagtcacacaggcacaaaaactgcctaacaatcattagaacaacttagagacccaaggaataaagaatctcattcgagataccaaatgaatacagcaaaatgaaaaaaacgtaacatatacagattattttaagagatatcttgaaagtaaggcctaactatcttcacagcttcctaagtgcttactcaatatttttctggggagaactgtagttttttcctgggcacaacccatcccatcaaccccgaaagtcttcttctccttttctttctcacgacgaaatcctgcagacacacattagaattcattaagactcagataaacagagagcaaggacaacgacatttattgcttcacccatcagtagaaatggcctaataaccaccaaaagatctgtctctccgacgaataaatcaaaacattcatgataccatccaaatacctttaagcaagactaaataacatatacagctacatttcttagagatatgttggtcataaggcctattactcttaaaaactccttaatgcttactcgaaacttttttggtgggaggaactacagtttgctctttcagaactgttttccctttgccatcaacagattccacaacagtagaagcttgcttggtttgcggtggaagctttgaaacactattaacatcaggcataattactgtgctagtgaaatccatctcatgcgtctcttgattactttgagtagtagccttggaatctgccaaaaccaaacttaattattacacatcgataaaacatttgttaactgaaattttttgctcacaccatagt

SEQ ID NO: 29199 - DNA, 2525 bp, Arabidopsis thaliana landsberg
ctgacagaagaggaaaccacatcggtcttaacttcaacaatctctcctccgatgtacaagagcctctcatttactacgacaccgatgatcgaaaagaagattttcagctcgagagtggcgaaccaatccgagttcttgtcgattacgacggatccagcgaaaccttaaacgttacaatctatcctacgcgtttagagtttaaacccaagaagcctctaatctcgcgacgagtttcagaactgtcggagattgtgaaggatgaaatgtacgtcggattcaccgccgcgactggaaaagaccagtcgagtgctcactatgtaatgggttggagtttttcaagctgcggagaaaatcctatggcggattggctcgagatctcgcggcttcctcctccacctcgcttgagtaacaagaaaggttacaattctcaagtcattgttttgattgttgctttatcgatcgtcacactggtcttgcttgtgttactatttatatttgtgatgtacaaaaggagaatccaagaagaagatactctagaagattgggagattgattatcctcataggtttagatacagagatctctacttagcaacaaagaaatttaaagagagtgagatcatcggtaccggagatttggaatcgtttacagaggaaatctatcttcttcgggtccaatcgcagtgaagaagataacctcaaatagcttacaaggtgttcgagaatttatggcagagatcgagagtttaggaagattaggtcataagaacctcgtgaatcttcaaggatggtgcaaacacaagaacgagctcttgttaatttacgattatatacccaacggaagtctcgactcgttgctgtaccaaacgccgagaagaaacggcgtcgtgttgccgtgggacgtgcgtttcgagatcataaagggaatcgcgtcgggactgttgtatcttcatgaggaatgggaacagatcgtggttcatagagacgtgaaaccgagcaatgttcttattgatgaagatatgaacgctaaattaggcgattttggactcgcgaggctttatgaacgcggaacgttaacgcagaccacgaaaatcgttgggactttagggtacatggcgcctgagctcacacgtaacggtaaaggctcaaccgcgtctgacgtttttgcgtttggcgttttgttgttagaaatagtgtgtgggaataaaccaacgaatgcagagaacttcttcttagctgattgggtaatggaatttcatactaatggtggaatcctttgcgtcgtggatcagaatctcgggtctagtttcaatggcagagaggctaaactagctcttgttgtggggttattatgttgccatcagaaaccaaaacttaggccatcgatgagaagggtgcttagatatttgaatggtgaagagaatgttccacagattgatgaaaattggggattctcggattcttcgagagatgatcataaatcgaatgttgtaggttatgtttcgtctgatagagcctcgagctcgaatactttttcgtctttctccaatgtttcttcaagctctatcgttagtggtagatagtttcatagcttatttattttctagaaacagaacattttgtatgtttttactatttatgctaagaaggaactaaatgtatgatgtgtgtgtcgattatgtcttattatggaccagtgaacccattacccatattactatgtgaatgatagatacaacttgtaccatacaagggttcattgtttccagctttattaggtacaatattatttttgcattactaaaaacagacttttcttttgtctaaacatttttttgtaaattataacataaaatgcaaatagcaaacaaaatatattttcttattccaatgcaaacaaaatatctttcttattccgttttagtttgcttttgttatcaactcaagactttgatcggtgacttaaaacaaatgataaaaagacgatccaatcccctcatatatgattgaaaactttgatacaaaatgagattgacagaagataagactaacaggtccgttctagattctttccaaacgtaacagcatgattggatcattttaagcaatttcaagtggagaaaatagaaaaatattgtgtgttgcccaattatttcaatcaacgattcaaaattattatgatatgggcttggtaggttgatggtttcactttcataacacagcgacaagtgaactacgaacctatgcctcagtttgtgtccaggttcatgatggacatgcctataattagaaacgtgtattgaaagaaagcgtctaaactttgcaattggctacagaagttttaaaacaatgattgcgttgtgaacattactgaattttcataacaactcaaaccattttttacaaatattacgacacagttgttttgttactgtgatatctgttgtttctatgctttaaaattaaaataaacaactgtgattcgttgtatagaaccgtgtatcagaccatcactatcctaccaat

SEQ ID NO: 29200 - DNA, 1888 bp, Arabidopsis thaliana landsberg
catgactataagtacattcattagcaaaatcttctctcactaatttatatatagtttacttattttcatctcgctatgcaaatcttttaagatcgaatcatatatagcctcaatcattcttgattagaattaagtagtgttgataaactaatttctatcacatataaaaagggaaaacacagctcaaccaaaccttttccttgttgtccaaaacacgattcatctcaatacacaactaacattatataatttcaggttattgttttacttgaaatactttttgggctatttattgcacgttggttgtgatgaagcccatttgagttcaatcaatgctttaaacacttgtacgcctgaacttaggccaattgcaatgatctcctttgtataaattgttaaaaggctttcgatgggatttcacacatttcggtacaaattctaatacacatgtagcagtcgataaaaccaaagtcttaattatgcgatgttttgaagaaaaagaaaaaacaaagacctgtagactaaacgttccaaaacaacttcttcaagaaacattttcggcttctacctgggatttctcagcttcttctgcgataagaaattgggtcaaaccagttccggccttaactttggatatggcaagatacctttgtccaggaaagaacacttgttttggtagatacagaccaactttggaaaatgtttggcctcgactctagtctatagtcatggcaaatgcaagtgtgaaaggatactgcgtaagcctgagaaagatttaacaaaaaaaaaaaaaaaaggtcaaccaaatgtggacgactaaatgttctgaaacaactccttgaacacaacattcttggcttcttcctgaggattcccatctttgtctgttataagaactttcaaaccagctcttgacttcaccttggatatagcaacaaacatctgtcgtccatgagagaacacttgtcttggtagatatagaccaactttggaaagtgtatgcacttgactttcatctatagtcatcgcgaacgcaagtttcaaaggatattgcgtacgccgcatttgaagaggaaaatttgtttctgttgggtatgaagctatcctagggatccagattttcttaccatgcttattacctgctataatcatagcctcaagcacaaacccacacagccgagtaatttgaagtcttgtccccgtaaaaaaaccacggctaggatcaaggtccctaagtaacatgacaggagcaccaacctttaacctcagcttaaaatcaggcaatccggggactttgatgctattcaaaacctctagagggtataacattttgtcatttgggcttgcatgcgttggataaatggtgtcagcgccgtaacattttgtctcttcacctgatatgataataaatgaagtcgtagtaattagtatgtgcataaaatattaaaatggctatatataggtggaaagcgagaaggattaaacgcgttaccttgtaattgtgaaagcatataatcattaatctcatccgcaacgtcatttgtatgacacaaaatagccctctcttggtaaaaatcaggattataggactctgtaaaagattctccataaacttcatccactatagttttaataggatctttgcactcagttatcaacaaatcttcatgaatatcgattttagtttctccatcatttggcttgttgatgttttcgccaccaatattcgtaatccatttggtaaaagcttcatctatagttgtgtggatttttgtcccctggaattcaatcagcaaaacattataatgctaaaagtatttctctctacatgtaaaattgtaaaactaggtacaagctatataatggtttctggattattcatgaatcg

SEQ ID NO: 29201 - DNA, 1806 bp, Arabidopsis thaliana landsberg
agtatatgtgagttcaaccataggttagacccagtaggaagataaaaagtattcttggctaacagttatttctttgattcgggaaaggttgaacccgaaccgggttttgcgtggtcctttgcagaatgcatcaactggtggcctgtaagttctgaaggttcgagtgatccttccacaaaagtatttttccttttattattttgttttgttgtattgaacctctaaaatctttatggttggtttatttcaaagtactccaaagctttactgtcaacgccaagattgccctgttgaactactccacccaccggaggattgcaatgtcaattcatcccttccattcactcttcaggtgcttgtttgcggaaacaaaacattacgaagaaggtttttacatgttctaactggtctctgttgcagatctgccgagttgaagatattactgttgaaggtctcattaaaggatctgtaatccaattccatctggcaagaacggtacttgtccgctcttctggaacaatatccgcggacgggatgggtaagccacatactcttttaagatgattctcctgatttgtgttcactttttgtccttcatacatgtaatgtgaaccagttttgagagatttaaatatgcacacaggctgcaaaggtggagttgggacaggtaggtttctgagaagcggtattgggagtggtggtggacatggtggtaaaggcggaagcggatgttacaatcatacttgcattgagggtggcgagtcttatggaaatgcagacctaccatgtgaacttggcagcggaagtggaaatgaagagtcaacggattcagttgctgggggaggaatcattggtaagttttaaatttcagatagtatcaacttaatcctcgttctaacatgattaattttgaactctaaaaagagaaaactgaagtaatttattgaccgcatgtaaagcttactatttctaatctggtttcagcatcttttcactatctctgtacagaagtgactggtttaacttcgacctgtttcctaccaatataccaactgtttctgaaatttatctctttagaataatatttttttctacaaacttgtgtagtgattagttcactttgacctgtttcctgcaacatactgactgtctctcaaatgtaactcttcctaataatttgttttctaccaatttgtgaagtgcttggttcacttgagcacccactttcaagcttgtcactggaaggctcaataacaactgatggcgaaagtcccaggaagacgctgaaaggcctaagtaattcaagtctaggacctggtggtggttcaggtggaaccgtacttttattcttgcgcacacttgagatagggaggtctgcgattctctctagtattggaggaaatggtagcctgaagggaggtggaggaggaagtggtggaaggattcattttcattggtcagacattcccactggtgatgtctatcatcccgttgccatagttaagggaagagtttatgtaaggtttgttataagaagttcatacttaacgaccttttatattatattatgataacgtatttgcgatttctattttggagaaacacaattctttcttagttatataagcactctagattcttttcttaatgtgtttctagaatataatctgtgatttcaataatgagaatataatctgtgatttcaataatgatttacagaggagggatgggtatcattgaagataatattggagggaatggaactttgactggcaaagcttgtccagaagggctctatggtttatt

SEQ ID NO: 29202 - DNA, 1717 bp, Arabidopsis thaliana landsberg
aagctagagaacacctaaattttttccaattgatattatgtaagttaatacaaaaagagttatctaataggagtagttaatttatggatgattccaagtagaaacgccaacataaactttgactttgaggccggatcgatcagcttcttttatttctcttacaaatttgaaattaaattagttaagtgtgatgataaaatacataacgtttgtacgcattagtatgttgtgtagcagagagactcttgtttataaaaacaatgtttggtttattctaattgtcattttattcattggatctttagttctcgcttagcgtctcgtgcatattttcctcaaaatcatcaccagtgtccagtaaattactcacgtacacaatattcacaacaagatacatatatatctctctccatgccaaaatacatcttaaaaaaatattcctcgtcactacactgtcattttgattgatatattagatgacattgttacgaggaagtatacttacgtagcgtgtactactactgtaaatggttttaaagttatattttgttgatgttccgactgaacaaagtcattttaggaaagaacgaaaaattagtttgaaactgttttttttttaaagatgtattaaatatcataacactaaaatagtaaattaacaaataattagacatggttagttattaatttaaatctaaatattcttgtaaaggcttccacttaattttctaatcaccatcagccgaccaaactactttatcaagtcactgcttttgtggaaaaatttccgttaattcatgagcttttctatttgttcacacaatacataatcattaaattaatttttgcggctaatgttagaattatcgtacgacaactgatcacacgctaacatgttctctagtttaaatttggcttgcaacataattgaaacatcactcaaccccacaggctacaacatcccacatttaatcaatatataagtatataaccaaatcaatcagtttacaattactgataaaattacgcatatgtatatgcatacgcagcacgtaatcctagctaactaggataaaataaaacgatcaaatctcgggaaaattcagtctctcccgaatcccaaaaacaaaagcatgcatttcgtaataaacaacgcactgattctgtttgattttttctacctttatcctacacaacactagttaaacgacacaaaactcaaaactcaaacacagttacttaatctattccccttattctttctttttgattataatagcatatcggaaaaaaatctacaaacattcaaaaaaacatcatctagtcatctatatattcaaaccttggtccattcacatcacgaagtccatcttaacacacctataatcatataaaacatatccaaaaccctaaacgcaaacactaagataagtctttcttgaaatttaataatgtcgtcgagaggattcaacattaaagctagaggattatgtaataacaacaacggagaaagaggaacgggggcgaagtgtggacggtggaattcaacggtggagcaagtgaaccttctgacagatctgttcaaggcgggactgcgtacaccgagcacggatcagagtcaaaagatctctatggagctgagtttctactgtaagattgagagcaagaaccagctctattgggtaccaaaccataaagctagggagagactaaagcg

SEQ ID NO: 29203 - DNA, 631 bp, Arabidopsis thaliana landsberg
tcgtgtgcactaactacagcttcaaagacaactagcactccacaactcacggacagtcaattgagctctctagctgagttcattgagaaaaataaaaagtctaacggagcaagtaaagagggattctctggtaagagcgaaaagctgattttgtatggaactcacagtcgttataatttgattattgattcaggagcatcccatcacatgaccggtgacatgaatctcttgacagaaattcagaaaatagatctatgtcctatcaaattgccaaatgacaagatcacttgggcaacaagatatggcacacttatccttggtggaaagctcatacttcatcacgtgttttatgcttcagaattgtcaattacacttatatctgtatcacaactcttgcgtgacattgcaagcactgtcatttttactaaaaagttttgtgtgatacaggaccaagcttcgaggactttgattggagtgggtactgaacgtgatggggtttatcatcttgcggatgcggttattcctcaagtgaatcgtgtttaggccagcgtatgctcggcctttgtggcataaaagaatgggtcaccctatacccagagttttgacttttctttcacaaattggtgctttt

SEQ ID NO: 29204 - DNA, 2678 bp, Arabidopsis thaliana landsberg
aaaagaaaaagtagtaaaaaatagagaccacgtggggtgaaccaagcgcaaaaattaaaagccccaacaaaagttcagatctcgggttatgtattaatatgtacataccgatccatgtcagctaaaataatttttttctctcccagatttaatctgtttttttctttctaaaacctggtaataaatttagcctgagagagagagagaggaaaaactatgagaaaacgaattttcacagctcaaaaagaagaagaaacgcatgcgcttcgaattgaaacgacaccgttaaaagctcaggcctgttccgatggaggaggcaaattaagatctagatctaacagctgagatctcttctccatcccaccttcgaaatcaacgaccgatgacgaatcagagtcgctttgggcaccacaagccatcttcgtcgcaacatgcaccaccggcgatctaaacgccgatgtcacaggaggaggctgaccacgacctacgttaccgatccccatcaggtccaaaaagtagacaggacgcgacatcgggatctgataacacgagccgccgcctcctccgccgagactaagctcgagctgcgggggaacattcccagccgtcgctgaaggcacaactaacgtcggaggagaagcacagtcgagcgtgctgctctggctagggctacgcgcgaaaccggtagggaccttctggtcactcagctcgagaaaagttgggaaattggtcttagccttagcaccacgaaaatcacgcgccgccgtatcgtaagcacgcgccgcctcttcagccgtatcgaaagtgccaagccagacgcgggttttcttgcccggatctcggatctcggcggcataacggccccaaggacgcttcctaacgcctctgtaacgaatctccttggcattattgtgggtctggttagtagtagccgggtcgggtttcaagcccatcttggccattctcggatagatagattagagagagagtggtggtgtgatagataattgaagggagaagaggaaaggagagagttgtttatatataggatgggagagagagtaaaagcgacgctccttttggggcgctttgttgtgaacagtcaaagcctgaaatggttttagcggcttctcttacaaaacaccagcggttttcatggttttcttttttacctccacttatcttttgccacgtgtttttctttcctctttcaaagaattttgtttttcttatcaacccttcatttcttttttaacctcaccaagcgttttcaatttttgttgatcatcttattaatgaatttattgatgtatttaaaaagttgaatacattgtcaaaaatatagatacaaattaaatacattaatttgattgactttaattttaaaataaaactttttatcactggatctttaatttaattattaatatttggcaatgagaaaattaattggactatgtaatctttgcattaaagttcttaatgaaataaggataaattttgaaatatagatcttactatgatacatatttaatcaatccgtattttgaatgatttattttgtggtggaaaatattggatgcaaagtcttttttttttttttttgtgtaaactattttatctaaaaagtgaaattcatttgttatctgtatgtacaatgtactaacaaacttttgatacaatttgtaacaaaaaaactaaagaaatccgtacagtatttgacgcatttaatggagatgcatgttgtttgctgttttgtctacacagcgtattcccttgaatgctggtgataagattttgattttcataaccgagggaattaagaatgtaatcccacatcttaatttaatatatatagttaatctaactacgaattgtcatgtgccatttaccctcatgatttaggatataactacacaagcttgctctagtgagtacacttgtaatgaactcagtttgttttctcataacctgttggatcaaccttaatgcttgcataattgagaaaaaaacttgaacaaatatgtgagtaactaatttttcagatcatatcaattttgttttcgtatctcaaaacttttggtttaaaaaatacccaattttttgtaagaccaataaacaactaaagatactgttatgtgtgtaaaaatttgaaaatacaggtaaataaagtcatactatatggcagtgtgagttaaagacaagagtaacttcaaaaactaggaaataagttaagcagcggcgcctgaaaagaagagagaagaagaaaccaaagaacagtattggatgacgcaaaaatgtaaaatacgtggcaacaccttgaggacgcgcggcttgggaaccgcgtttccatgtacgagcgtgaatctcaccgccaaacacgtgccgacggcgatcgcgtgaaagaaagagcgttatgcgtgacttcgtagactcagctccaaattcaacttggagtttgactgctttttctttcgcggaataaaactaaaataaaaacaaaaggctatttagccgcccctccgccaaagaaaaacaaagatggcccacaacgcactcgctatttaaataaaatagaaagagttttaaagatgtatagtgccacgtggtcaacgcgacgcgtggagaatggatgaagagagagagagaatggtgtccgcgtcggtaaccgagagaga

SEQ ID NO: 29205 - DNA, 1664 bp, Arabidopsis thaliana landsberg
aaacaaagctttgcaatttattggtgtgggggcaaaagcaaatttgttcttgattcatacttttgagagctttcctatctggttacaacctcatgctctcatctaagctaaggtagaggtaaagggtcgggtatggatatagcaggtaaactgtcgtgcatatacgccatgacaaagaaggacaacatgccgatggaaaggagtagtagtggacctgctggaactggtttccgagaagatgccaaacgaaatcctgcaagaaagttgtagaaaaaaacagaaaattcagtgcaacgagaagagattcatatggcatatatgcaaacacaaaacacatcttcacaagtcaagcttaccgaagacagaagagaagaggaaggcagcaccaagacctatggtatcgccgagaactcttgtctctggtgatttagtaaggaagtaggcctataaagaagaaattcaaacattggcatgctcagtaataagtgtaatcatttcaacagttgaacaagaagatgtggatgctttcagtgatacagtcgtggatcataaaaccgagatggaaagcacaaagagtaaaaaggaacacaatcatatgttttgaaggaactaaggtatgcaacaataggagaagattctagcagatcaactgttgtagatagtttcttaagccctccctaaagagacaaaaacaccattgttgtcaaggaattgaaataaagcttgcaagagaaccacatcaagaagaaacaatgacctgaatattgcactaagttcctaactaccttcctcaaaggacaaagttcagatttttaactctgtagtaacttgaaactaacactaagaatagagacagagagagcaagatcgtacagatgccataagaacagaaccggtcaaacccccaaagagagaacctttgcttccagatttgctatcttcaatttcggaatacaaagttcaaattttttagtgtattgagccaaaaatccagataaataatttgaattatgagatcagtagtaacttacaagcgaagagaccgcctcctagaagaagtacaccataagtagcagagacgactggagctagctccgacagctccgccttgcagcagagaccattacctcgtttagtcttcgatttctccgacaacttagtaagtcccgaccaattccggccaccattactaacacttcgtccgagtttagtgctcctcaccgacaccaaagacggagatggtaacgttagcgcaagagaccacattgcttcgtcgagtttgtctcgtcagtgaagagaaatggatcaaatatgacaaaacaaaatttagttcatcggtccgattcggtttggattgggttatagagtacaaagttcggttctattcccaaattcggtttgatttggtttggttttatcaactttttcaataactacgcatctattcttcggttcatttcagtacaattgtttggttatctcgatttaattttggataaatttatagtaatttcggtttgttggttcctaaccaaaccggttaccgaatttcatccaatcatttgtattatacatccacacagtaactcttacaaaatgcaaatcacatgaatgttgttttgcttgattactatacacatcacaaagcagaagaggaatttgaa

SEQ ID NO: 29206 - DNA, 1565 bp, Arabidopsis thaliana landsberg
tattttgactttgatcggttgtgatattagtaagtgcgggtctaccccacaacggatggatgatataggagacgttgacaaaattaagcgattttccaagctagtaccaagtagtagtatatatgctccgcgttacttgatttttgttacttgccaaaattcatgataaaacaattgctatgatgaaataaaaagagccgatctgagtattgtttgttgcatatgtatattcattcctccccttgctattgttatgcagtaatatctcaacaagtactttgccattggttccccttattacagctgggtgggtccatgattttgcacacgtgtcatatttgggttggattttttggcaaagtggttgggtatgcgagcttattttcatcagagcgctgcacccacacgtgatcattttctggcactaacctcccggtacggtgtggtggggatgcatcaaaataaaggcccaaatgcatggcccaaccatttataacactacacacactcgtatactatctatttattatcccttccttttcactaattaggccacggatcaaattgatgaatgatattccgaagactagggctctctgattatggaccgccccactcgcatctcctatgtagtttacgtattagtagatttatgtcaattatatgtgtatgcatatgtcgctgttacataaagtcctatgttttattatacaacctaagttatctaactctttgccgtgacagggatcggactgtccacattcatgtaatttattcatgtcccgccctatttatttttgttaattgaattgaaccaactcatttttatttctatatatccactaaataaataaaatgaacagacaagaaagaaaaagcgttgtggtgctgaaaagtcaatgattacagacaaatgtggaggagacttgtatcattttatttatcatccaaggactttgggaagagagtatccaaagtcttagcattatacaactgcttcaatcattacgtcaccacgtgtacgactatatattatcactttctcatttcatctcatgtgtatatctcaatcttattataagaatcacgacacaaaataaaaagtttagcaatagcctatatatacaagtaaaaaatgttctaacaaatgcaaagcatagtgttatgtagaaaagatgatcaaatcaatagtttgatgtgtccctcgaggacttgacttcagtaaaatatatgaattttattcagtctaatttttgtggatgttcgataacatttacatgcatttttaaaggaacgcctaaaaaaagattgttacaaaataaatgtgcaagcttttaagttgttacacctagtatttgcgagcattaaatccgtagtttcattataaaactatacatcaaataaccatagtatataacaatataatggtgatggatgatatactactttcttacattttaaaaattgattactatattatgctgagttggtgaaataaacttttcaaaagataatattacataaggtgtatttaattttatgggacaatataagttacgttgatc

SEQ ID NO: 29207 - DNA, 1528 bp, Arabidopsis thaliana landsberg
tccctcatccaactctttcttctcctctccaagccatgctatagaaaatccaccagagatagagtctatagagaatgtgatcaaagggataaaatcatcagaaagactcatctttgaacggagaggaacatcgaactctatactcgaagaagctaccaagagagacgatcatgaagaagaagaggacggtttaatgctcttgtccttggagtcaaacgatccttacactgatttcaagaactcaatggaaaagatggttgaagtacacgtgcttcatcatgactggataagcctggagaaacttctcttttggttcttgaaagtcaacgtcaaggcaagccatagatacatcttcgccgcctttgtcgatttggtcttaaacttagcagtagggccttctaaagatgttgctggagaacctaattccgacgtcgtcgtggaggattctctttcatcttcgtggccggtctcgttgtactcgtcctccgatgagaattcgtcgacgtccgtacgattcttgccggagacttcgataggcgagaagggtagagacgtttgttgtttatcgtcgttgtttgagttagaagaaaagattaaagacaatattgatccaaatgattatgtatcttcttaatttcttcatttgataacctatggatactcaattcttctttttttcggaatattatggaagtaacatctattccacgtgtacatcttttgtagcacgagtcatgtgcagaatatcttttaatttagtgtaaacttttttcaacctaaaataaaaggctattgatcaacaaacactctccgagaactcttttatttgatgggctgaatagaaattataataatgggctaagggcctttggttttgcagttgttatgtgtttagtagcaagacatcaaacattttatctaatattcacctgttaccatccaatgttaacactttactttcagtgtcagagttacaatcaataagctttcatgcccatataccaaaaaacaaccctttcccattccagtagtgcagtgcagtgtgcacgaatgtaacttctccattttgcttagcagctttggacagtgtactaaccacgtcaggaagacgcattctcaaatcaaatgcatcaaagcctctgttacatcaaagattacaatatgtgaagccctacgtttgtgagtgagtgtattcatggtgaaatttctcaatgcatgtactcgtgaacagtctcatatgtgaaaagggatggtgatggttccaagtatttagcagccaaagacagtttgtgagaatgggatggtgacttaactttcaaaaaatttcgtagtttgtcaacaaaaaaatacgataattgatagcagtgatttgcacccctcgccgctcttgatacatcaattattgcttacactaaagtgtgcagagctctcatttaaaagtgattagagtagatcgccccaagagaataagaaagtgtagcactgtgctaaccagataaaattaggtattcaagatttattttccagc

SEQ ID NO: 29208 - DNA, 1766 bp, Arabidopsis thaliana landsberg
cgacaattcacttaataaaatacagttttattttatacctcataattttattttctggtactatagtgatcatctatgaaatacaaaatcataaatcttaataatttaataagatactattatcataaacttacgtacacaactaagcataaaattacatctcttaagtcttaattaacataattaaatatagattacttaacataaacttatagaaataaattaatttttaaaatctgtgtttttaaaataatatatgaatgtattaactaaattaaagcaaatcaatttaatatttgggtcggattttaaggtgatggtcatagagtctagtatggatgatgcacgattcaacttcttgagcaactcagcagatggttatcacgcattgttcgagaaaaagcttgctcaattccgccttgcagatcctggttacgaagattatcatcgcaagtttgttgaatgctacgttctgtatcgagagggagttactgatgtttcgaatcggatggatatcaaagtctttcatgcccctccagaggtcagacaagcaactattgtcgacaaagtggcatttctggtttccaaatatgcgtgggagtttaagttattggtcatgggctctaatacaaaggatccaagattcgactttcttatgggttcacctgaagatcctattcaagtatcttaccagagaaggcttagtcgatactgttttcagaatcatgataaagttcctcgacttgcgccctatactcagtctaatcccagggtccagtctcaaagactcgttctgccttatcttctacagtgtagacttcttgaaggtatggggatgcttttcgtgggaaactgatggaaagagtgatgatggacaatcagtttgagtttatgaagcaaactgattacaggttcgctttcttcaacgagtttgttgttgcgtattcgcaagtgttacatcctcccaaatatttggaagataagctgaataacaataccgcttatatgaacaccgttcttgagggttttcttgaacgtattctatgggatcttgttcgggagcataagtggcttgagggaggggagaattctatgattgagtggcataattctgtgtccaaagattttgtggaggatcaagagttgttacctaagattgaaatgcctcctcctgcacctccacaaaagagaccagagttggatgagtcagcccttgttccacttgagccagaagaccagtttcttgcacaacatgagggtttgtctattttcagggttatttgtgttcccgacggaggggaagtcattaagatcacagtgcactcattgtctgaaaacgtagcgagtttgaaggagaaaatagctgaggtggtccaaattcaagcaaacgaacagacgttaaggggattaagagcagtgttaaaggacaataataggtcactagcttattacaatgtgaaagcaggagatattctaatactggacgtggtctgagacaaagagatggacatgggacaacaacaccttgcacattacaaggaaatgcttttgaatctataatacatgttttaaaactatctctactgctacaacaatggtttattacttatggacttaagtgttttttttttcttttttggcacctacttcttatgggtcatggtgactgaagctcttttagagcagctccgtttctcttctaaagctctcaataaatcatagtgctatgacttgtaaaatatcattacggatgttatatctcatta

SEQ ID NO: 29209 - DNA, 2696 bp, Arabidopsis thaliana landsberg
atggtataacactacctgttttgagcaatagattcagttttccatttatatatgagcaatcaacttgagccacctttctttgttctatgaatttttttagctctagatgcagccaccaaagggaaccggtacatcaactcttgcctcaggtactttcataacggtctcgttattactctacgtaatcgcatagtccagtgagtcaatgtccaaatatgttgcttattagtttaagacagagatatctcacactttgtttcatctgaagttttaataagattcctgagcttgacctctaactttcaagatgcgtttctcctgcgtctttttgcttccggtatgatttcttttttggttcaacatgtagattaaacgaggaaattaaaggcgttgagaatttggcggctcggttgtatccttatatgtgtgtcaacctgtttgtgtctgaatgttgaacacagacacacatgtctgctcaaagctttcattatcgtattttagacagaaatttgttctagaatccttaataaatcaatctgcagaaagcacctgaggaaaaacgtggatgttcttgacacggctgtaaacaagcttctccggcctccatgagaagtcgtcagtttttcacagacttggatcacttttttattttttctttcagactttggattacgtatttctcgtacataaagattttgattataaaactgatgttaaatttcaacattacatattttctagggtttctggtttaagaaaaacaaaacactctgttttttaaactgttttcggtaaaccgactcgaaaagggattatttgtaatttattattgtttgtataaataggatgccaaaaaattctaaacttacgtttcgctccctctctaagtccctctcgctctttggttcttcttctcccgcaagattgaatctttggtttctttggattggtttcgtaagtgttcgcaccgaatcatcaaccatttcaccgctgggtatgttttctacactcgctcaaaagttttgatagtatgaactgaattatgggttttggagaattagttgtttaattgtaaaatagaaaactttatgattctgcttccattgattttagctggtgggtttgtcaaaatttcaatcttttctttgatttgatgattaatatttcattgaaatcatcgttgtttcaggttagtaggagtttgctggttattaagactttagtctgaatccaggcctggctcttggggtttgctctgttgctagtgcacagggtccaaccctgtctgaatcatggcgattttcaccaaacctgagagtgcattgaagcgtacagatggtaacattgcaaattcttacctttttgactcatgctttgatgtatgaatgttgcgtgtttgccgagcttatcaatgttgggcagagacaagatgctctcatggtgctttctgatctttttacctgctaacgagaaagttgagcaggcttgtagtcagcggatgctctggaggaggaggcccttgatgtcgatgactttgaagcagataaaaagcctgaagacttgcagccaagtgttgtatatcagcaacgactgctagaggaaaggaaaatttatgaaaatgagcaacaagtgaaatttattcttacagtagttttgcatctctatatattggttctgagtttaggcgaaaaaggtccttatagtctcttctattttgtttagcgtgaggttgagcgtcttaagagtgacctgaaggagaagaaaaggttggccagaatgttggataataaggtaagttggcttgtgaagttgtgtctactgtatcttcatatgtagcaatcacttcttgcaatttttattgtctagtaactcaaagcgaaattttgtttccaggaaatattcagggtgattcgtcttcgacaacctgagtttgagaggctaagaagcgagaggagcatattggtcaaataattcgagccaggaaacaagaaagcggtattaagaggaaacagatatatcatttgaaatctgatgaggaaaggataaaaaagcttcaggaagaagaggaggctcataggcgtgaaggtaagcccttgacttccatagaaaaacaatttggtcatttttgcttattaggcctcagtgaagaataatttagtcatgattttcccaagatttgaacatgtgtaagactcgttttcagctatataaacccttttgcattgaataagctttttattttctagtcaaattttcgctttttcttacagtttcatcttgtcgcattttcatattctaaagtctttcaatgcatagaaacattgtagggattcatgtatattccttcctataatgtacgagaagcttttatatcatactaaaaactgaaagctaaaatattggtctgttttgttaacacatcttcaatggagttttggctccacttgcgctaaatagtaatacttattatcttgaagtggaagcaaactttgactcaactgtggttcctgctagaaaatattcagttactgagacagacatgcttttaagcaagtcaaaaagaacaaataaaggtaagacccttaaactttgtataaatcaagttggattagacaaactataaaatcttagggaaaaagttgtgtttagtgctgctcaattccttttcaggacacaatcacttgtgggtctatctc

SEQ ID NO: 29210 - DNA, 527 bp, Arabidopsis thaliana landsberg
gctgccaatcttcttaaaggaaggtacaatatactcggtattcttcctttttacagccagttccagagctttggtgtatacttgaaaacgagcatttgggtggtctaccagattatatagattgaagaggctgcacagagacaagcaacagatgagaaacacataacacaaaaatgaaacattaaaatagatgctcaaagactcctaagagagattagctcaaagagtcacacgatcatacatcttcaaacgcaatgaagctttgtcgtttggttgttgaataaccttagcagctatagctttcaccatttcaaggacttcctcaggactgttcgcattcttgacaaggttgcaaatgatggtgtaggtacactcaagatctaataagaggcaaacaccatcaaaattaaagagatattatttatggttaaaaaggactaacacacatatagacctgcgcacacaaaaaaacagacctttctcagagattttggctgataccaagtcagctgaagttaccatcaacg

SEQ ID NO: 29211 - DNA, 1088 bp, Arabidopsis thaliana landsberg
actagaaaagataagagacagcgtttattttcttctctcatcctatatatatactgggatatttgaggcaataaacgtctattgccccactctcacgcgaatgtaaccggttttactaaacaaataatcttttttaatcggttttacaatgttacttttgtgaatatcaaaaatattgtgactggattttggcaatagaaattaaagattaaaatatttgtaaaaattctcctcttatgagaaaaattacccttttatagagagaaaacacttgacatggacttatgacaaaactttgttgcaaatttccgtcataaatattaaaaatttatgtcgttatgcaccgactacaaactaaaaaataatattttcaaggtaacaaattaatggccaaaaaagaaaaacaattagtggtgatgatgatgctccacatattgtctccaccaagccaaaaagtaaaacacaaaaatctccataaatagaactgagcctaggcgtgtgttctccacacttactcgattctctatatatatatctcaacaaaacaaaacaaacaaagaaacaatggatcaatcaggtagtaacacgaacatggacatagagaaggaatcaactacatttgattactccaaacgttcccaatggctacgtgcggccgtgctcggagccaacgatggtctagtctccaccgcgtcgttgatgatgggagttggagctgtgaagcatgacgtcaaggcaatgattctctccggattcgcagggatggtggcaggagcttgtagtatggccataggagagttcgtctcagtttactctcagtacgatatagaggtggctcagatggagagagacagtgtggagatagagaaagagaagcttcctagtccgatgcaagccgcggctgcgtctgcccttgcgttttccgcaggtgcgattgtaccgcttttggctgctgcttttgtgaaagagtataagatgaggatcatttcggttgtggtggcggttacggtagctcttatggttttcggatggttaggagcagcgctagggaaggcaccaacggttaggtcatcggctaggggttttgt

SEQ ID NO: 29212 - DNA, 1829 bp, Arabidopsis thaliana landsberg
caatgaaaagaaaattgtagaatatgattacacttatcaaccgattccaaaatataacagtgtcttatcaataaatagattatccgttgattacttttggtcaaactctaagaaaatccagagaaggtctccaaacactatgtgtgattgattcgccccccttctgttttgggattgtttctttgtcgagaaaaaaggtataattaaccaacaaaaataagcagaaagtaaaagaatgagattgttgttttatttttatttactagaaaaatgctttcgcggttttaagtgatctagaattaaaaggatccgctctgatgaatgtgacatatacgctactgatttgtttcaagttatgcaaaagaaaaaaggccaaaatttgactctttgagaaagcttttaatatattatttcaagttacgttttttccaaaaattgtaactgccaaccaacttccgatcaaaaagttcatttttcaaagaaaaatacaatgtacatgaatcgaaagacgttcctgaagttttcttttcccaattgattattccagaaagtagattaaagcatctgccagatttgaatatggtgttctctagtcaatatagtagtacagctgccaaaaggaatgttaatttggtaacttggtaatacaagtacaaccaagaaaactaaagtattatatgtttataataaacttttggccaacacatttcgtgtgccattaggtaatcgtttgggaggttgagatttcatttttatatattaattttgaataattttttgccaagaagacatatatgcatattatggctttggtcttgacgacgacttaacaactccatagtgtaagtatgtaactgcatgcccctttcggtctctcaaattgatatttgttttttgtccttcacgaatcaaatgaaatgaaaaagacacataaatgtatactttcacatttcctttcttcttatatttgattatttgtaacttttttttgaaaagtattaagttccttttgaatttaattcaattgagatccatttttgggggtacagttataccaatcgttatgctttatctttaccgatggtacgcggcaatcaactttttttttttccttctaaagttcatttgttcgtttcaaacttataatcatagtgtaaaaacgattagatgtttgttaattcgatttcctaatctaaatttttgaaaaagacagaataaaaagtatttccgttagtggtgatgatgctccccatatattaatcgtcgactccaccacataaattattttaaaaagttaaataaaaaaagctaaaaactcacacaatctctccataaatagaacctaggcgtgtgttctccacacttcacctatattctctaccttcttatttcagcacaaaccaaaaacataaagacagaaaaccaacccaaaagactttaccatggaatcacacaacgtgagcaacagcttgaacctagacatggagatggatcaagaaaaggctttcgactactccaaaagagctcaatggctaagagccgccgtgcttggtgccaacgacggtcttgtctcgacggcttcacttatgatgggtgtcggtgcggtaaagcaagacgtcaaagtcatgatcttatctggtttcgccggtttggtcgccggagcttgtagcatggctatcggagagtttgtctccgtttactctcagtacgacatcgaggtggctcaaatgaagagagagaacggaggacaagtggagaaagagaagcttccgagtccgatgcaagcggctgccgcgtctgcgttacgttttctttgggtgcgaatgtgc

SEQ ID NO: 29213 - DNA, 1907 bp, Arabidopsis thaliana landsberg
gtgtcctaggccatgtcctcggacctgggaagagctcattgttagagtcagcatgcatggtaatatgaaacgaacagatatcaaatcttgcacccacccaaggtatcattcgattggagtagaagataaagtcatgctttgttgttttacactcgcgcattagagtgtgcataccacgtatctgcaagcagcggccaaaggatcagtcttttgggtgcctaaacaagaaaatgattgttgttcagtaacgcagaaaaggggaataagtaaaacctgaaaagttgattgaatagcataaagacttggatatatttgacagagatcatgcccaccgagcttcgtatggatgtgttgcacaatccaaatcaatagcaacatggttatcaccacctcgggaattattatatctgcgtatttctttgttgggagtatgaaatcctcaaatgctggcttcacaaactttgagtactgcataagagtttcacacatgaaaacataaataaagaaattatttgcaaaagaagaatatacagccacacaaaacctggtcaagaacagtggcaatatctctgcccttctcaacagtatcgcgttttatccttctcgctagacgcacatcggcatctgcatagataacgccatgatgtaaaataagagaccaatgtgttaccttcatgagtacatatacaagtgcagcgtctcatatatgctacggatttgactaacaggtttggtatgggaaagacctgcgtctacaaatatcttcatgttcatcaaatctcgcacccgagggtcatggaaaatgagtataccttccagaattataacgtcagaaggattcacctgcaaatatatcataaacagagaaatattagtataagcatgattcttatataggctatgatgacaagtttatgtatctgacaaacaagagtgcatgtaattagtatggaatacacaagaaagctaaccacttgatcatgagtttgagcttcagaaattagcagaaaactttaaatgtcagaagtgactaattgacaagtaaagattcttacccttctaggtggaaaaacattgttcttgtaacttttgaagtcataattaggaatatctactgcttgtccttttcttaacttctccatggaagacaataattgctcagtatcgaaagcgtctacaagacaaggaagcatatgacacacaattcgtaaattcaaaaggctaagggacacagaacagcgtgcattagatcaaaagacccattagtttttcaaaaacttactaaccaggatggtcaaaattgtaatcatgaactcttacaagctccacttcatttacattatggtagaaagaatcctgcaaacaaagatcaacctcggtgcattatatatcgacttacaagagctttaaaaaaatggtttatattgttgcataatcatatcgaggacaagaatcacctgatttacaacaacagctctctgatcatgcagttgctgcataatcatatcacagacagttgttttcccggatgctgcacctccagcaactcctgaaaacaacattttctatttaacattttctgtttctaaccatctttggtaaactaaaatccaccacgactctcaccgatcacaaaaggttgaccatgttcttcttcctcagccatttgctctggtctatttgaagctaaaccatccatttgatgaaatcctgagaaatgaacctttgaggatgtctctattatattcacatccgactttgaagccattcctacaacacaaatatgcaaatctaaattcacatgaaatatgccaataaggaaagcaaagctacctttgttgtcaccatccaggaacaaaaaggaacactttccagtcaaaaaacaattcctcaaaagaatcaaactt

SEQ ID NO: 29214 - DNA, 1073 bp, Arabidopsis thaliana landsberg
ttaaggattgagacatactcgtgagagaagaacataggcaccggcgtatttattgtcccaactaaagatgtcaggctgatctcctcctcctaaggattttatgaagtttgtgtaatacgggtcgttggttgccctatttagccatgctgctccccatatcagctcgtcctgtcattataagagtagcttagttacaaagattcatagatatgtctctctcagattcagatcaaggtaaatatatgaaatgcagaccttgtagccagagtaggagcagtaaaaaggacagacggatgaggaaagggaatcactgtaagcgcctcggtattgaatggcaaactgcatgaccttctttgctgttgccaggagcaagcgagagtacttgggatcaactttcctgaaaaccatggagcttgcagctagagcagcagcggtttcagcggctacatcagaaccagggtttgagggagatacagagtaaactgtgcgaggagtgtccatatcttctggtcgttcccagcacttgtgatcaccattagggtctcctactccaacgtaaagcttccctggtgtagccctggcacattttagtagataatccgtggcccaacggatggccacacgggagttctggagttcggatcccatcttcttaccgtactccaaagagctccaggagagcatagtggtggtgaatgccatcgggaaattgaacttcacattgtccccagcatcatagtagcctccggtcaagtccacctgcaactcataccgtgttattcagatggatttactatgcttttactacttgactatgggtatacagttttagggtcttacgtgagcagatgagccatcagagaggccagagctagacctccatgagagttgttggtcactagggaggcgaccagaccgctgaccttggaaaaagagtaatgactttgagagtgcttctctgtaattgggacttgcataggtattctccagtgaaagcgcagagagaaggaaaacaaagaagaaaggagaagccattcttgttattgtgttggcgtgagggtacgactttatca

SEQ ID NO: 29215 - DNA, 990 bp, Arabidopsis thaliana landsberg
cttctggagtgtattgcgtagagccatgttcatgtataaattgcttcaacaaacctatccataaagatgtgtgcctggctactcgcaaacagattgaatcccgcaatccacttgcatttgctcctaaagtcatcagaaactcagattccatcattgaagttgtttaagggggggaatatttccttgtacttatcatcctcaatacatttatctcattgaaaaggctataaaattctgcattggttcacaggatgatgcaagcaaaactccagcttctgcgcgccataaacgtggctgcaactgcaagaaatcaaactgtctgaagaaatactgtgaatgctatcaggtttttattttccctcatcgatgtgctttcaatggttccatgtgattaacttcctatggcctgattccggtaatttggtatgttgtttctttaaagggtggtgtgggctgttccataaactgtagatgtgaaggatgtaagaacgcattcggccggaaagatggttagcttctctgcttctgagttttcaatttttcattactaataacctcacattctctttctgattctgattctgcttaatgaatttctcagggtcttccattgacatggaagccgaacaagaagaggaaaatgaaacatctgagaaaagcagaacagccaaaagccaacaaaacactgaggttttaatgagaaaggacatgagttctgctctacctacgacaccaacgccgatttacaggtagaatatcaaattctagaggactttttatgtgagtctatatcacctgagtagctgagttttttgtttttttttcagaccagaactggttcaactacctttctcatcatctaagaacaggatgcctcctccacagtctcttcttggaggtggatcttcctcagggatatttaacagtcaatatctaagaaaaccagacattagtttgtctcaatccagaatcgagaagtcattcgagaca

SEQ ID NO: 29216 - DNA, 627 bp, Arabidopsis thaliana landsberg
ctcattgaaattattaagcagaaagaagcatatgttgttctgaatagaggaaagaagacgaaacgtatatatactcaaataaacgccggcggattagctttgggaattagggttttttcagcggctacaccgtctattttttctttttgggtttagggttttgttttgaagaaagcccaataagtacaaaatggcctgttttataagtccctattaaaagcccacaatgagttttaattttaattttttttttactcgtctttgtgtggtgaagcggctttctctcggtctcgcattgatcgcacgcatgacgatatctaggaaactagcgcaatcaatgcaacggtcttgaacgttatttgtgactaggattctgctacatactactttgcatgtttcacgtgtgtacgtaccctttcatcatgagaaaatcagaaaataatagattttcgtgactcatagtatgaaacatttttataactaactaattggaggaaaactaggcagattttttttataaacgatatcgatttaagggggatttttttttcttttcttgttattcctcctataaacaaagctatcgaacaaagcatccaaaaaaagaagaagagagaacatgacaaa

SEQ ID NO: 29217 - DNA, 2010 bp, Arabidopsis thaliana landsberg
  unsure (1)..(2010): unsure at all n locations
gctttttttgaatctaaacaagattgatcggttacacaagaattcatggatatttttttcatttcctggagagcgactgccaggaaggtaaacaactttttcttataaaatccttcatcctttgcatagtagaatgctaaaattaccctgtgatgtaacgtgggactctgaaacaggaatctttatccaagattgctgaagacgcattacttaatgctatacaaacacgaaaacacggagatgccttatattattgggttcgcatggacaaagatcccagaaatcctctgcagaaacccttttggtcgatctgtgatgccataaatgctgggaattgcaggtagaaacactagagattctaaatcataatgtttgagactttggccatttacctgactctaagcaattaatgggctcggaacaaggtttgcttacaacgaagctttgaagaaaatgtacagcatcaagaacttggactcattgccaccaatgcccgacgatggagatacatggtctgtgatgcannnnnnnnnnnnnnnnnnaagatccttcttagagtttgtcatgttctcaaggtacttgtttaccacattacccattgattgtctcagtcttagcctctttggagaaagaagagtgcttaagagtgtgttttcccatctgtttgtaggatgtttgtggattcactagatgcacagatatatgaagagcatcatcgaacaaaccgttgctatctgagtttaaccaaagtaagaaactcattccttcatctgcgaaagttcatgtgtttttagatctaaatcagatcagtccacttgggttgggatttatgtgttcaatttctcacaggacaagcattgctattcgcgggtactagagcttctggtgaacgtatgggcttaccacagtgcaagacgcattgtctacatagatcctgagactggtttgatgcaagagcaacacaaacagaagaaccggcgagggaaaatgtgggtgaagtggttcgattacacaactctgaaaacaatggacgaagatctagctgaagaagccgactcagaccgtcgtgtgggtcactggctatggccatggactggcgagatcgtgtggcgcggtacattagagaaagagaagcaaaagaagaatttagagaaagaggagaagaagaagaagagtcgagataagctgagtagaatgagaagtagaagtggtcgtcagaaagtgatcggaaaatatgtaaaaccaccgcctgagaacgaaactgttaccggaaattccactttgttaaatgtagtagacgcataaaagaaaacaaattaaaattgcttctttttttgttaggtcactaatttgtttcattcattgtttttggaaagattactgtataaaaggtctcaagtctcattcattcactctccctctctcttctcacctctcttcgatttaaccgacggcttaaattctccggcggtggagcttcactgtgaacaacaaagaaagagagaagatggaggagacgcaagttcttgagatcaatctcatctctgcgcaaggacttaaagaaccgacgggaaagctccggcgatttcagacttacgcatccgtctgggttgattcttccagcaaactccggactcgaattgatcggatcggctctgagaatccgatctggaacgacaaattcgttttccaggtatcgccggagtttctatctagcgaaacttctggtgtttcaatcgagatctacgccgttggttacttgcgagatcatctgatcggaactgttcgcttcctcgtgagtaacttcctcccaaccgccgccgtgaaagttccatctctcgtcgcgcttcagatccgtcgtccttctggaaagtttcacggcgttcttaacatcgcggctatggtgatggatgcttctgaacttccagctgatttcttcaagtcggttcaagagatccgtcggagtcggaaaatgagaaagtctagatctgcggttagttcgtcagagaa

SEQ ID NO: 29218 - DNA, 11752 bp, Arabidopsis thaliana landsberg
  unsure (1)..(11752): unsure at all n locations
atgaggaactgttgtcatagtcgcacaccatgcccccttttgtccaatcgctgcctttctattttgcaagcccacaccattcaacaagtacaaacccagactcttattactattgggccaaattatgcagcccaatagcccaataacgagctgagacaaatcctatcgacctagaagatccaacttgaaaccctagagttctctccactatttaaagacctcaaatcttttgatgtacgactcagaattcttcgaaacagcgtctgctctagaaattcagtgttttctcgaagcttcattactattttctagggaaaaatttagaagttattttgtctattgtgttgtgttttcttagatttaaagtcgatgttttactcttaataaagaggagagagcggtgataatgatgatgaaagatgattccatagaacaatccaactctgaccatcattgatgatcttaccatcatgcactaccatctgaatctcgctctcccttaaatccttttcttttagtatgaaatcgttgattttgttttctcagaatcggattttgtcggatcttttagttttgtctcaatttgccttaaatcgattgagaaaaattcatcattggttgatttggttctaagtatttcataccaaagttctgattgttatttctgttgttaaattgatttggtatttttttcttcgtttgcgttcataagtcatactgcagatttaactcatatcaacaggttgatattcaatagcaaaaatttggcctgaaagaaggaaaagtaatcccttcagaattcaattctcatggactaaattaatctagaaacgtaattgtaacaattgtctagaactattttgatggtagttattccgaaaacgattagttctgcaacatgaacactcatcttaattaatcactttcgcagataatcgcaaaataagttataaatccataaaattatgaaagatattctgatttgtgtcgatgaggttcacacagatgtggtatttgaggatgacttttagaaaaggattttatttcattggaactcagaaaataatgtaaactgggcctatttagttagccgatgaccaaattttctttaatgtcagtcaaaagcccgttaagtaaaaaaccttcaacataattggtgctttcactttttccatcagtggacgggcccaaagcctgcttttctgatttacctgtctttttaataggttgattaacgtctcttaccctttacgagagcccataacggctagtttattctctgcgatcagacgtgtcatcatcgtggcggcccagttacatcgtctgctctattttccggctacaggaatagaaattttgttttaatttgaaccccaaggttttgagaatcattaatttcttcccactgtttctacattgtccataaatatccacgtttataaatttaacaactttacaggaagaaagaggaatcaaatcttacgttgtgaagtctttaataagcatggggcatttagatagatcttaaatttatggggagataacagaaatttggaaaactagggtatcagtgaaaaaatggtcaaaatcagaatcaatttgcaatacttaaaattattagggatttttctatccactatgtataaataaatcgcaaattggcaactagccgttacgatctctctacctctctctcttttaaaaattcaaaaacttaggaactttttacattcacaatcttgcagattcttgcatattttctttcctttaacgagcgcaaaaaatctgagatttgttaaataacccattctgatttccggagtgattttcattcatggcgtcttctccagcaaagaacaagatctctgtttctccttcttctctattctcttcctcttcgccttcaatgccttccagaccaaaccctaagcaaagaaactcggaaaccggagatctgatgcgtcgcagtttccgaggcaatccattttcggcagatccgtcccggagaaactcaatcggtagagaatgcagtaatcgtgttgagattggtgataaagagaatcagaacgacaaggatcaaatcgctaatgtcgtcaaaggtccaacaaaaggttccaagcatttcatgtcaccgacaatttcagccgtttccaagatcaatccatcgccgaggaagaagatcttgtctgataaaaacgaagtgtctcgatcctttgacaaatcccatcaccaggttcaggtaaagtcgtctgtctcgttttctgatgtgataagcatcattggggaagataaagatgtagaccagatttgcatcgatgaaactaagcagcttcgtgaagaggaatcacatgatattactgtcagtgatttcgatgagattcttgagaggaagagtaatgataattcaagcttcaagatcagtcctcttcctccttatgttccatacacatttcctgtgtttgagtctcatgaagtggatccagtggtggcaccttatgatccaaagaagaattacttgtcaccgaggcctcagtttctccattataagccaaatccaagaattgagcatcgttctgatgagtgcaagcagcttgaggagcttttcatctctgaaagctcttcttctgacactgatttgtctgcagaacgagaggaggaaggtcaacaagaggaggaagttgcttctcaggaaggtgtagttgcagtagaagaacaagaagatgatggtgaagagcgtttggaagccgcagaggaaattctggatgttgatggtgaagagcgtttggaagctgtagagagtgatgatgaagaagaagaagtagtaggtggcgaaagcattgaagaagaagaaactcatcagatttcaaaacagtctcgtttcaccaagacatccatgttgcttggctggattttggctcttggcgcggcgtatcatttgttggtttcttcaacgacgttttctccacaaaccatcacagattcacctttctatcagtttaacatctctccagagatcataatgtctgctagcgagaactttgagcatttgggtgcaaagctgaggatgtgggcagaatcatcatttgtgtatcttgataagctggtctcaagtctacgagaagaggagggaagtgttccttttcgatttcataacttgacagatcttttggaagacaaaaggttgtctgatgctgttttccagtcaactagtgttgaaatcattgttgatgggttcatagtggatagcttagaagtggatagcttagaagtggatatagaagaagtgaatgttggtcatcaggaacctgaagaagaatcggaaaacagtggtgaaatcagtcttcaagctgtctacgaagaagatgataatgaagtcgagcaggagaatgaagaaggaaaggtaaacttagaaattgttgatgaatgtgatgagcaggctgagatcaagatagctacagatacagaggtgaacggaggtgaaaggtattcagaatctctttctgaagaaggacatggtggccaagaaactgatgttgttgaagggcaggaagaatatgaagaaaatgaccagaataacatggaagaagctgaatccgacgcacaactgcttgatgatgtgcagtctgctgcaatcagtagtaaccagcaagaacaaaccggagtagccaatgttgaaactgtacaagaagaagaaggtgttggggaaattgctggaggtagcctcagtgtttcagaagaagctacagatgttgaacatgacggtaatgaagtagaagaagaagagagtgggtttggtgaagttgttaatgatgcaggttcggaggacattttgttgagtggccagaagaaagtgttagtcttgttttcgactatgatggttatacttgcagcagtagcagctggtttcctattagccaagaagaagacaaaacctgtgatgctgcaacatgaagatggcgaaccaacagcaatctctgcaactaaagttgtcgagcatgtgccagtagagaatctgatcagagaaaggctttcttcattgaatttcaaggaagaagaagaagaagttggtgatgacagaaaaagagaggtatcatcattcccttctgagatgagtttcagcttcagtaagaacaaaccattacacagctgcagcaacaagaaagatgatcttaaagaacatcaaagcggaggaggaggcaagaagagtaatgatagcggtgaatccatggcttcctctgcatcagagtactccataggttctgtttcatatggaagtttcacaacatatgagaagatacaaaagagaagtggtcacgaagagaaagagatgataacacctgtgagacgttcaagcaggatcaggaaccatcaacattctggacaatgagttagaattagcttttgactttatgatctactgatttgtaggaaggcttttccatctcactgaagcttaattagtatgttgctttcttaattagtaggtttgattctcttctttaaagtttctggctttactatttgtttaagacattgtaccccaaccttgtggcctagttttaataatattgttcatgttatctgaatcctcttctttgtatcttgcaaaaacgatggacaattttcaaacaccatgattcatgattgtaaaaggttttgcaagaataggaccaaatggcgttggaagtgttttatgatgatatatcagattagtttatatagatgtatgaataaaccttaatggtttcggtgttattcaatgactagattcaatctaagatactttgattttgagattgctcttaagtttgtaccaaggcaacaacaatatcaacaaattatgggacaacaagagagctatagaaaaatggtatctaattgatcctaattggatggtgtacacgaccacagacaatcgattacaacattttataagttgttgaattttttatgggagttactagcttttctgtttgaattttcctgtaggatttgaagaacttttgattagtgacacattcaaatctgatatgaaaaatgggaaaggacacaaattgagctcattatggtatttatactttataaaatgctttaaaaaacatataaatccctcaatttatcaagcaaataaaaacctgccacgtatcatcttcggtttaatttgcagtccgcggaaaaaaaaaggagactggaaaaaaaaagtcacagtctgtctgtctctctcctctaatcttttttatccgctagggttttgaagcaaggtttctcgcgattttctcgatatctctcgcccatggcgaaaccaagtcgtggccgtcgttccccctccgtgtctggctcgtcatctcgttccagttccagatctcgttcgggttcgagcccctccaggtctatttcccgctcacgctcccgttctagatcgctctcttcatcttcatctccttcgcgaagcgtcagttctgggagtcgcagtcctccacgtcgtggaaaaaggttagggtttctttcaatcacttaccaattgttcgaattggatttgtgtaatttcgctttcattcttcttggttcgttcagctcgaattcgaattgatgttctgatgtatcttcttgtgtagtcctgctggacctgctaggcgaggtcgctctcctcctcctccaccatctaaaggagcatcttcaccttccaagtaatatctgactcgttcacataaatatattctagtgtttatgctttcgtcattactgactttacaatcttttataccttcaggaaagctgttcaagaatctcttgttctccatgttgattctcttagcaggaatgtgaatgaagcccatctcaaagaaatctttggtatgtcgatttctcttttctctgtttcttctgcttcttctaattttactacatgataactgtctacacatgtcctctaatgtcatcagtagtatatacgtcattacgatcatcactggaattttgtcctacttgtgttggctaaatgttaagtcttaactcatggcttgtattcatgttattattaggcaactttggtgaagttatacatgtcgagattgcgatggatcgagctgtaagttactattctctttactctctgttgtttacttgcatcacttgttgaaatcagctcataattcctttgaatattgttaacaggttaaccttccaagaggacatggttatgttgagttcaaggcaagagctgatgctgagaaagctcagctctacatggatggtgtatgtctctttccaattatgaaatgcactgtacttgacatattggcagagaagatttatgcatgtgttttttttttgtttactgaacacaggcccaaattgatggaaaggttgttaaagcaacgttcacactaccacctcgtcagaaagtatcttcaccccctaaacctgtctcagctgcacctaaaaagagatgctccaaaatctgataatgctgctgctgacgctgagaaagatggtggtcccaggcgcccaagagagagtatgtcaaatccttatatttggggtatggatgattgtcgtagtctagaccgtgtgttgtgttaattagtatcatcaaatatgtgcttagcatctcctcaacgggaaaacagggctttctccgagaaggcgatcccctctacctaggagaggcttatcacctagaaggcgatcacctgattctccccatcgccgaaggccgggctctcctatccgccgtcgcggtgatacacctcctagacgtaggccagtatcaccatctagaggccgttctccatcttctccccctccaagacgatatagatctcctccaaggttagttatggcaccatctgttttgtcttgtgttttcagattcgatagctcaccttttatctgtcagcaggggctcccctagaagaattcgtggcagtcctgttcgaagaaggtctcctcttcctctaagacgaaggtatgtctatttggtacctgaattacacccttagtaatcgaagtttaggaatcacagctttatagactatattactctgtaaattagacagggaaaaatgtgtcagttttatatatgttttgtattcggcgtgtttcaggtctccacctccaaggagactacgcagtcctcccagaagatctccaatccgtaggcgtagccgatccccaattcgtaggcctggtcgctctcgttcaaggtccatctcaccccgcaggtttgttggaactcatttaaactttttactggggtctctctcgtggattttattttgttacagatgcatagctaagactgattcataacaagtttttaagtctttcataattcatgagtataccccaagatcctactttgtcttatccttttacctaggtttctgacataccagctcctagagacgttgatactaaatatgactaagttgtatagatcagtctggggtttgttcatgaattaattttgtctttaactgtaagcaggggacgaggtccagctgggagacgtgggaggtcatcttcttactctagttcaccaagtcccagaagggtaagggcttcttgcagatccctttttagctgtaaaattttttatgccttgctagttatgtgtcttgactcttgactttctatcctttgtgcattattaaaccttacagattcctaggaagatttcaaggagccgcagtcctaagaggtaaacgctttctgtcttaacactaatcctcgtcttaaactggaaacactttattgtctgtagaatgcattaattgaagaagttccactgttaagttatgtatagtaatgttaaggttaccccagttcctgataaaagacatagcataaacatctggaacctatactttcttagtgagtttggtgatgaaacagagcaaaatagaattgttgtgtagaaattttttgcgttgaagtctaataaaagaaaatgggttgttgttgggtatgtttaggccactgaaaggaaaaagaagcagcagtaacagcagcagcagcagttcaccgccaccaccacctccacctcgtaaaacttaaaggtgataaaaatgttataaaaagaaaagaaaagaaaacttgagtcttgatgtagctctctttctccacatctttatcgttatcatctgtctcagcctcttttcttagaacagataaaatgttaaccagtgaccaaatgagggttgtggtttttgtagtgtttggatgtttaatcttcttttgtggatctcctcattagatgcaacgataatgacttggttcttttagctggttgtaattccctaatatattcagtcttgttgaagaatggctggctccttcacccttttcttattattttagttaagaggaagaaatccatacaaagactggtgatccaattacacaagaaattggttccctgtttcattcaagagaaataaaagataataatttaagggctcctaagatgcacaacaacaattttgcatcaaaccatgcatcttaacgagagtgcacaaacttgtatttaaaacgaaaaatagagttttcaagatcgtcaacttcacacagtacataccactcaaagaaaataaatatacataacaagagttaacaaagctacaacaagctaccactctgcaagtgcccatatggggaagatgtttctgtaggtaacatagtggtaacatagtttagaaaacagttcttcatgaacactcctgtcatttcctgcacaacagagcaacaactccgatcctatatgttttgaatctttggaagagagtgtcgaggataatctctgttttctaattgtaaattgatggttagtaattattaaaaatatataaatatgtagttaaatttctaacttggaaccaataatttaaaaataagcactttcgttttttttacacggaaagagactaaccaagtgttaagaaagaagacaacgttgtggttagttttacaactctcttctgctaccggtgaggtgaccacactatcccaaacatgtttataatgcatctttggcattatacaataatgcatcttgcttcagaaattgggtccagcaaacggagccgaggctcacatgtgatctgacttatgggtcatggggtgcgacatccttggggttgacaaggttgagtggttcagacaaacttgggtgttccaagtaaagctgcaagcagagtggttcgctgttcaaagacttgactggcgttaaaactggtgggttctgccactgctttgtgtctgttggaatccacagctctgattctttgcttgaacccacttgaggaagtgacctcagataagccgttacctcccatctacaatctgtttatacgagtgggaaagatcaaaacgctttaaaacatagaaacattgctataagaagagagaatgtacagagggtgggtggagctagagatgtatttacttaggggaagaggtttgacaagggattttgagacggaaagcttgattaagaaggacctaagcgcaaactccagttgaccctcttctactaaagcagcgcaagacggtttaattgtgagcttgaagatgaacctctctacaggaacattatcctcgctgaaaaacacgactgctactctctcaacaagaccctgtttcagtgatcatgcataagaattgcagcattcccacatatacatcatgttacacttaaagcaggacaaaaagaagaagaagagaccttttcaataaaaggaagaagtccagaagcagcagagtgaatatagtcgcgtagctcaggatgccttgctctttgcaccaccacattcatatatctcctcctttcaaatgccgctttacatacaacacactaaattgatcaatcaatcacttggagatgcatgtcaatctcacaaatcgctctttactcaccagatgggtaaaaacctttgaggtatacaatcattgtgatggctacttccataaattccaccagagtacgaccaacttctcctgaatcacccaaaattacaaaatttcaacgccaaactactaactgatgttattatgtttatgagattaaaatttagaatcaggaacttaccagactgattatcatccttcagattcattagcgtctcacaatctcagagacctcatatacgaggaaagaacgaatcctaacttcgccgtcgatggtggcttcgccgtgaaacggtgaaagtgagaagtcctagccgttcgccgtcaagataatcacgcatgtgacagacacgtgacttctttagttaagtcagagaatcataatacatgggcttgtaagtaatgggcctaattaattccctcgggcccaattacgttttttcattagtgtacactatctctctttctcctccgcctcatcggaaaattttgcccggagcatatcgacggaatctgggagatccggtaagatttcatatcttgcacgaatgtttgatcttggttactaagatcgttttcgtgttctctcttggatttataactaactagcttctcatggattagtagagtctgataacttttgagctcgacataggaacgatggggaaaagaggaagggcttgtgtagtggtacttggagatcttggtcgaagtcctcggatgcaatatcacgctctttctcttgctcgtcaggttttgtccccatgttttgcgttgggtctggtttcctcttgaattgcgttagttcctctaatgccttgaacctgcaggcatcatttcaagtggacattgttgcatatgtgggtacggattccttgataaattttcttgtgaatcacacaatgcattgctgaagtgtttttaaaaaaaaatcatgaacaggttctataccccatgaagctgttctaaatcacccatcaatccacatccataccatggtatgctacgatgaaatcttctatataaactactagcaactctgtagatttatgatcatcactttctaattcttttggggggtgctaaaacaggctcagcctcgattcattcagtactttccaaagatactttatcctgtaactctcttgctcaaggcatttattcagtttacaatgcttctctggtttcttttcgttaaagtaccagcgcctgacattttcctggtccaggtaaaaagtctttattcttgtcactttgaaatttacagtaaattctgttttcttgcgaaatatgcacaagttacacctagttatatttctacagaatcctccttccgacacaactctaattgctgttaagtgggcgagttcatggagacgtgcagcgtttgttgtagattggcataattttggatatacgttgttggcattgtctttaggaagaaacaatttgcttgtatccttataccgctggtaagtatattaaccagtggcttgataatggcttaaaactacctgtaggacctttttatttaagggtgaaatattagcatttgcatgattttaggtttgagaatcattatggaaagatggcaacaggttcgctnnnnnnnnnnnnnnnnnnnnnnnnnnnnnnnnnnnnnnnnnnnnnnnngaggtgagatgaaatttctcatagataataacctgttacattttgattctgaactaaagaaagtgatgtgattctgatttcgtatgcattaatgttctgaattggaaaaacagagccaaagcgttccatgatcagcctcctgagtttttccgtccaactttgcttgaagaaaggcatgaggttagcattgtgt

SEQ ID NO: 29219 - DNA, 1190 bp, Arabidopsis thaliana landsberg
actggacccacttaaccgggaaaaaattgagtgtaatgaaaccagtggcaccttaaggctgttatgagttatgtacaaagtctaccaatagactaaaattaaattacaaaagcatgtctgaagtatttaaattcgcaaagcaatccaacaacatgtgagatacgttcaatatagagctgaattgatctgcgtactttcaaatcatggacaaatccgaccggattattcagctttaaaatcattggtataagctactctcatagagagttctgtgttacacatgagataagacactgacactaaaaagactaaattcatgtaagtgtagactcgataagagacttgttcctattccaaagtatgtaacacccgaaagggccagtttttcacctttcacctgagtggtctctgaaaacctcccaagttgaagagggtgtgaatggaagcagcatctgtcatgaaaggaatctgagcatagactccagcaagagcgcaccgtatgcattcgagaagcagacatatgtaggtgaatccgatggccatccaataatacattccgaaccgtcctttgaaatgaatcagcgggaagaaattgctagtgcaccatatgacctgaagagctgtttcaagaagcatacccatcatcatgtgaaacctcaagtaatgaggcagctctttgttcttcaccacccacatataacccaagtagcagtagaccatgaagaaccatgtcggccatctgtttattgctcccgggatgaaatatatcatgtccccaatagcgtcgtgcttttcgagaaacggttggacatagaaaccaacatcagatatttggagggatatcaaataaggaacacaagctaacgtcctccaccaccattcaggtctctctgcgattttaggcagtttgattttaaagaagtcatctttagccactcttgcaggctctatcggtctccggtgtcttctcaaaccaggagctaatggtggcaagccattagcaaagagctggttggatgatgttgctgctgctgcaaagtccacagatgcagttgctgcagaatcacaaagagcacatgatttagctgtcaagcctcaaagccatggttacaggacaagcaaagaataaaacttgaaaccaaataattacctgaaagaggagcaatctctcgtggacatctccgtggaat

SEQ ID NO: 29220 - DNA, 1771 bp, Arabidopsis thaliana landsberg
aattggttcataggttagttcgtcactatcagagtttgagtgttgtaacgtagtcctttaaagattgtcacgtgtaggatgttgattatgaggctaccatggaaactaagctttcaattgccaagaaaatctttgacatagagaaagaccagactttgaactcaagcaccttccagaaattcttctctgaaaacgaggtatgcttcaaaatctgatattgtttccttgatatctcttgagaattgtctgcatagaacttatgcctccaaaggccacgtcagcgttccattggcttacggatttttgttatctttgaaagggctggttgaaaccatatgcagctttctgcttccttcgtgacttttttgagacttcagatcatagtcagtgggggaccttttctgactatacagacgacaaggtataatttgcttttatgttgttcaagtttaagttgtgatcgaattagttcaagctttccagatgtatttcatatagtttcagtaatttctcacatctccaaataacatttgccacagcttgaaaaattgatatccaaggacaacttgcactataacactatatgcttccactactacattcagtaccatttacatgtacaagtaagtatgttctgatttatctagttatattccattcttgtatttactggatgtttcatctaaagtgtgttctggttccattttcaaaagttgtcagcagcagcagaatatgcaaggaagaaaggagttgtgctgaaaggagacctacctattggcgttgacagaaacagtgttgatacgtgggtttacaggaatctgtttcgcatgaatacgtcaactggagcacctccagactattttgacaaaaatggtcagaactggggatttcctacttataactgggaggaaatgtcaaaagacaactatgcctggtggcgtgctcgcctaacacaggttggaattattgtccttaccagccacatcctttgtagatctgaaggctgaccacattgcatacttgctttgcagatggggaaatatttcacagcatacaggattgatcatatattgggattcttcagaatctgggagcttccagctcatgctatgactggtttagtggggaagttccgtccatctattcctttaagtcaggtacacaagctacatgcttacagttaaaaaaaacttggctttgagagttacttgataataaaactgctgctgatgcaggaagagttggaaaaggagggaatatgggattttgaccgcttaagcaagccctatatccagaagaagtttcttgaggttagttttccatcacattttttatgatctgcctctgtcacagcttagttagtttgtgagttttcaatctcattacctatttgttgataatatgtcattgttctgttccttcaggagaaatttggagatttttggccttttattgcatcaaactttcttaatgaaactcagaaggacatgtatgaggttggtaaaaatcctcatttagagatcgttttcctttggagaaccaagtcttacctttttctgtccaaaactctgtggtgttttttgctaagtggatgtattaaatctttcttaattggtttcctttaattgtactctagttcaaggaggactgcaacacagagaagaagattgcagcaaagctgaagtcattggctgagaagtctttaagctagaaaatgaggacaaagttcgacgtgatgtctttgacattttacgggtaaactttcatgcat

SEQ ID NO: 29221 - DNA, 5720 bp, Arabidopsis thaliana landsberg
catagcttggtaaacaaaacaaaacaaatgggaaaaaaaaaaaaaaaaaagagacttggattggaatgaggacaaatgctctaatgaaaacacctgaacagagctagaaatgtgtttaaggtcgccggggaaatttagagaagtccggtggtcggcggtgcatataagcagttctcccttcagtagcttcttcggttccatagaataagagtgtcgcatcaccaccgagtccctgcagcaagaaaagtttgtaaatccgttaaaaaactgtgtgctagtgggttgcataagaactgaacctatccaaattgtgatttttgtgacttaaattgcaaatttgactaataggattttgttcctttagaacggaaaaagactaagcaagttgattgaaggaggtacctgaaggccggcatggccatcatcaactgcattaagtgctgccttaagtactcggattgcagttggactgttccgtaatatttctctgcaccatttcacagtttctttctccaaatcctctagctggaacagaaaatgggtcgcagtgaaggaacaaaacaattaccaacaaatagactgatttttttgtgcatctgtgacaacagtatggggtttactggtaaaatttaccggtacaactgtattgataagtcccattttctctgcttcagaagctgtgtagaacctcgtcataaaccacatttctcgtgcctttttaggaccaacctgtatacattcatacactttgagcagcctatgtttgttagattttggatattgcattgcagtaatagtgagttcaattaccaaacgagacatgatggaacttccataaccagcatcaaaacttccaacctgcagacatcaactcaatccacataatcagtggggattagtaataactctggtacctacttcacttacacagtcgattcaaggctgaaacagaagctagagggaaaaccttaggacccgtttgaccaaaaatcgcattatcagctgcaattgttagatcgcagaccatgtgcaaaatgtgtcctcctccaacagcataaccagctacctgactcaatccaaaatcaaacagatcaaccacaagaactagctaatccaggattagtacaaagatgcatagagtaaactagcagtagtttgaaggtacttaccattgcaataactggcttgggcaatctgcggatttgaacctgactacgaacagaagaaggaacgtggaaaatacatgagcccaataaggatgaggaaacccaaactttttattgtcttgtccatcaaggacatacctgaagatcaagaacattaaggcggccaacgtcattgggatcagcataaccgtcttgtgttctcaaagcctgatcaccaccactgcaaaatgctttggttccctaaaccatcaatatcactatcagaacaatcgtttcacaaaaaaaaaaaaaaaaaaaaaaccagaggaatacaatcgaactctttgtcaattgtcatcaactcaaaagtaggatttgaccttggcacttacgagactcaacacactgacttaagtaacataacctaaatccatatttttctttctagagtccatcttcaatgttcatacacatacgcaaatcaactctgatatagttcttctattacattttattccttcatagaatttaactagcagatataaattcaaatactaagagctttaccttgccggtgagtatgatgactcctacagagctgtcatctctagcatcattaaacgcacgcataagctccttcacagtctgaggccggaacgcatttcttctctctggccggtttatagtaatctacataaaccccagaaacgaaaaactatgcaattcaaaacccacttcaccaaatacataactctctcaggaatatcatcaaacactttacaagcacaaacctttgcaatgccttcatcaagggctttctcataaataatgtcaacaaactccttgttatctccttcaccaaagaaatcagcttttttccaaacgacttcgtgggtcggaacttcaccgtgaaccttatggaatctatcatccatcgacgaagcactacagagttccactgagtcaacacgagctggactgaatccgatagggatgagatgattggtgatgacggagattcgtcggctcgccgagccaacctcattggaatccgccattggataggacgacgagagatagagaaagatgatgaagacgaccaaagattctagagcatgggctttgacaatggtggtgataatacatttttcaattgaaaaaagacaacaaaattaattaaaaatttcctaaaagaaggttcaagctttgcagaatcagaggaagtggacagaattgctttgcgctctgtctctttccataaaaacgtttttgacgatgagataagataaggcaaaacgcaagaaaacgtgcgcttcaattgtagttatttctataaatgcccttttatgcgcataatactcaaaattaatcaaaagtttaagatttgactctgtaaccacaaacagcttcttcgttatatgaaaagagttgtttcattcctcttgaagttattttccattcaaagtaacctctgatgtatcaactaaataaactctctgtttacagtttttaatgttaaccacaaaaagaaaaatccttttgtcccaaaaacttgaatatattgcaatgaaattatcaaattaacctagagatttacacttagagaaagcaacggagaaagcaatggctgctatcaagaacctataactatagctaaccgtctatgaattctctaactctgaagatacgcaacaacctgccgtgttcttgtaagccattacaagtgatctatgctaccacttctcatctcatctctgacttatcgctttcttttctggcttcttttctttgtaaaggcagcaatagatgcaggaatgcctatggttgttcggcctttcttacaaccccatttcactggcaaatcattgactatattgctgatatcatttgttccgcttaatcgcaccaactgctttatctgatcaaacatctgcagcgtcaatgccatcgacagatccaaagctatcgagtcatccataggtttcatcttaatgtttctcagtttctctttgaaggaacgcaaggacattgagtcaccatatccttcgcggttttcacacattgtatttacctttatgatgtgtttgcatagatttccttgcaaagaccaagtgcaatcacagaaagcaaactccgaacctgggttccacacgactcgtgttacatcgctatctctctgagactgaaccttcgctagaaggatattgttttcgtctagtgtaacagcagagtcaggaatctccatcgctcggtaccatgatgttgaagcaatgtattcttctttaacattctggaaagaatcactttcatcagcataccgatcaagccaataactagaatgaagttcagtcgtcagcttgtgtaccaaccaatctactctctgaagggcaccgaggtgtgtatcgtcaaacaattttactttcagctttatatggtaagcttctatcgcaccacatgcttcttggcttgcaagcggaagacttttcatagttgaaagccacattcctgcaataattgaagaagatatgaggcactaagaccgagtacatgtgaacttgattgcggtgttcccaaaggttctatataataaggatgagaaggtgaaaagttaaggccctaacctattttaggcaaccaagtggatgtgaaatactgcatgaacgcggtttgatcaacaaaatcctgagttaacttttctaaagcctttgttgtatctactccatcccaaatactgaacacgagttctcctaaacatttgaataaatctctttgaacctcaatgctatcgcacttcttcacaacatttcgaagccatgatctacgaacacgccagagagagaaaaggatggggcaacaaaatgtgtccctggaaacacaaaaaatgaatccagtcagttcacaatagactgtttatcctattttcgaagctttctacaaagttgaagaaccatcattcatgccttatgggatcagtctccgttgcagcatcgtcaatgataaagccattgattttgaaaccaggctcaacactctgggcgcgttggagtagtattttcatccacttctcaacatcagatttcaaatagctacgcgagataatccaagcgacagggagagcatgatgtcttgaatcaaatacaagaagcgtacacagaggatactgccacaatgtttaggagatcaggataaagcacataaatttcacaaaagcagagacagacataagaacaagatccattttaccttaagtctttttatcccaaaagtcgaatcagctgcaacaagactacaatgcccaaaacgcacaagctgctgcaactgccactccgtttgaatccccaacataaactgatccgtctccgaagattcctgataaaagaagatggatttcttgttgcgctcagcccatatcttgatactagcttgatcatctaaatccagctcatgagtggaacgtttgataatcatcccaagtttatgaacatactgagaggcaagactatcaacagttgcatcagaaccacaatacctctgaatcccttcaatatgtttctccaaaacgttttcttcaggaatcccaagatagatcatagacatagtttgctgctgaatctcattacatatataaggaatcttcttagcaccaggaccaatagcatctctatcaagaggtccatgacaaacaaacccagctttgttgacatgtcgtctctcattgtatataagaagcgcaagtgaaggacgagcatagagtcgtttaaccacaaaatgacatgtacatcctctcatagattgaggtctcgcagctcgatttctagtgttgagacgatatttcctactgggcaacacaccaccaccttctccatagttctcaggaccaaatgaacaccaataccttcaataagaagtaaaacaaatgaaacccacaagtgaaaaatgagatctttgagtaatttgaaactgaaatggaaacttacagtctatattccaaatactcgtcgctcttgtactctttgagactgcctcgagagcgttttcttcctctttcgatgtggaatcgtgtagggcactcagcgtttgagcattctccgatgatgaattcgtcgactcttgcgtatggaactaatgctacttggtcgtgatgctctgatgttccgaatttggtccaggtcaaatcagcccatgaaaagtcttctacttgtgggttttgcactggaatctcttctaatgattcgactatttccatctctgttttgggtgagctgtgcgactggacaggtcccagaaattagggtttttttaagagaggaattgaatttggaagaagaagatgaatattggagaggaaatgagaaatgttattacaaaaaagtccacgtattattatttattttaacagtcgcccttatatttctaatttgttaattttgtcctaaatatttaaaatgagcctaggggaaccattgtttttgctttttggtccccagcaaaatggctatatgtttgataaaaaaaaaagaacacataagtataaggatgaaaataaaacagatctttcatatgttgatcgttttt

SEQ ID NO: 29222 - DNA, 3153 bp, Arabidopsis thaliana landsberg
aataaggcacttaccattccaacaaaaaagaaaagaactagagacatataattgggagtcaaacctgaacaaacttgaacacataaataaatgcattttgcttcatcagttgcttctgccaggcaaagttgatcttgagaagttcactcttcttaacaccatattgggatgtcgataacgcggctgaatgattgaaccgtttatcaaatggaacctcaagtttttttgccaacttcttaccagttggatattatcggaaagcttcagcaaattttccaggaggtacatagcgataaggccggaaagggactgaccagtactgctgctgatctttctttgaggtgacctatcaacagaaactcatttaaaaaaaaaaaaaaaaaacagtttaaattttctgcttcataatcttttataaatcttacctcttgcaagaaatctgcaacattttttctatcagggcaagtaaatcccaacgaagaaaagaaatcaagaacctcgtcacgaggtccctggtatataatctgtccctcagacataaggataacatcatcaaacaactcgtaagtctcgggagacggttggagtaaagaaatgacggtggttccttcgagcgcatgagtagaatgcctcatatacattataatctgatgagtcgtcgaactatctaaaccatttgatatttcatccatgaaaaggactcttgctggaccaactaatagttcccctgtgaattcaattagcactggtcagtatctactggttaaatggtcaaacataaacaaaatcaagaatgggaagacaaacctgttgttagccgtttcttctgtccccctgaaattcctttaatcatctcatctccaaccaatgtgtccgcacatgtgtccaatcctagaatctttgttggatgtatgagaatttcagaaagagtttgaattgaagaaataggacattaacctgatagactttgcctatacttctaacaagtaagcattacaacatttttcaatactgttttctttgttttaaagatattgtttgatatatgaccaaaagttaaaaggctatggagaataccttcataacatactccacgacaaggcttgtctccattcccccgagagctaaagactgtggaggattggaaaaaccgttccgaatcaagaggatgtttggtgccagaaacagaatggaatatgttgcatacataattttctttgcttcattggattgatatcccccgttttggacaatgtacaattcgtgcaagcttttcccttcttgctaactccaaaagcatatctgtggtttcagtttgttgtataatgtcaaacaccaactcaaaccaaaactaatataatgcttcttagtacttaccatatttgaatccaacaccttgacaacgaccagcaaactcaagagtctgcctcactgtcatctccgccacatgccaatcctgttggctcacatatgcggacgtccttggcgcgattatctctttgagatcgtagccattgtacgttattttccctgatgtcttcaaagtaaccaaaaataactcaaaaccaagaaacaaaacaatcttctaatggttactaattgaattcggtcaccgacggtgtacctgaagattagttccaagacgtccagctaaagctaagagtaatgttgtcttccctgaacttggaggacctagtagtagtgtcaatctaaagagcaacacaaagaatctctagaccaaaaatagtaaaaatattaatgaaaaagcagcaaaattagatgtatataaattaccttgaaggtctaataacaccactgataccatctaaaatcgttaatttgttcctttttccaccaatcacatgaatgttcctcaacaaaccctgtaacaaaaatcttcttaattaccataattgctcacaacaacttaagaagatgaaaaaaaatgagtcaattgtttgtaattacttctgccatgttaatgatgaaattgggaattgttggtaatgctctgctttcaacatgaacaaatgattctaccatcagattctgaaatcgaacttcaatcttcggaaatttcaaatccacactgttcaaaaaaaattcactcaattaaaccaaaactgaatgattttgaactaaaattgtaagagagaattgagagatttacgcgtcgaatctcttcctaacacgagcgaagaactgttcaggatcattttcaacggaattcacaagacggtcgagaagaagacgttgttcgctagcttctaggttaccaatttggatctctttaggctcaccaaccatatctctgaaaatcccgcggcggattcgtgaataagttggaagacgttgtaaagctgcccaacgaagctcttcttcgtcttcgatttcgtctttaaacgacgtcgaacgcgagaatgcgttctccgccgagttccacattctccgcggcggcgcaacagaatcagagagagatgataattggagaagatgagggaagagattgcagtgtagatttggttttggtttgttctccctctatctcttgttctgtgtcgtcgtcgtcgtcacattaatctctcaccactagacaactggtaggtgaagccaccattaatgcggaaacttttctctctctctttctctctgtgtgtgtttttttttgtacgttaaagtgaaataacagttgagaagaagggaggctcattaataatcacttagcgggaagaaacaaattgtttattatttaggtctatgtggatataatgcaagagattatagtctgttttatgtggattactaaaaccgaaataaccgaattaagagataccgaaccgaaccagataatcataaacatccaaatagtgtagttcatcttttataacaacttggaactaaaccgaaaacggaatgagtattcgaactacttgaaatacaattgtatgattgtatctcataaaaggaaattatttttctaattgaaatttcaaatttatggtttatgtacaagaaattggaaccaaacaagataatgaactttaaagaatgataaaaacaatttaaggagatcaatatcttaatatcagaaaatattagtcaatgtcataaaaatcagaaaatgttagttatatttatgtttgagataatcca

SEQ ID NO: 29223 - DNA, 1972 bp, Arabidopsis thaliana landsberg
agttgcggtagtagggtatggaacaacgatagacggaacaaagtattggattgttaagaattcatggggagaggaatggggagagaaaggatacataagaatgcagagagggattcgtcataaagaaggactttgtggtattgcaatggaagcttcttatcctctcaagaactccaacactaacccttctagactttccttggactcgcttaaggatgaactctaaattaaatctctttatattaagattaaatagacattgacaagtttgtttatgatgattgtttttttttttaaatatatttctttttcattaataggttatggttttcaatgtatgaagttgatgggaatcgtttgaattcgttaaatgaataaataaatggttttatgtagtatatttccaatactaaccaatgcgacttcaaacgagttaattagcttcttctttttttgggtaaaagaagcgtaatgaagagtcatttgattctctcagtggaagttgaaacgatcaaagaattttggaaaattgcaccgctcacatcaattatgtaaagaggattttgtggcagtaacaaataatatgttctttttctccgttggacgagaagggtttcaggtctttgccccattctttgaatttgtaagattatcagtctcacttgtttgattccgaagtagttactttaagaatattctttcttggttaaagatgagttggatttcgttttcgtccatttctattttatgggttctatatctcactatggttttgcttacctttcgctgttgctatgccttatttgtttggttcgattttttgatgtttcaggcttagtataaatctcttatggataggataagtgggctgcctgatgagctactcttgagagtattgtcgttactacctaatgtgaaagatgttgttgtcacaatggttttgtctaaacgatggtttctttggatgatggtgccaaaacttgtttatgatgatagctatcagaatctcgagtatggaaagttttcacggtttgttgacagatctttgtttatgcgaaaggctccaggtatagaaactttgcatttcaaacttggtcatatctgtggtagtggagatactctgattggagctgcagagaaatgttgtgtgcgtaaactgattatcaagattgatgacacttcttctcgtagtagtaaaactgatcaagtcattcttccgatgagcttgtgtagtggggttcatataatgcttgcggacctgaaactacaaaacgtggttctggtggacgtttctactccagtttctttcccatccttaaaaaggttaaggcttaaatccgtgaagtacccaggtaatgaatttgtcaacaatcttatatcgagttgtcctgttcttgaagacttggttgtgaagcaatgttcagatgacaatgtcaccattttgaccgttagagtgccatctctaaagcgtttatccttaatacaaagagctgaacttgaaatcgatgttcctcatgattttgtgatagatactccttctttggaacacttaaagatagttgattatacgtatgggtctcgtgtcattaagagtactatgaataggattatcaccgcaagtatggacattttttctccccaaactaaggagattttgggctctctaactacaaccaaacgtctttttctctgcttaccaacttcaaaggtaacatgttgtttagtacacattatttgttttctcttttggaaggataaaaataaactgtcactaatcgagttctcttatgatcaaaactaaattatgcaggatgcttatcctgttggtaatatatttggctctcttatacatttaactatatgcacatgtgagacagaatggttgaatgtacttatacgtgtgctcagagattcccctaatttaaaaacactcaaaattgaacaggtatgcacatatatttccctttaatgc

SEQ ID NO: 29224 - DNA, 2630 bp, Arabidopsis thaliana landsberg
catttatttggtttgcctaattctctgtcttgttactttcatgtggtttttgtttggttacctaattgtccatttatttggtcaatgtgaattaatatttctttcttaagatagtcaaatacatcttgacctgtttagtagatgatgaatattttgcgattttttactaaaatatgcttattgaattaggcaatttattgaatataatatcttaacaaaacttatcatatataccatttttatttgaaatatagtgttcttttttgaaaatactaaaattctagtgtatgcaatctaaaggcaaggatttcttcctatataataaaaaaagaaacaaatatataggattaaatagctgattttattactttttgttacaccaaggtttaaatttatgggccgagcccataacagtttcagagataacccaatagaagataaccggaaatggaacagatctagatgtgttgacaaattataccaaaacaaaaaacagagcatgaatcatccggatgtaagtagattttagtcttaattcctagaaaaagagatgttcttgttcagaagtctacctgttattctaagaataggatgattttaatatcattgacgtcttctaactactctaacttcacaagtcttcttatctctttgactgatcctatgaagctaagaacttcatacatatcggaggttttactccggcgagggcaagcaccgccgcaggtaaagtccaaagcccttcgccacagattagccctgaagccaccgccggaaccataaactctgctttcttccgattcatcttctcccaaacaaacacaatcaaagtcccaacacacatgtcgattgcgaaataagctccgacaagaaacggaacagccatcgccgtcggaagtggcatgaatcttccaattttcgccggagtaagatctctgacgacgttgactaaaacagcaaacccgaaaaacccgtaacacatttggagacagtgaagaggcagagcagagaagccttgcaccccaagaatcgccatatttctgtaaatcaaagcgtaaggagccttgaattctccgttagggtttccaatgtcgaacgctttgtagaacaaaaagaaacttaacggcgtcacgatgcatccaacgaccgttccaatcatttggctagcaaacatagccttaggtgacgtcatcgtgtaatgagccgtcttgaaatcttgcatcaaaatacaagaaaccgaaacaacggatttgatcagtccacaaccggcgagtccggctacaactccgttctctcttcccgtcacagccgcgatgacaaaaagaccaattttgccgtagttataagccatgttaatgtctgtaagtccagctccataagcgttacagaaggccagagaaggcgcgaaaatgtaagctacaataacgtaataccatttgagctgaggaaatatcagaggaaccacgacggttgagaccgcagcgaatgtaagatatccggaaactgcgaaccacattgggattttatctctgaggaaattctcatcttccttgagatctttccgttgtttcttgtgacctacgtcatctagatcattaggtttgttcttcaatcttgcgttgacattggcaatggtcacaaagaggatcttaacgaaagtgtaaagaccgtcgccgaggattagagctacggataagaagactttgtagccgtaaatgctcttcatgttgtgttcgtcgagattatcagggaaccaagagcccttaagtttatcaagaagaggccacattaagccataagagaggatagctcctaaaagcaaagaaaggttaaccaaatgtgaacaaatcattcctgctcccacaaatgtcatgctgaaatcaaagaagaacctaccaaaaaaaagtttttagttattatatgattcaagaactcgtttcactgaaatatttttgttttgtttttgtataattaatgcttacgtttgtttccaagctttcaaaccaaaggttgggaattgagcaaagccacaatcttcaataccagagaaaaaccactggaagaaaccccacaagaaactaaatgagaagtatttcatgaaaccacgcacttgtttcctgcaaatcgattccaattaaagattaggaaacttatgtaacaatatcactttttgtaaaataggttaatgaacttacttggcctgtgcatctccttgtgtgtggaagccattgatgagaaccgcagtagctaaaccactcggatatgttaatttaaggtcaacaatcataacctttcggagagggattaggacaaaaagaccgatgaaacagacaacaaagagataagcagtcatccaaccaaggccaggttctttcacactctttggagagttaccttccaagttcacaccagacaacacatatgtcttatggtttaaccccagaagatatgaagcaaacccacctgaaaaagaaaaacaaatactcaaatattttaaatcaaattttacaacttagattttatatcataccccaaagccaaagcaatatcaaccccttttttggtgactcaactaaaccccaaaggttttttaaaaaagttaatattttttttagtatggttgggaaccg

SEQ ID NO: 29225 - DNA, 2768 bp, Arabidopsis thaliana landsberg
tctatcataactcctagttgttcctttatctagacccttctcaactgagcgttctctaccatgacgttccaaggatttgtctcgtgctttctcaacatcatctccacgaggtttatcagaacgatcgactctttctctgtggtctcgatcctgtctttcataacccttatcctttgatctatcttgatccctatgggtgctttggtcatcagtaactgttttgtttaaatccaatcgggcctcgactgatctatctcggtcactcgatcgaggctcactgtcatgctctttgtgctcagcatctcctttacgacgtttacttatcctttcactatcttcaacagcattagctcgtttttgtaacctatcactggatctcacagaagtgacaatttcatgcctaggggaatgaacagtccgagaagattgcttttgtgcatccaaagcttcagcgccatcatcttttactgcttcagaaattaaagtcagaataccttcaacttacattagcttctacgaatatctaatagttttgtgggtgagatcaaacctttggacgacccagtagctatgctaccattggctgctgtgctggaaagagctttggtcaaacctgattgcctgctctccagataattaagatctttgtcagctgtggatgttcttccaatagctttaccggactttccatcatcttttccaaaatcttgctttgcagatttgttcactgacgcacctcgtttagaggaagcttttaactgccagccaaaaataattatacataatacaaagtttgatccccaaaacttcctgaatagctgattagctgaattttttcagctaccagtttccaacataaaaagggtgaaggcgaagagtgtagattgtagcatattgcatcatattaaacaattgaccttagagctctcactcacaacccaggtcccacgtgataggttaaacacattccttatgtctacccttaaatcaggtatccccaaaatataaattctaagcattacttcccctaaatcagtcctttagaaaataattaacaagaaagtagaattggctctaccaaacaaataagatagaatgggcaggataactttcctacataatttctgtgaacacatactagtgacaaaatttggtttcacaaataaagtagggattggtaacctaagaaataaaagagaaaaaatagcatggccatacctcggcttcagaatattttgaagcaggtttgacaggattctcgtcagatattctgggtgtttcatctgtttccttttgttccattgacttcttagatatggatggttgggaatccaatggattgcctccctttgattttagatgtccttgatcagattttgaaggtatactttccgttcttccatctagaggtttagttttcaacatctggtccttgcccaatccaccagactcaggctgctggttaacagtagctctttccccagttggttcaccttgggagacaccaactaacaagccattctgggaagaagcatgttttggagtatgtactggcggagcctttagttcaaggaagcccatgctaaattcttcgtctgtaacccaatgtggctgcaaataaacgacattcagtgaaattgtataaaacactgaacatgaaattgctatggttagcactcacttttcttgcagacagagcagccccaacaccagttgctaagaccttaaggtcctctcgctcatcatttttaatcttggctacctgaaagaccaaaccaccaaagaaaggaaagattaatcttttcacaaaaaaaacacagggaaagatagaaatcacactaattgaaagcagattcataagaatagctcgtcaagaggtacttgcccgtttctcaaggtttatcccagttttccgagtaactgggaaaacaccagatatttttgttaacataataagggcattacgaatctccatatactcattagactccagacactggatcaaaagtcgtgtgattcttccactccatttccaatgtacctttcagatcaacagatgaaacagacatgaaacacagaaggaacaagactttgttaccattaattgaagcagaacacgtgatagctaaatactgtagaagacagttctagagtttatatcacctaaaacttgagacaagttaaaaagtttatacgactaaaagtaatagatatacaagtcagggatcagaatttcaaaccttcacaaattgtccaaatgtgacacgctggctgttcgggtatctataataaacagcaaaccctggcatgtttccgcactcatgttcatagactgattctttactctgagaaaagattagaaacaacaacagcattagtaactaggttagaaagaaaaccccgattctatactttgattgtcaaagaataataatattcaatagttaccttccagtggtatgcaatcttcaaggtctcaaacaaaaacctccccagtcttccaacttcatattcagtacagcagcagatcattggttgcagcgttttacatatcaggacatcaatgtggttgacagtgttaaaaaagggtgttccaagcgagtgaagcatatttacaaacatcgcgcagtacacagaatctgccatgctaaatgtgcaacgagggaaaatacaacgctgcaggaaccccatattaatcttcaaagtatctggacaggagctcaaccatgtatccttttcacgtgaaagccttttaccgacagaagcca

SEQ ID NO: 29226 - DNA, 1723 bp, Arabidopsis thaliana landsberg
tataggtcttattttttttatgttcaagagttattatagatcattcatttttttttaaaaaaaagttcaatgttttcgcctaattctctcttcatgtaggcacaaacctgtttagtggggagaggaagtactatattgtaatctctcgggggcgaacatatattaaaaattgacgataatatatattatcataatattgtggtaaaatataatggaccataaacgtgaatgaaaatctatatttttggaaatcaagtaaaccatcgccatcgtaaccactgtcttaattaaggaagagttcagtgtcgaacatgcactacacttacgtccgtcagtttaattttaaaggtgtttaaaggtgttagcaaccaaagttaaaaaccttttttggtcactctttatctctgtagatttttgttttctttttccatttcttaatatcaataattatcgtcaatattttttttttatgcttaactaaatcttctaaacttaaggtcagagagatttcctttctgtctacaattggttcgagcgattaattcccactcgtcaattgctgaagttttttttttggtgagtgtcaattgctgaagttcatggtgtcgtttctgatagtggcatttggatcaaatcttttatcaacttttcatgtcgttttatcctaaggtcagcaatttttttggctgactccttagctaagcaagtcttatcgttgtatgggtcaagtttctattgagtatatatatatttgatgttaagaaaaaaaagaaaaaagtcagagagaattcacatatggttttttcgacgacttgatcagcatttcttttaaaacgttagcaaccggaatttaaacttttgttgggactctctacttctaaagacttttgtttacttatatgttaagcctatttccaccattttgtataatatcaactattgtcgtcaataatagatagcttagatctttagaattgattagtaatataatatttttccattttattggcctgtctattatttttgtgttatgacagtttgattaatttttttttgtgtgtattaaatcataggaaaatggagagcttgacgatgctccttatcatgggacacttcatacaactgggagtttcagttattccagtttctaccatttatgtaagtaataataaactttcgcttttatttattttaatctctattttttttgttacatagacaaatgcgattctgaaaaatataatttaattgttttaatttgctatttgtctgaaaaagagtcctgacggcgatttgattgattgtatctaccggacggatcaacgagccttcgaccacccactcttacgaaaccatattattcaggtttttattaattaagataagtttcttttatatgtatacttttgacaatatgtatatttttacaaacttaatcatttattgttttaaacaatttatgcaggaatatcctaccaacatgccacaaatagaaaaaagcgtacaagaaaattggcaaatttggcacgacaccggagaaaagtgtccggcagagacgattcgtatgcgtcgggaattgaatgcagtttttcaccaaaagcagcatgtacatgttgcaaaagagtatgaggtggccaacagagaaactttagggcacaaggtaattgagggtatattattatttttggtgtttttatttaggcaatattttgaaatccacatt

SEQ ID NO: 29227 - DNA, 2228 bp, Arabidopsis thaliana landsberg
atggaaactcctgtgataggtaagagatcaccaaaacatgactcttttatattgataatttgtgtaaacagtttgtttgatgataaagattgttgttatctttgttaggggtaatgaagatgaatgttcaagtcatagtagtcaagaagatgtggaattaacgaaggaggttaaggtagatcggttagagcgtaagtcgaagagcatgccgagtgatattctcgacattttggatgagaaatcgaaagaaaacagtgttgagaatgtgcagtttttatctgatcgtgaagatgatagtgatgatgttccagtttgggagccacctgaaccggaaaatccagaagatgaggtggatggtgtttttgctgatgatgatgatgattgttgtgatggttctaagtggaacaaagcaagtttgttaggggagttgagtgatgaaagtagtgaaaagagaaaggtttatgaagaaaatcgaagagtgatgcttgaggaggctgattcaaagtttaagttcattgttagaaagcatattaagtcgtctgggttttctattgaagaaagtggatattggtttgagatagttgctaggttatgctgggaggctgcttctatgttgaagccagctattgacggcaaatcagttgatcccactgagtatatcaaagtgaaatgcatagcaactggttcttgcgttgacaggtataacaaattacccattttttgcttagactttgcattgtttgaggttctttgacccttaaaaagattggagaatccgccatttaccgttttaaaaaaaaaaaatcagtttctatctactggtactctcttaagacttgttcacttttgcagtgaagttttcaaaggcctggttttcaaaaaacatgctgctcttaaacacatggcaactaagtatgagcatcctagaataatgttagtcgaaggagtactgggtcatccgataagtggattttcgtctctccaatcagtgaatcaggtgggggaagcaacacaacttgtctttcactagtttggaacctttcattttattagtttctgatttattttttattattaccaacaggacaatgagtatctactgaagtatgtgaagcctgttgttgatatcatagaagcttccaagcctgacgtgatgctggtggaaaagtctgtttcacgtgatatccaaaagactattcttgataaaggggtcactctggtgtttgacatgaagctccaccgtctacagaggatttctcgatgcattggttcaccaattctttcagttgactctctgtctagtcagaagttaaagcattgtgattcctttcgtatcgagaaaattgtcgaggagcataatgccgcgggtgaatccgacaagaagccaactaaaacactgatgtttttagagggttgccctacccgccttggctgcacggtgagttcttgactgattgtgcagtatgataagtcattaatgctactagatatctctactttagtaacaatatatatcaactgatgaatttatccaaaatttgaacttgtgaatctgaccttaaactttcttgcattctaattttgacatttgatatgtgacagattttacttaaaggatgccacagcgagaggttgaaaaaggtcaaagaagtagtacaatattcatttatcctggcatatcatctaatgctggaggcttctttcctcgctgaccggcatacaatgttctcaaccatctttgcaaaagaagctacatcatgtgttgtggaaatagaaaatttttcaccatctccttctcctcgtgaatctccctctgaagcagttgatattcctgtgtctaatggattcgatgaacaaactattcagattaatggggaagcagatggtgagaaagttggaacttgggaatcagatggagatcatgtgttctctcacgagccatataatccagttatttttactgggttctcatctttatctgccagattaagtaaatatttaggctttgttcaaaatccggagtcagttccagtttctgtggatacagatgtatcgactaccagcaatcttgattcgattagggaatctgaggaagacactgcagaaaagaatgaggataaacaacctcttttacttgatcctgagctcccagtaaactcgagttcagatgatggagacaacaagtcgcaaacggaaaatgatattgagagcaccttggagtctcagag

SEQ ID NO: 29228 - DNA, 3416 bp, Arabidopsis thaliana landsberg
  unsure (1)..(3416): unsure at all n locations
tggtgatgtagggggggggctcatggaacaattgttcagaggttgcaggtgctttctagagtatggctcgaacgaaggccgagtcattcgatccctgatagaagtcttcattcaccgccgcctcggcgacttcggggatatggttcctcattgtctgaaacctcttgaggtacgaccgtagggtttcatcgttctggcacctgatggatttgaggtcccatggttgtgccggcttgtcagagagggactggaaactggcgatgaaacaccaactgaagtcgctccaatcgttgatgcagtgccggggtagatgtcggagccactacaacgcgtcttgccccaggacaatgggcaagtacgccgtcatcacatcttcggttgccccagcagctcgggcggcagtcgtgtagacggccaaccagcctcttagatcctgcttaggctcgtacttgtcgatgttggagactttgaagttagggggccattgaatggccctgaggcgtggagtgagcgccgatactccacacgtgtcctcctgtcatcgatgatgacgtctgtcccagggaggaaagttgttgtcgtggtgtctcgaccgtcctcgggttgtgccaccagtcgaagccgttgccaactcaattctggtggtctgactgttgggggccttcgtcttcagaacgtcctccaaacatgatttaacaatgtttccggagttgtaatatatgaacatggtaccttcggattagaaccacagtgtgagaagcacgaacaatacgaaaattgatgcagcgccgaagtacgcgcaaggaagcttcggcatgacagcaggaaagggaannnnnnnnnnnnnnnnnnnnnnnnttagacctcgatgaattaccttatagtcattaccaaatgtaaagggcatgaatgtaaaattgtatgggctgtgtcccgtgtctataaataggtgaacagtacccccgtactgttcacgcggatttggcatttgcttttgcgtcacacctgtactttcatctctttccaagctaaaggtacatttgtaattcgatgtcatttctgtttctacataatgataatgcaaaaataagttaataataatatacaatagtctatgttatccttcatattccttatgattcatccttcgtcaatgtatagtgtatttatgaaggtatgcccctcataaccttcgtccgaaaatcattatatcctaagggaaataatgcttcgaaggacgaaggactttaccgattaacattttctatgttgccttgttcttgactcatagcatttgagaacaagtccccaacattggcgcccacctccggtgaactcacttccactctttgagttttttgaacaccttcggcgatcataaaccttcgctatggcgccgaagaaagcttcagcgactgggactgcaactctgcaaccgctggaccacaatcaggagacagtctcccttcgggaggcccgaagccagaaaaggaaggttgtcagcccgacaccaccagaggacgagatagatcaagaaatcagagacatggagatacttcatcaacaggtgcagaggaagaaggaaaagatggtctggctagctgacttacaaaggcagatagacgaagcctctgaagaagttcgtcatcttacgcaagatgagcagaaccggagccccagtatagagagcttcaccaagagggcttcgtcaacgaggatgactggtatgaggatttccatcatggaaattttgcttttgatgatgcttctcctctgtcagcagaactgcaggctacaccttggcccccgtcttacaaaccaccccagctcccaatgtatgacggacacttagatccgaagcaatttctgatgaactacgaagcaaccatatcttcatatggtggcaatactgcagtcatggcaaagtcctttgtcatggccgtcaagagtgttgctcaaacctggtactcctctcttcggccagggacaatcacctcatggcagaaactgaaggatatgttgatacccagcttccaagggtttcagacgaagcacgttactgctcaagcagatattccagtgtactcaggacgacgaagagtacctttaggcgtatgtccgaatgtttctgcgtctgagggcacaggcgccaacagtgcccaatgaaattgtcattgaggccatgattaagggacttcggccgggaccttcagcgcaatactttgccaggaagccaccacaaactttggagaagctgctccagaagatggactagtatatccgagctaacaatgacttccgccaaagaagggaggaggcattcaggttctctgaaatgaccaggggcttcggaggaagatttcatccgaggcacgtcaggtcaattcacaactccacccaaagtgatgatagagggagccaacagtaaaggccacaatactcttcgcaagcttcggggcagcagcaaagctcttttcggccgccagcgccaaggggcagaggcgccaggggcttcgggggaagatttggggatcaaccaagaaaaatttactgtctattctatggtgaagacaagggccataccaccaggatgtgtcatgttaccatccagaagcaaaaggagatagcagaagctgcagcacaacagagtcagccgaagcaggtcatgcattctgcttcgtaccattcgccttacattccagaatatgtaggcaatcactctgcagcttctgttgcttcagcaagccaaccccaagcatcttggcaacaacctccaccgccaccaccaacacaacgaggtcagcagccagaagggagtcaacacactcaccttcagcgggactttagagaggagtccgaagctcgcacagtcaatagcactgtgccagagtcaaagcacatttactgacaaatatcctacttcctaaatgcttttatattctaggttattttgtttttgaataaggaaaagcaatgaaaacttagttttatttttctagtaatgattttgcttctatcataatgaaatatatcttcttcacagacttacgaagctcaaaagttacgaagctcaaaagccgttcctaagggaatgcagagctaaaattgacaaagctacaaaaagtcgttcctaaaggagcgcatcgtaagttttctgctcaaaagtcgttccaaagggaatgcagagccaaataccatcgaaatataaggcgaagaagttcaaaagtcgttcctaaggggatgcagaacttataccgccaaaatagaaggcaaagaagttcaaaagacgttcctaagaggatgtagaacttatatcaccgaaataaaaagtgaagaagctcaaaagacgttcctaaggggatgcagagcttgtgtgttccggtgtgggcatgtgggtgtgtgttttcggcatcctc

SEQ ID NO: 29229 - DNA, 3013 bp, Arabidopsis thaliana landsberg
  unsure (1)..(3013): unsure at all n locations
ccataaattagataaaaagactcaatcaaataagcaatgtatccaaaattcttaaagaattatggatgcttccgcccatcgaatatcatttcctgcttaggccttaaaaccactttgagcgttgaatcaagnatctgtacccaaattagagaagctacaagcatgaaggttttgttatgagtttaaaaacaacaacaataacagacaccaaatctttctatttcattatcagtagtggcggggatagcactttaccatggggtcaattgacacccatgaatttctaaaatttagcttaatttatttagtcattgatatattgaccccattcaaaaataaaatttgacgcccatcaaatcttaatttaagaaaaaaccactaaacaaatattatatatcaaaacaaattagtaccaataaataaataaaaataaaattatatgttttgatgattttgctcttatattataaagagaaacatatctcatttatcaacttatagtagattttttttctttacaattgcattcgttgaaagaaacatagatgaagacaatctataattagtaaagcacatgcaacatgtaagaaagtgatgagatcaataagcatacctgaacatcatcaagacaatcagaccaaaaatattatgaaaggagcctataacataatggacatgaggatgtaaaaataaataaaaataagtccagttaagtacctagggatcagagttacggtcaagaccacctaacggccgttcaaaatgagtccaatcttgtctgaccctatcctttctaaagggctttcgaaagaaagtaggttctgctctacgtctagcatgcaggaatcttgaggctgtttctgaagcagggttacggacgattttcttgaagagaaacatagatggttgtgctctgcgtctagcatgtagaaaacttgactcaacaagtgtattccgggcactgactttctttagttgagctttaagcaacccaatttcattttcaagagaatcaacacgagcagccaaatcttgaggaggagatggaggtaattcaggattgagctggtggaccttctacgtttgacggagcctttaggacaattcaacaaaggcctttttttcttcttcttgttggaaagaatcttcgaagggggaggtacaacttttttaaccttaacaatgtcaatgaggtctaaagacatgacgccaccaggccattcacactttccaaaaacataacctgtttttatcttctctaacatataagacaccttcttgtccctgacttcatcatcccactcatacaacctgtcatcccccatttcgataaaagactccacagttacctgcaatacaatcgaaattcttgacgaaagttggaagctacaaaatggtgaaaacaatgaaagtagaatcatacatctggagcttgttcaactgcatgaacatcagccaggagacgggattgacgaggaatccaggcgttatcccagtctaatataactgtatcgtccaatgggtctgtaagagcgagtgccagagccggaatattcctataggctaagagttgtaaggcaagagggaagccacgcaaccgaaaagacctttgttgtaggtgaccacggaatgctgcaaggtcagtttcaagattagacccaaccgtcctcggaggaattagggatttgatggttttgttaaatgactcccggccccagggaaatttaagaaaagagtcaacgtcctccaacatttgaacatacttgtatgtaggacgagcgttttgtagggatgcaattaggacaccgtcgattataaggagaagagcaatccggagttgaatatcaccagatgtcagcggcaagcagaaagaaatatcacctaaactggagagccttgtcttcccaatcttttggagccaataatcatcagcttcttttgggatctttggctcgtaatcaggatcgtaatcttcagagaaatccccacaggggagacctgttacagaagcgaactcagcaagagagaaatgcaatgggtgaccaccaaaaactgtccacatttcatgctttctttttgtaactaattgtcgacaaactagggcatggatgagtttgcacgacagagaacaccgttgaacgagaagagaaaacagaggaccaaaagcagaatcaagaatacgattaaactcatgtgtcccttccatatgtttcttaatgaaacatagataatcaaacttggaatatacattaagtcgagcgtctgggtaacgtttggttccgtacaaccgtggtggcaaatcattatcccaaaaaacgggatcaagaaaagcagccttgcctgaacaatttaaaacgttgtttagttatagaagatgaaaacgacagagaagagtgacaaaacgaatctaggttaaagttatttacctgttaagctagcgactggtggaactacgttaggatcttcggtaatttcggccatttttgacagaaatgaagggagaccacggaagaattgaaagaaaataaccgagtatggtggattatggcttttaccagaagcgcacttatttgaatcgaggagggtatgttcaagagatggtggataaggtaaaaaagagtaaagtgatgaggaccggttagggttggttttcggttggacgactgaacttccgccaagggtgttacggtaattgtaaacgcggaaaagatgggaataagatcaaaaagtgtgccagttttgggaagtgttataaatgattaaaatcttaaataaagtgtcctaacatgcaaatattttgtattttagattggttatagacaacatgtgaatttcgggtatcaaatatgtaactcccaaataaggcgataaagcaggtgaaaccctaaattgagctttgattctgcttctccagcaacggcgctcttttgccaattgtcggagaggccatctctcctttccctttctctctgtttgtctccttctccatctagcctttgttgctccaatggtg

SEQ ID NO: 29230 - DNA, 2529 bp, Arabidopsis thaliana landsberg
ttacatgaacgatgagctaataactcctctatgttgcatggaaactctcgtagaaaagttcgttctttccaaacgtttctcattcttgttatcattatgtgtacagtacaacaaaacacataatagtttaatacaacttaaactccaaagagttatatatgaatatctcaacaacaaaatactaaatcggccagttttaattaattacatgaccccaacgaagtcacctactatcatctctgtaacactaaagttcactgaaaattatctacaaacttcatcttcgtttacatgaaatcatcattttcagatctcatcaaggtcactgtctacatcatcatcatcattcggagtctcgaagttcatcataaacctcagtgagtctccttcctctacttcccattgcttcttcagcgcattgatcgctctcgaagcagctgctgcaatcgccgggttactgtcttcagcgagtctctgcaaaaagggtactttaatattttatccaaagtccatcactttgcaagaatggtcatcaagattttcatattctctattacctgtaatgctcccatgcctgcatttcctagtgtccacattgatggtgccgctgctaaggcattagccaacgcttttctacaacaagacgagaaataaacagagggatctcaaatcagaataggaacacacaatgaaatattcacctaagagaatgttaagcgaagaactcatcgaagaaagtagttaaggaacgtaatagaatgctggtgttgaccttgtattgacatctggagagcttgagcattcagccaagagagatgcactacttttaccatccattgcatcaaggtcaatcagagtcgtgactaataactcgagctgttaaaaccaaaagaatatgatcacttatgaaaacactgtaacagaatttttttggtattgacaatgttggaccatacctcttcggggtcagtgtagtcaatcccatcggcttctgagagcgctgatgccatactcttgtaagcttcctgttttcaacatcaaaaaggaaccattagagagaacaatacttgagaaaacatagccttttcctggtgtatcagacctcaatagcagatatgcgatcagatgaaacttccccagggaaaaacccgagagctattccattcttctcaagcgatatgcgatccgtggtaccggtttcagatgtcagccttagaataacaattttaacattgagatcttgatatcaagaaaaagaggaagtgacaaggacataggcttcttacaagctgtcaagcattttgttcaccatcatgtcgtggatgttcttaatgaactgcaccaaaacaggacagaggaggtgttaccatgctggaagatgaacaaaaataccaagactttgtgtttacctctaaagccatgaatgcgtcttccatggctcgttgtttagcacggaaatctgctcgccttaaatcagcctggaaatcagggaaatagtatatcatccgccaattctcccgaaatacttttgagttgtcacttttatcatgtcaatctcagatagtgattatactttatgatcacacataactttccacaagtaaaccaagaatgaggcagatgggcatacctctaaggcaccatcgctccaatgcttatcagcagcatttttcaacttagactcagctatgttttttaatatctatgaacataaaaaccaaataagaaaattaagacaacaacaaaaccagaagagtagtgagtaaatgtgcatatatcaatgaaggaataagctgcatacagtagcaatatgatgaaggcgctcggcctttctcttaacatcacgatctattttctctgtatcttctcttgctcgagctacatcaaaaacccacaaggcaagttaggaagcagtaaaagaattatatattagtgtgaaagagaaacaaatcttaccatcgagtttaaggaacccggacccaagaatggcaacatcctgtcgtgcacgagcatcaagcctcatgatgccactgcaaacacacaaacctcaacacataagaaacctccactaatgcataatttctagatgatgtaaccgttggatacgcgaaaaagtaccgagatagaagaacaaagtcattacgagcccgttcattcacaaacttcgcatcattagacacatattccaccaaaagttggcttgagttactactcttcctcctcggcatcacttgcttctcaccttctttttgtacaacttgggaactaacacaacacacaagaaacttataactaagtatgaaacagaacaagacaagttcgaacaatgaaagctaagaaaattgggcttacttagtttcagtgtcttgagattttccaacaaagcacaatgtagaacatctccgagaactaacaagagtgacagtctttgtacaacaaagaccttgctttaactcttcaacagatgaacccttattagcagctaaaggatgatgaacatacgccaacagaactcttcgagatcttgaa

SEQ ID NO: 29231 - DNA, 2012 bp, Arabidopsis thaliana landsberg
gagtgtaagacaagttttgagtttataaagaaaagtgatgccagctacaaaacaaaacaaaaaccctattgaatatatgattgataagtttggggacattggagaaaaacaaattgaattctcttaaatatacgttaggccgaccaaaaatttaatttagaaatacgtatatatctaaaaggaatgtcttttcagaattactttcttgttttaaagtattcaaacttttcaaaattaattttgtataatctgaaagtaaaaaaattattatcaacaagacaacaacatgcatgatatatagtgagtgagtgacgatattcacactaacactacttatttttaataattacgtactatgtattatcataacgaacgaacgagcataagaatattattaatttaaacctgtgaaattgttttgagacaaatatatttgggatctagttagaaaatggagaaaatcacatgatgatgagctcaggtccaaatttattgaaacatgaagcaataaaagagacttgcagaagttaggacctgaataataatgatgacttgcagagtcactggtcactcttattattgatagtaataaacgtggacaatgtcaatgtaattactgttaatgatgtggtccttgaaaaacattaatattggaacgccgaaagctcttgatttccctgccttatgcaagggaatgcaatgcaagtcgtgttacttgaatgttctttcacttcgtgattaaaaccttagatgatccggcttttcattaatagttaaatagtttatgtctagactaacttgatttttatggaaatgtgactaccgtacgtaatcgactaatcgctgactcggatttatttgtttagtaactcgttactcacggaagtaaaaacacacacacagtaattacaaatataacaagctcacgtgtaaataaccgtattgacgaagagtatatacgaaataatcaaaaataataaaatcgttgaactaaatacatatgtttcttcgtagaactttgattagacttggtagtactgagagttctgttgtttagcgtaattaaggatgaacgtgtgaggttcgtagaaaacgacttccttatatgaaagttaggctcgacacttttggaaaagagtgaatgggagagattccaatccgatttgattctattgtatcctgtccttttccactgaattgtagttggctgggaccatatatactcgactgcgatattattacatcgtatcttccagtactgtataaaccaataaatagtatctgacaaagttgatctggccgtatggtctcaaatcatcatcaaagtcagtaagtcaccataaaacccagttagggttcgaactcctttgagaaagttgaaaggaaaagtggtacagaaccaccaaactagctagatgacccgaaagacaaaaacctatagtaatagtattgtttcttctacttattacgtgattagtactctttttttcattgattttttgttgctatagttctacttgccctaatttttccttgaattgctaatttcaatgccgacaaaaaaaaaaactgtagtatttttttaggtttgatcaaagtgataatattccaatagtcacggtctagtaattaaagcaaagttaattccttaataaaatagtttgactttctaagaatcgttcttttcttttctaattgtgctttaagggtcgtcattccacaagataattaaattaaagtataagaatatacgtgtacggtgtgccacaacatcaaagtgaagaagcacgttgaaaattaaggtcgaaacaaaactgtagtatatgattatttaagtcgatgtcctttttttgcttttgtatttgtcttcttataacgagaaacagagtacaaaagggtatgggattatataagtcgatgtcttttggcccataattgagtcgagatgttgctgaccttaataaaaagggtatgggattattcatttcatctaggtaagtactacataggat

SEQ ID NO: 29232 - DNA, 2540 bp, Arabidopsis thaliana landsberg
ttcgagtactgtataaaccaataaatagtatctgacaaagttgatgtggccgtatggtctcaaatcatcatcaaagtcagtaagtcaccataaaacccagttagggttcgaactcctttgagaaagttgaaaggaaaagtggtacagaaccaccaaactagctagatgaccggaaagacaaaaacctatagtaatagtattgtttcttatctacttattacgtgattagttctcttttttcattgattttttgttcttatagttctacttgccataattttgccttaaattgctaatttcaatgtcgacaaaaaaaactgtagtattttttttacgtttgatcaaagtgatgatattccaatagtcatcgtccacgtctagtaattaaatcaaagttaattccttaataaaatagttcgactttctaagaatcatattcttttcttttctttttgtgctttaagggtcgtcattccacaagataactagattaaagtataagaatatacgtgtacggtctgccacaacatcagagtgaagaagcacgttggaaattaaggtcgatataaaaaaaaaaaaattgtagtatgtgattatttaagtcgatgtccctttttttttgcttttgtttttgtcttcttataacgataaacagagtacaaaagggtatgggattatataagtcgatgtcttttggcccataattgagtcgggatgttgctgaccttaataaaaagggtatgggattatttatttcatctaagtaagtaccaacaaagattttcttaataaaagcatctttaatctttattagtatcaattattatacagaaaatcaatgtattttaccatattttgaatctaaatagatacatatttcttaagaatatccgaagaaaaaaaactagactaaataactgaaaggatgagtggatgactaaaaaaccaaggcggttcacagagttgagtcatcatcttaaaataaatatctgatatatatgtgttaaattgacaaacaaaaatattattaaattttggattgaattatggctttgccatgtacaacatatgttagtgatttccacgtgagtttcttggctgtttcggtcctttttcttcatatgtttagctgcgtcatcaacttgcctttttcttaactttggaaaaatgcaaaaaagtacattagaaaaagaccccacctcaattcaaatgctaaagtctgtgaattgtcaacgttcattgcacagattacttatcctatgaatttaagaatatagtacatctgaatacactgtaatcttaaatgcatatatttagtagtctatgcatttaatgtggatagcagataaacatagggatcacacacactgattgttacgttacgtataagatcttgggcctgcctttgtataagtgaaacagtcagatatcacatgaaggcccattaactttagggagaattaagaaacagagagaattcgaagctagagagctacgcgtcgagattctttcttgctgaataaatcaatcacacccgccggaaaaaacagtaagagcataggacttgccggcggtaacggaggaatctgagctctacacaacggacacttggacatttcactgagccatgtatctatgcaatccgcgtggaaacagtgacggcaaatcgttaatcgcctcatcttctctccttcctccgcctcttgtagacacacggcgcagaaaggcggagacgaatcatcgtttgccgccgctctccaccggcggaacgtaaaagtgcggtggcgataccatggacttatgatgatcaaagtggcgaatcttacagagaagacagcaacggaggtaaccaaaatagaaacggttatatattcgcaaaatctatacacagattgagtcaacatcctccaacaaaaagtattaacaagtgattgaagaaagaacgagagactcttcttgtggcgtgtgtgtgtaagaaacctacgtagacgcgtgatcatataactacaagtcttttgtgaatgaattgatgaggttattttcgtggactaggagtcttgattaaataagtcaagctaaacaagtttttagctaaaaatatggttattgcgacgaaagtttggctatatcgtatgatgagaacatgtaaaatgtagagataattacatatacaaataaagcatgaatctgtaaacttagttacgtatacgacaaggcacatcattgactttggagtctctgttttgttctgttcggtgaatccaagtccttgatgctacaaagacaaagaccaaacaataatgcattacatatctacaaggactagagagaaaactgtatgtttggatgatcacgagcatcaccttgtcaagtttcagatgcaaatagaactctgacagcctcgaaaacctcttcgctggattttgcagcattgatctggagaaaatcagaaacaagaaccaaactcaggaacagcgtatgatagtaatgatcaaggaaaagaagtggagaaccaaatcctaacctttcgaagtttccct

SEQ ID NO: 29233 - DNA, 1519 bp, Arabidopsis thaliana landsberg
tgtcgatccaaattggaaaaatggtaatgtaatctcccccaaaaaatgccccgttagtttgttaaaatagtgtttggggttcaagaaagctaatgtttttgtccgatatggaacatgcgtctaaacaataagacgatgtgtctgaggaatgtgagctcttgcaataatatttgcgggacacctcttcaaacatggcttgccaagtcctaatgtgtcgaattcagttacagattctgaagttgatggcactattttttgttcaggaaaagagatacttgtctgttattaccttggaaacacacctttcgatagcctttgctccagcagctgaatattgcaaataatagattagagcttgtaattcgctttccaatggattgttgactgtgttttatactgatcagaccgtgggttagcaagattccaaccatcaggtttgcacacatcaggaatggtagcattaacggcaactatcaagcttcttgtcccgtcgttaccaataaatttgatgagtggaccaaaggcggtccagttatcaaaccaaaagctaccaatgttacacctgataaatttctcagccaacactctcaagtctcaaccttagaataaacttctagttccatgaatcagcaaccctttcagggttccaaaagcttgtagttttgttgcatttgttatgcactattattaccagttcgtataaaatatacataaatgccgataatctatataaaaaaaaaagaaggttaatcttaattggtgaacaagtggctgattggtccaaacacaaagtcagcaaaagtttcagcccatcgaatacaaagccaacgtgcaccgttaaagcgtggcacaatctggtccgcgtaattagcgtcgagacgagtccatgtgtttgtttccactaagcgtgaacgcatatttcaaaacaaagaccaattcaaagtcttcttcatctcccccacattaatatctccagtctccatttacctacgccacgtcgtgagattttcttttaagttgtggatctatttctgacattttctcctatggtttataacaaaactaatgccgacgaacaaaaattaaatattttgatgttttgatgttaacacttttattgtacactttttcttaacgtgcttttctctaatcacttttgctgcttcaactaatctttcccacattttttttcccccaaaccattgccttctgttctggattcattttaattacttgttggagaagtttgttgtttgttacaacaaatctttcatgaagtggccggtttattccgactagtataaatgaaattcaagatagaattgggcaagaagtgaataggagctataataaaaatatcaaacaccgattgataagagttcatcatctcatttctccctatttttggggttgaacatatgttattctatataatttacagaaagaaaaaagcgcggagatgagatctattcttcatccacccacacgcaaatagcacatcttctatttatcccatata

SEQ ID NO: 29234 - DNA, 4827 bp, Arabidopsis thaliana landsberg
  unsure (1)..(4827): unsure at all n locations
tgtagtatccgacaattttaatgggcctcattttctaatgggcctgacttaaacaaatgagcctgacttcccgttcgtcctttgattagtcaatctgaagaaaataaacgccattgtttctttctgatcctgctgctgctgctgctctgctactttcgaatctcgctcggccggatctcatccttgttgcaaaaatgatggcgagaccgaggaatcatcgtccttcagctcggaaatcctcccgttcaacgctagtattcgccgtattgatcatgtccactttcgtgattttgattcttctcgcctttggaattctctcggtgcccagcaacaatgccggctcctccaaagccaatgatctcacttccattgtccgaaaaacacttcagaggtaagataccatcccatgccaatgttgaatttcaatttagtgcgcttcaagatcgggttaacttttccgtttttccgtagaggtgacgaggatgattcaaaaaacgagcgttgggttgaaataatctcttgggaacccagagcttctatctaccacaatttcttggtgagcctatgcctatccatatacagatttgtttttttacttcctccattggtaaatctgttttggctcccatattcatcttctctatctgtattttcaatgtatacttgcacgtttccttaagagatataatcattgtaaggaatgtcttagaaagcaaatttgaagattgtgaattaggatagggaagtgtttagtgatgatttgatttgctcttggttcgcttactttccccggttagctgctactgacggaatggttttattacccggtttctggatagacaaaggaggaatgcaagtatctaatagagctagctaaaccgcatatggagaaatcaactgttgtcgacgagaagactggaaagagcacagatagcaggttttatacttttcactcaatgcaacctcttctagtattattaagtgaatcctcagaagctttattctcctttactgatcaaccccacatcctagggtgcgaacgagctcagggacatttcttgcaagagggcgtgacaaaactatccgtgaaattgagaaaaggatatcagattttacattcataccagttggtatgatctgcttttctgttttgtttaataatttgacaatttcttgatcccgtttctccctagatttcttaggcagacctatcattatcctgactggttctgttgatgctacaacatgcagagcatggggaaggtcttcaagttctgcactatgagattgggcaaaagtatgagcctcattatgactacttcatggatgagtataacactaggaatgggggacagcggatagccacagttctcatgtacctgtacgtaactgaccaaacaactttgggcttgcattagctgtttctatgttcttcctataacggttcttagggactttgcagatcagatgttgaggaggggggtgaaacagtgtttcctgcagccaagggaaactatagcgcagtgccatggtggaatgagttgtcagagtgtgggaaaggagggttgtctgtgaaacccaagatgggagatgcattgcttttctggagcatgacgcctgatgcgatgctagacccatctagtcttcatggtgagtagatgagtttgcagacatagaaaatgatgaatgagaggaaagcatactgcttgtgtatagttggtttcgagactaaattcgtggaatcccatcactaatttggtccaattgggcaggtgggtgtgctgttataaaagggaataagtggtcgtccacaaagtggttgcgtgtacacgagtacaaggtttgagggatgattgaggtaagtttaagattccagcttcttcaagtaagtgatgtgtgtgcgtgagagacacgtaaaatgagtcacactacctgccttaaaaaataatatatattagttgttgtaaatggatggaaaagtagaatgtagaatgtaaaatgtaaaaagaagaagactctgatctgatcttcgtacagggaaaggtgaggaggtgagcctgagactgagagagagtgggtcaccaagttttgaggacagcggtgggaaatgaggagcaatagagaagcaagcttgtagaggtaagttaggggatgatacattgtaggctttgtgattcgtttgatatatacatacatatactgtatgtttaatggattaagaaaagcgcattggattgatgagaagttgggtggtgtttctgtttcacatatagtataatgttaacacaaaacttgtttgtataataaagagaagtaaaggttttttttttttgtttttgattaaattggaagccaaaaaagtcagaagaagggcgcaaaagtcttacccactcatcgttttctttaaataatcaaatccactcgtcgtcgtaagatattttcctttcgaatattaagaaaaatgagacgcgtgattattaattaataaagaaactttcggtcagcggagagaaggttcctttgcctttggtctctttttctaatcgattgattatatcttcaaataaaaaggagaaaagaaaggttccttgtttttccagacaaagaaaacacaaattcattccctcctcctcttcatctcttttgcagatatggatggttattattctctgtctcccatctctgtcctccaccggattaaagattccttccatttcgccgtctctgcccttctcgccaacctcttctccgctctcttcaccttcttcttcgctttaggttccttcttttcttcacattcatcttcattaatcaatctctgtgatccctgaggaattttccttgtttctgcaattacgatatgaatatgatttgacttctttgttgatttgattcagtggggactttgctgggagcattgacaggggctttgatcggccaagaaacagagagcggtttcatcagaggagccgccgttggtgctatctcaggcgccgtcttctccatcgaagtctttgaatcttccctcctcctttggcaatccgatgagtctggaattggatgccttctctacttggtaacaatcttcatcatcatcaccaccagattttcttttattttcttatgctcaaatgcttttcctatcttatctttatatatatagattgatgtcattgctagccttttgagcgggaggcttgttcgtgagcgtatcggtcctgcaatgctaagtgccgtccagagtcaggtacaactaccatttcttttctttgatgcatcattcattatccttctcaacttttgtattaataataaacagatgggagctgtggagtcccagttccaagatcatacagacatctttgacactgccatttcaaagggtctcactgggactctctcaacaggatccctaaggtccgaatcacagacacctctccggagattgtctcttgctctgtctgccttcaggtttgtctcacttcccctctgcttttgaacatcatcttccgcggaacgtagattagaagaaaccattatatattgttgcaaaaggttgagagaggttctagatgtttccattaggtgacaagtggttgaaagacaaaattaattaaaattgaggtgacgaaacaggactttcaggtgggagagacagttagaagtttgccgcactgccatcatatgttccacctaccatgcatcgacaaatggcttcgcaggcatgcttcttgtcccttgtgcagnnnnnnnnnnnnnnnnnnnnnnnnnnncttcttttcttctttcttctcttctttgtacatgaggtataggcatacacacacacacatatacacacactagtagtcttccttgatttttttagattacacgttacacagattttgatgcaccaatcattgtaacttcactcatctcttggagatcctgtttatttatgatacttattcttggcttcatcattcaaaaaggacaggctgcacttcccaattttagaaagtttgggatcggttttgcatagactaaatcccaaatgaaaaagcatatatacatacatatccttgtcgtcgaaaacaatgctctactcttaagaactaagaagagagataatacattttacatgaactagtccgagtacaaaaatatttggcatgagatccaacatgtcaatagcttcagttttatattatacatttcttataccaggaagagtgaacccaaaaagacaaaaaaacataaagaaagaaaaaaaaaacatatctttggttggataaatataactacaagatggatggagcctggttttaaagtttcttaggtaaagtgataccaccaccacggatagaaacagaaggggttttaagagaggaggctctgctgagcagattggtgtccaggaagaggacgaccacaggtatgtgggggggggggagtcaacgagatcttctctttgtagttgtagtagcttaggagaagagaaacaactattattttattttatactccattagaaaagtgacacaattttgttatcatgattattggatcaaatgattttaattaatttcagattatatagttaaagaataagcaaatagtgattttaatagagggacaattggtcagaaaatctttatcattatcatttctgtgttttatttttaagaagcccgaaactttttagagttctaaaaaaactttaataactcttttaggactaataagaacccatcataacttggtttgaagccatctcctctgttttggatacgttaaagtttgttgttggctctgttttgatttatttatttaagtttctccact

SEQ ID NO: 29235 - DNA, 1378 bp, Arabidopsis thaliana landsberg
atttttaggggttttgttatatcatttttcatttgtaacagaagttgctgaatcaccccacaaggagttggattgatcaaaaattatatcaagatactacatttatttttctaaacatattatcacaagtgatttagacaagagagtttaacgaccctaaaaaaaatattatgagatcacaagttccttgcaagagaagattacatgacagttcctaagtgtccagagatctgatccaccaagaatctaattgagtgtgcaatgaaacacactgctaagcatctgctcgttgctgattcagtcatcactagtaaaatcatgagtaaataaacaaaaacgaaacagcatgtcaggtataagatcgataaatctatgcacaacctaaggcagattcaaagattctgacctttaagagcaactgcgtttgaggttaaaacgagcatatctacgatgaagatcacagaaaccgggaattcccagacctgtaaccagagtattattaaagacttatcacattttagcatttacagacctatatctacttcggtatcttcatcggtttaagagcttagcatggaagcaagaagaagctatgtccattgagtatgatattatatacaagattctgaggagttctaacgaaacataccggcatagcaagtagaaagatcttgacgtaactcgagattaagatcgttaaaagaatctctttccctctgcaaatcatatactaacttattcagggcacgtaaagataagactccggcgaataataaaagaaaagcctatataccttggcataaccagcatcaacttagcagcaaatgcaaatgagaaaacaaatgcgaaattcgcagatagtacattgaccagaacctgtaaaaggcatacaattttaagttctcatcaacccaaatttatacaacgttcaagagaaaagaaccaacctctagagattcaaaaagaaagctcatcgacacatttgattcgtcattggttcttctcagtagcaagcttctatcttttgatattgttaaaggctctctccaaaatacaacttgtatagagtatagaaaagctaaaggatacaagtatctagaagaagataagccaagaccaatttccataatagatgctgccaaattgttaaaccctctaaagatcagatcattgtagattactatttagaattcaaactttacaaaaccaagattcacaatatgtttacctgaacatttgcagattcttgattaacaacattgtagagtaagtgtctataagcctttgttttgtgaagaatcaagtcaataaaaataatctgatgattatcaaaacacacaaaaaaatcaaaacttatgaacacaaaagcataagaatt

SEQ ID NO: 29236 - DNA, 2545 bp, Arabidopsis thaliana landsberg
atttttccaaaggaagaagagtagaatatgatagtcattctcccaactaataaatacctacaatttacatacttgttttgtattattatctttgacatgtgtaatgggcacaggtataaatggaccgttagattagagggatactagtctattatatactgtacctattttgattaatttattgattctagcaacattctactttcttctcaccgaatttttccttctactgttttttaattaattatagcaatgttttttttcgaacatttcaaacatgtatttagagtgacttgtaatctagaaatatcaagatgagctggaatcttttgagtcaatttggtctggtctggttctataattttcattttaggattagaattttcaactcatgtattaatggaagtatgaagtcaattctaacatgtttagtggttattggttagaataaattatgcatcattattggtcataaaagatagataaagtttttaacgaataatatcataataattaatagaaatggtaaaaaacaataacagtatacaagtagatattagtctctctctctttttttttgtctttcaacaaattgttatgtgattacaaatagttttttctttttgttttcaaaccacagaaaataaaaaataatgatatacgatgacgaagtacgggtctggcctgttttgatcaaaatcagatctactctttgttaacattaagagattgatgactagccatcggatccattctctttggtttcatggccgatcatagctgatctatttctttgaattttaagctagcactctattaatgcttttatttcattggtcctctcttgttgtaatctcctttcaaactatgtcgataattttttgttgaataaaatttaacattccaaatttccaaccaaaaatctaatatcttaaggtcattttgtttcctcccgagacctttcttcactttaggaggtattgagactcaattcatcaagcatctaatctaacgagacaaatgaaataaaagtttggttgcgggttgatgacttttgaaagatgtgacagtcttgttcttttcctaaaaactaggagtggatatatcgtaaaagtgtcttaagatgccaaagctgagagagtgagtgttgaacaacctgcgttgaatcattgtagttcaacttgtttatatccaacaatattcatagagagacataaccttatgtcattccatttagtttgtagaagtagagaagattcgaacatgcatctttaaataaacgaagaatgggaatttaaagagaatgcaaagaaagaaaagtagagtagaggccaagaaacataaactagattatacatctctcgacgattctacttattatttatctcttaagaaatttatgcatatcccccaacaaaaccaaaaacataagattttcaaatgtaaaaatgtcgatgaaacatacaaaatttggcagtgaaagagtgaaaatcagcttcgtcggccaaagatttgtctgtcgccaaccaaaatattaatattaatggttacaaacaaagtatgggggtttcttggctggggcatggtgctaatcattatccagaaaattcaaacaaactgtcacagaactcagcactcacatttaatgaaaactttgtatttgttcagtcgaataaattaacgtgtagtgtttcaaaatgtgttaaatcaatacttcatcatgtgattgtcttgattttatgagtttatctaactaataaagctattttcacagtaaaaatagaggcaaatcatttggtggaaatagaccatattttcagcatatttctacatcttgattgacttttccaacatcaataaatatgtttttgcagcacagttttcaaatatagaatttctgtggtatgaaccatagtgaatatgtgcatcttatccatatataaactaaaatgtataaaaatatacaatcttgtttaacaatacaatcagactgtaaacaaaaaaaattcaatagatatgattgattaatacatgtgaaacttaggcatacgacttttgagcgaaccgaaccgttcggtttggataattggtttttcgagtatctagttaggagataagactgccaaatttaaccgaacaaaaattcggtttggatcggttcagttatcagttaactcagttcggtaatgtgtctcaaatccatacaaaaatttggtttgtatagcaattttaaagaattttggtattagtttataaaattggatatgatttgtttatattagtttaaaaaattagaaaaaatggttaaaagattgttcgattaaccgtacctaaccaataggaaaagttaccgatcggaccacttctattaatcgactggttaaccgaacactcaaatctcaattaggttctgttcgaaaacacatcggaaatgacgacaggaaaaaaaaaaaaaaaacacacacatcgacgtagttgtagtagaatcgatccaaaaatgttaagtagatattttccagataggattgttgatgaaaggggcaga

SEQ ID NO: 29237 - DNA, 2287 bp, Arabidopsis thaliana landsberg
tgggtcattaagccagctctctattggcactccatttttcacttggaacccaaatgcctaaaacattgcagataaagaaaaacaccaatgtagattgttcaacatccttagatcgagcttagagaattcttaacggcggttctggaatcaacttcttttcatcaaccctacaaaaccaatgagatagcttttgcaaacaaagaacttctactggattcgcccatactacctttcatagttattatagttttcctatactagaagtgtatcctacaattatagctgataaaagcatctatcgatcggtttaggtataaagcataagaatggagaactaaacgtgtttactcactgtgtagaaggataataagagtataatacctgtggggagttgtcaacaatgataacacgagataaatcacgcccgaggactgacaaatccttgaggtagttaccatcaaagaaaacacacgagtcacggtacactctatggcgaaagagctttctcttagggtcaagcacgttcagaagttgctcagcataaatactttggctagctgtaaatataatgatctcaaaaagtcgggacactctctccataaactctttgaggtgaggacggcatcgcacatacaccatatgctcttcttcattaaaattcactgggaatgtgaaatctacctcaccacacggctctagagtcgagtgcacaagagtttctgcaaaataaaacatatatgttatagtagccttaaaacctggtgagaaaaaactaagatttgtgtgccattaaaacctgcaaagagagatacaattttaaacaaacgaatcaactgaaaagtagccttaccatcaaggtctaggacaagagaaataggaggacagcttcgggtttgtttaggaagcaagaccggcctgaaagttgggacaacagaagacaggttcggcaagttcttgataaacagataaggatcaaactcatcgagctcctcatcctcttcatcctccatgcataccgaagtaataagggaatcttgaccacgctcgtcaacacattccagcttagagctcttcatcgctagataaatggcagaaaccgaatccaagttacaatttggatctacgatacttgtatctagagcaagcaatcgatcataagggttctgtgcatccaaatcccgagaagaaggagagtcatcatcttccattaaaaccctattaacatcaacttgtaactgaattagacaacagaactcagagcctaatgcaactactacacaatttcaatatctgaccattattcacattcatacccaaacactactataaatctacaagtacaaggttcaatgataaagttttcaaatttaccttgtagaaactctcttcactcctgtagctaccgacaaagcagagacaccggagatagatcagttcccgagagccgtcaaattacaaacaactagctcatacactatctgagaacgaaaacagatcttggattagaaaaggagcaaagccctagatacaattcacaaagaaggaaccaaaacaaaaaagtacccagatttaaaatatttgaaagataaaaactttggagccaaaagaagcaaaattcgaaaacttttcatcgcggaaagtgacagaaatcaatattttaagaaagagaaccgaaccggaactgaaacccacgaaatcgatttcagataattttcaattttgatatatatatctagggcttttaatacgaaaaaaggggggaaaaaagacatgtggaaaaatcaaagctttttactgggataaacgatggataaatctaatctttccgctttctccgcaaatttctctgcaaatttcaaaatttcttcaacgaagcgcacacctagattaaacttcagtagcccagaaattcgagctgagattgaagagctaagaagaagaaacgaagagggagagagagaaaaaagaaaaccctagagagagtatattcgtcggaaaaaagtacctccgatcaaaaacgatttcttctagcttccgtcttcttctctctctctcttcgaaataaaagagtaaaatatttgctcgaaatgaatgacagacgactatagtctacataagcaatgaaatatttcatttaaatgccctcatactttattaatatttcattagtaacctcgatagtttttgatttgttaaactaaaccccaaacattcgaagagtattaggccggtaaatgatgacgtcatctccggttggaggatagtacaacgatgccgtagagaacta

SEQ ID NO: 29238 - DNA, 1841 bp, Arabidopsis thaliana landsberg
atttgcttaggtgtctgactctgtaggtttgtataatattagtaatgagtttttgactcatagattgtaagcggtctctagctaaacattataatcacctaatattatgcaaactcaaaaaaaaattgttgaactaaaattttttttgtaaagatgattcataaatatatgatattattttatttgattttcaatatatagtacgctgcgagttatatatgtttcgttgatatttttaatagtgtttagagtttaagattatacacttgtattttgattgttaattttaaagtttcacatataatatgccatcttgtattaatatcgatctaaacctgtcaattttaggatttttcagtttgtattaaaaatttaatcccatcatgctcataaaaatatttaatctacatatatatttttggggacaatttgtgtcgaaaaattctttttcaatttcgatattatatgtttagttcctacaaaatcaatcagacaagatattttcttttcgataatgaccaaatttttgctcaactattcacattttgcactaattacttgcctaaacatataaattgttaactattaccctcataaattgtacaaatcaatcctttaaatctctacgaaattaattagtcattaatttctaattactaaaatttgatactaaatcctaactaaccatatctataattacttgattcaaaaactattttatagcaactattaactcctcattaaattcaaaatttgtcttcataatatttgttttgatattatggaaactaataaccactattcaatttcgtatttgcagtatattcctaaaaaaacagatttcattaatctgattccattttaattaagtttgaaaataatttagcagtatccgaattcaatgtcaattttatagcaactattaactccaccttaatttcaaaatctgccaccaaaatatttgttttgattttatagaaactaataactacaattcaaattcgcatatacaatatattccaaaaaaaaatctgaattcattgatttgatttcattttagttaagtttgcaaataatttagcagtatttgtggttatgattttttttatatgtgctctcaattattttttattataattaaatctataaataatccttatttctatatttgttatacaaaatatcggatcaatgctaatacatatttagtttttaatgataaataccaaaattgttaatatcataacaaatttacgattctgctaattatcttttaaacaaactataatttgtgaggcttaacctaaattattaaaattttatcccactctataaatagagaaatcatatgtatcacatcatcaccattgcatatctttgtctattatgttcgttttcacaaatctattcttcaaatagttcttctaaatttttttgggttaaataatgttagtcgtatcctatggcttcaagatttggctttggttatttggtttgtatgtttattttgggattaaaagaagctgattcttttttagataatgtgtctactattgatttgttgtgcttaccattgtgctttactattatgatctaaacaattatgtatgccatgtgttgatgattactttatattgtatgtttcgtgcaagtgatgatgatgaagtttttttttataaatgctgcttcctttgacttcctcatagattacaaaccctaccagcaaacgttacaagattgcaaggcgttttcatagagatgttgttggctgatgtgcaagtaagatctacatattttaacatttaaaatgattattctttcaaacaacttgatatgctacg

SEQ ID NO: 29239 - DNA, 2068 bp, Arabidopsis thaliana landsberg
tatctagcctgacaaatgaaaaactacagaatcaggatatatatgttatgacacaaaacatggtttccttactcatatattaccagtgcatcgaggattttaggctcccttcctttgaaagagtcaagatactggaatttctggtcctttatattaattacagccaaagtccagtggatgttcatatggatagggataaatatctgaaaacaaacaaggtctcttagatggtaaaatgaaaaaaaaaagtttgattatctcaaaaaggagtttaatacagagagtggtcgcagaagaagcacacaacaagtttaccttgtcacagtctttgagatggtagcccaacctcttcattgaagtccatcttctcactgcaccatagttgtatccagtcgccgaattaactaactgaggtgtgatttaaggtaatgtcttcttgttaatattcatgagcatatataggggctaaaatttaaatttcattagccatagaaatgggtataaccttagtgaagaaaaatgtattgaaaaaatgacatttaagaaacttctttggttctctagcttccctttctttcagcaataccatataaagattaatgacctacatagaacaaagtccaaggtttttaccaaatcatagaggtcctaattagacaagaaaattatattcaatctctaagaagaaatcacgtgagatttagatgcgtcgactaacctcatcgttcaaccatttgcctggtttaaggcacctcaagattttcccggtaatatcaatatttgagttcttatgagtaaccaagatgtttctgcagcgagagacgttcatacaattacatcacaaaaacaaaaatgaaatctcagagcaagtaaacaagagagcaagaatcaaaatcatacgaatcattagctgagaatgcacgcctgactgctgtctcctcctctctagaaagaggtacaaatgcctcacgttgtacaacctgaaaatcaattatagaacaatgaggcaccccgatttcacaaaatctaaagaaaccgaccgattcatatcacaaagcatacacgcttaaactttagccacacctctactggttcttcatcttgtctccaaaaggaagacaagcttcgtagtaaagcacgacctctctctttaaaaaaatcaacaaagcctctgtctttcagtttagaagtccggttcacagcactctcaagaacctttctgtatgcttcaaaacttgtgacatcagtcacagggcgattcacaacgagtgaactactattagctttagaacattcacccaccctcaagctcccatttttcagactggcaacctcagaaaacaatccatttcccatctccgccttctcttccacctcgtccacctccatagccacgttttcgacaccctccctacttgtatcatcagatatcatttcaacatctccaagctcatcatcaacatcaattacttctctatccgttctatagcgtaaagacgaatcaagtgcatttcttttccacatgtcattgttccttgtgagaaaggttcccaacacattaccaaaaccttgtcgtgtgctacgatctcgaccgctattgagtatccgcacaggcgcatgaacttgtctccgcaacgaagatttcacttctgggtaacggtaaattcctgaagccatgggtcttgatgaatgtgagaaaccgaagtgtttacaagggtttaaaccggcgctccgtttgtggtaaccatccatatccattggtctgaaacagtaggaaccataaccctcgaaattcaaaatttgatcccacaaaactgaaaggtcaaaatcccccaattcagagttcaaaaccctagattggtttttcatgaaataactctcgggaagcaagcaagtttcaacttttattaaactcactggcgatccgatacacagattcggacccggacatgagacccgggcgggttttgttttggaagagataggtcaaacacaaaaatgttgacttatctcataccctctagccgaaagggaggtttctgggtcatgttgtttcttactcggcttc

SEQ ID NO: 29240 - DNA, 1817 bp, Arabidopsis thaliana landsberg
tgaatagaacgtttgtgttaagggacaggtcctgggctaaatgtgagattcatcttgaatgcagcaaaatctatattcagcttccgggtcaaagcattctgctgagattagattcattcacggcaatgagtattacattcacagcttggatcttggaaaatagtacacgacataaatcccacaacttgatacaatctcgcgcatatctgacatatggggaaaaacaatagcgcaaatcaccatccgtatttagcttgtgtctcggctttcgtgagcaatcctctagaacgtctctctgtcaactccgactccttgtgcttcatgtccatgaacaacgcagtgatttgatgcttcctcttgtgaagctttgacactttccctttagatgaagatgttgccggctgcaagacaaatttgaacaaagacatcatttaaaaagcaatacaaagcagtcaagtatattttcagtgaagaacacataataaaattggtatgataatcaaagtatctcttttcctataaatccacaaagaagtttatcagcaaaacagaaagaacttgacaacagaagccccaaacaagagataatcttcaactcatattcaactcatatgctctctaatgaaaatctcctaccagcaaagggtttagatatacagaaccagagaatgagaataataagagacattagagacaagacaacacccaagttattgcaaataaatttcgcaagtaaaaacttgacaatggcagccacaaacaggagacaaattcacaacgctctatactctatagtgttaccagttcaggcttttctaaagacaattcctaagttcttgcagccaaaaacgagtaagaagagtttagaaagtaaacaaacctgatacgcaggtccaaaggcgattccagtagatttaacctgatcaactcgtggcctattcttcataagctcatcttgcttaacctcaacaatctctggcatctgattcctccctctccttcctctcctcgcaccactatccatagctacaaccgcttcaggcaatcccgtcattgcctcaaacccaccaccattccaagtattacctccatagctactaccatcatatcccacactactaccactatgaattgtttcgtatccaccatcataaccagtagcataatagttatctactccaacgatttcttccgtttcgctattactatgactaaacgattcatagctctggttttgttgatcactaatacctgaatccgtttgaggaaatgcaattgaaggtgtttctgtttcgagattcgatcttcgacctgatcctgatcccaatgaaggaagagcacctagtgtttgtgagcttttaggtgcaggcatggttgataagaacgatcttactgatgaatcgtgagatacggaagcagattccatctgtttacgcttcttcctagctttctcttcttcttcgtcgtcttcatcatcaagactgctcggtctagggtttactggaagcctgatctggacgacacgtttcggtattgacgacggattgggattccgcttccgtgaaattgaggattcgggaggagggagagaggagaggaaagaagaagattttcctcgagaggaagatgagcctaaatcaccatctttggaggatttgagttctttaggctgaggaatagctgagaataagagacgaagcgggaggttctgaggatttcacagtgaaagctccctgacgtggttgaagatcttctttctcgtacgacgaagcgtagctcgctgacagagaggcctttggagagagagagagtttgcc

SEQ ID NO: 29241 - DNA, 1771 bp, Arabidopsis thaliana landsberg
aaaacattcatcttcttcttcttcttcgtcggagtcggagcagagaaaggttttggagatcgagaccaaactccgattgaaagaggatgcattcttttggttacagagcgaatgctctactcacattcgccgtcacgattctagctttcatttgcgcgattgcttccttctctgataacttcagtaaccaaaatccctctgctcagatccaggtatgcctaattgttaattgcagagatctcttattgtatcatggatctatgtgtgcatgttttacttcaagttgttttagatccttaattttgctggattctggcgttgtagttggaaaattgtaatggttagagggaattttaaggattgttctggaagtttgttctttgagtttgaagaaacttttgtggagcctgatttttttaatgattgttctgtggtttgcagatattgaatatcaattggtttcagaagcaacctcatggaaatgatgaggtaaggtttcatactcttgcctcttcttacggctttctgtgtcttcactgtaagtttctatgatttgagccaccaaaatatatgctctggtgtgctgagttatgtttatctggtcacgcttagtgggtaaaattatgcttattttagcataaactttaatgagattaggttttgtatcacaccgatctttagttgtttagtaagatgacagaaattcttggtaaaacactctaaatcgtcttctttagtgaagttttccttagagtagcataaattttggcttttttcttgatggttgaataaggtggcacttgttggtatgagactttattgagagtcatattaagcttagcgttcattgaatttgatggccataggggtttagatgcaactgtttctttgaacattgtagaaatatataaagattttacattagcctactcttgaaagtcaaattgtcgaatttgattatattatactctagaggtgatattagttaatgagtttatactcggttatttacagcttattcatataccagttaacgtgtctcatatattctaacttcttagcatttaacgtgtttgcaggtcagcttgacactgaacataacagctgacttgcagtcactatttacttggaacacaaagcaggtatagcatttgacaatacaccaatccatctcttttgctataacctgaagttttcccaatgttgttgtataccactttgtatggtcggataaacataaaaccaacactaacgaaaacatttgcaggtatttgcttttgtagcagcagagtatgaaacctccaagaacgccctgaatcaggtataaatctatgttgcttcaaacgctttaattttatatagcctactgctctcgtcagagctaagaactagttaagggttatgtggctttagtgttactcgcttcttcatgcctgtcatatagattgggaccccttttgttaatataccattaacatttgacatttttcttaaggtttcactatgggatgccataataccagagaaagagcatgccaaattctggatacaaatctcaaacaagtaccgtttcatagatcaggtacataaagcactttctgtgatcccctcttgaaataccagtccttcatgtaattctgaaggtatctgatttttgtgaatgggattcattctagggacataacctccgagggaaggactttaacttgacattgcactggcatgtcatgcccaagacaggcaagatgtttgctgacaaaatagttatgtc

SEQ ID NO: 29242 - DNA, 672 bp, Arabidopsis thaliana landsberg
caagaacttttaaacagagatccgggaagcatcaacacgaccaagttttaagggatctaaacacacccaaaccaatgagagatggttacatatactgattaacaaagcaaataacattgttaaagataagatatataagaaagtgcaagccaatatatgtgaaataacctgagttgttttccagaacgattgagcatagtatgcaaaacacggtcatcaacatatttaaatgcttttgtcaagtcaatatgagagtaacataaagggtccatggcacacgtattgaacattgtgcagcatgtagaagcttgcattagggactttgtatcaaccatcgaaaatacctgattatgatgcatgaatccattagacatgtggctaggaacaatataattaagagaaatccatattgattggttaccttaacggtgagttcagaagggaggaaccaggagatggaattgtggagtgtggctagtttctgagagcaacgtttggtggattggagaagaagcgagagtcgctcgagagtacgatcgacgagttggtcttgaacggagacatcacaagaggagagaagattatcaagtactcgatcaaaagaggagcttatggaaagagatggagaatccggaaatgtaaccaaggaggagattatcgaatgcaagttgc

SEQ ID NO: 29243 - DNA, 1767 bp, Arabidopsis thaliana landsberg
tttgttgagaaaatatgaagaagttggggcatgcagaaagatggatccaatggattatgtttcatataacctatgtctcttatggagtgctcattagtggccaactttgtggtgatatttgtcctatcaccttcatcagtgtgacattatatttttctatcaaaccatctaagaagaggttaattaaagttgtcaatcatatctttcaagattaccggcttgaatcaggacggagggagaatctctcaaaggattatgtttaagaagaatttaatacatctttatatggaaaccatgcacaccatcttttgctttgagaagcattattaaagcacatgacttagctagctggagccaaactcatagagtggtttgaatctgaagattgttctgagataagagaccaggctctagctaggtagagattcaaaagatgatattcaatagtgcttcatatcaataaaaaattgttctggttttttcaaataatataactgattaaaacttatccataaacgtcgtccaaaagcgtttgtcgtctgagttgatcttgaacaaattcatcattagaggagagaagatgatcaagtactcgaaggaggagcttatggagagagatggagaatccggaaatgtaaccaaggaggagattatcgaatccaagtggctttgattgaaatctggagaatcagataagggactagggttagggtttttggtgggcaacattgcaaatgcttttatttttgcaataatcagattttccaactattttatttatacttacccataaaaaagtggggtcctgtaataaactacataagattactttctatgtatgttcaccaaaaaaaaggatttctttctatgtattatacaaagtttctcaaaattatgcataaattttttcaaatttggatagtaattttttatatcctaattaattactgtcaatccatatctatcgttacaagatatttacccaaattaaacatgtccacgaaatcttttgatctgaatttataatcaaactcaaacaatatgatgattaagattaagaaataacctctttatgatcactcttaaaagttagatctctcatttgattttgttattggtagaaatgtgtttagtagtattgagtttgtcttgaacaacgtcattcacttgatgacaatctgattccatatgtttagttctcttacgaaatatcagatttgtagttatatggtattattgaacattgagtaggatcttaagtggtatatagaatatgagcctctccactcattgccaattgattttgagtggagatgcttatatcttatatataccacttagatcctactcaagattcaatgtgggacaatatccctaatacttacacctacatcagtgtgaacttatttcttctggtcaaccatcctagaggaggttaaagtcgtcattcaaatcctcaaatcttacccacttgaataatgacataaagcgaatttgacaaagataagcagcacatttgcacatccaaagcctgaggatcttacaacagaacatactttgagaccataaccaccttgtgagtttgccctcaatgagctaagctaagagctccactaccgcttttcaaaacatcacagggcgggcggggttttcatataaagatgtattaaatacttcttaaagataatcctttgagagattctccctacgacctgaattaaggcggaaatttttgaatgagatgatttgacgacttaaacttaaacc

SEQ ID NO: 29244 - DNA, 1396 bp, Arabidopsis thaliana landsberg
ctacccatctcacccatatccgtctcttcatcaaacaatgtttcagttggcattttaccagtcacgatctccatcaatactatccccatactgtacacatcgctcttctcagtcgccttcaacgagtacgcatactctgcgaaaaaagaacggtttcaaaaacgttaggttcaataatcgaatcgaagttaagaaacccgagaaagacatgtacctggcgcgatgtatccgtaagagccagcaaacatagtgtttgattctgtgttggtgtcataattcccggttaggatcttggcgagtccgaaatctcctaaatgtgcttccatgttggaatcaagaagcacattactagacttaatatcgcggtgaacaatcggaggaacacagtcataatgaagatactccactccttgagccaacccaagtgttattttcaatcttctttcccaaccaagaacctccttcttcttcgtattctcgttggcatgaagccaatcccaaacgcttccattcgccatatactcgtagatcaacagattcaaaccatctgctttactgctgcaataacccattagcttaaccaaatgtctatgtctgattgttccaagagtcttaacttctctgttaaagctcttgtttgacatcaaatcatctttccaaagaatcttcttcacagcaatcgtctcgccgttcttcaactccgctttgtaaacttttcctgaccctcctgatccaatcatgaactcgtcgttaaggtaatgtgtagctttcattatgtcatcccactttatatctgactttgcacctccattactaaacagaggagcttgtgaagaagaagagttcgatgaaaatgcgctgtttccgcctcgcactttcttgaaaagatcatggttttgcttgaagaagaggatgataacaagtaccatcaaagcaatcgctgctaatgatgaaatcgcagagattataaccaccgttttcggactaagacttcgttgattctttgatccagctctgttgcagtgactaagagggcttccacaaagacctgcattgcctacaaacgcatcagcttgccatctagagaactgtttctttaactttccctcaaggttgttgtaagagaggttaagatatcccaagcttttcatgtcaccgatttgggcaggaacttctcctacaagctgattgtgagacagatcaagagattcaagcttaggtaacgtcgaaatcgtagacggtatacatccggtaaagttgttgtagctgagatctaaagcactttgaagatcttgcagctgtccaatctcaacaggaatctctccggttaaagcgtttctcgataaccgaagctcgaaaagcttgctcagtttccctattgtagaaggcagaggac

SEQ ID NO: 29245 - DNA, 2378 bp, Arabidopsis thaliana landsberg
ttcatttatagtggaaccacagtgaaaaaaatattataactaattttgcttgaaaaagttgaattataagttttctttaatacattgttggatataatcacattattcttctataatcctatcccatttatgtgatctatttattcatctttttactaatttctcccactttttattttggtcggcactaatttgctctaaggctctaacaacaacaaatctttaccataaccaagttttgatgtcggcacaaaaaaaagactgaatgtgtcataaatggttgcgttgagagttgagacgtgttggtatcctgcatgattgtgccgtgagagtctgactcatgcagcaaggacctcgcttttccgcagccacagaaaaacaagctgattggttctgctttatgattccattattgagctcccaagaaattgaatgtcatttctacgttagctaatggttgtgtcgtttttttttatgggagtagacttggtagtgatagggccagatttttcatttaccatttcccaagaaactgacgtaaattttagtaatctacagtccagccaagaacaagtttttgtctattttatcgttaaattttgttatctgatgatgacagatttacagataatatagttatcttttataatgatcttcgctaaatttatttataatctgcataattcaatcacgtcgtcgaagatttccgataattcgtagtattttataagaatcaaatcccaagatatattgtaaaaatcctaaataaacttttagtccaagcaaaaactgtactccttcacaatttaaaacagagacagctatcacagaaatgcaaataaacgtgcgcgaaagtctgctaaaataaactaatcaacataattcgataacaatctgtcgtttatatctcccaaaaggaaaaagaaagatctcaaaatagattaggaaaaaagtatacacatatagacagtgtatgtaatgtatctgtaaaaacatacttggaatacaagtaagatagattacagatgccaacagcacaaactcaagtctttacaagacacaaacaatgaataaatctgagttttgtttctttcttattcatacagcacacacaaaggaactttttaccactccagacgccaattttcctgcattgacaaaattcagttaaaaaaggttaataatttggttcaacatatagttaacttaagactcttgaaattaaatcgaatcgaaccacgacgtcaaagtcgtcgatacattagcccattagagttctagctctggttttgaccattgccatttcaaagtttatctcatggtctctagtttgatgcaagattaacaatttaaaaactaagcagaaacggtaaagaaaagcttacagaaaggaaagatcttccagagctggttgtcgcctttgttccagtcccagaggacgatagtcgtgccatcaaagtacaccaccagatttgctgtcaccatgatatgcatccacgtttagcctcgtattgtttaccattcttattgtgcgatatccatcgccaaaatccttgctctctgtccatagtactgactcgtcaagcttatcaggcacatatcgaatcagatgcacctgcaatacccaataaaatattgcttaaacacatcgagcctatcgaaaaaacacaatgcagaatcacagaagtaaattagcagactttagttagagtttcttctagagaccctaaactttccaagcctacaaaaccattttcataaattcttgatgctcctctctgtttcttttcttcctacttaaagtccctactaatgttttgatgtggaattttcataagaagtgaataaaatgcacgaccaatatttttttcaggtcccattcaaggttatgaaaactaacatttagctaaggttgagaagatgtcacactggaaataatgaaagtcacaggacaaaaatgacatcgtctaagaaagaaacgcttacgggatgagtagctcccacagaatgcttcattgcttcaccagtagctttgtttacaagagcaaaacaaggatgaccgtctgcgtccttcactttagtactatacttctcgtctttgtaccaatgctgcgcatccgaaaccatttcatgagtatgatataacacatacatcaaaattagaaatgccaggatcaacaaaccaaagacatggacataacaagaggatcaggaaattgaaccacaaactaaattctagaagaacagagtaaataaaaactgaaacttgtttcttcattctaaatcatgatcaacaagattcaatcttccaactaaagacaatttcgaaagctactcagattatctatcaaatgagtgacaaaattgagatgcatatg

SEQ ID NO: 29246 - DNA, 1158 bp, Arabidopsis thaliana landsberg
aaagaaccgatgatttacctcttcagcttcgacataatcagaccttgtaagttccaaagccactctattctcaagaaactgcatctgtagcataagaaaaaccctagacatccagatagctgtgtgccgcaaatcagcctctgccgtaagagaggaacatgaagaaagaaaatgtgagattcaacattaagaaccgttgcttcaactaagtgtagttacaacagagaagtagattgaacctctaacttcgtcagtaattccaagcttgatcagttcatctgcataaaacatagcaaacacacatgtcatgccgagaaatggaatcccctaagttttgtagttgcgttcctaagaagcaggtggctaatttcctcatagaagccacattctaagagaatgaatcacttactacactgattcgaatctgaggtaaagtgggttttctggtgatttcagtgaaacgaaagtaaagagaagagagtatctagtgcagacaaaatgcaatagtaggaagtgaattaagaaaaaaacaggaatttcagctgctaaggataacagaacaaccttgaatgatctgcagtccagactcgatacgttttgaacactctttaaagagtccctttggacgtcccgatatgacaaccataagatggaccaaagcatcgatggcactttttggtagccattctccatcaattggagatggtgaaagcagtagcttctctgtccatccacgatctatgttgccaaagtatgcgggctccagagagttaacagtggtagaagatggagataatgcgtttacacgatcttgaagctgagattgtcttgctgagagggccgatctttctctggagggaaggtcgtaacgggagagactaagatttaacgaactgagctcatccagaagttgctgaatctcctgcattttatgcgaatgagcattcattgcctggtccaagcggtcgacatgatgctgagcgttcttataatcgcagagcctgaggcgatagaaaacatgcaacatctcattgtagaagaacaaaccggggcagcgatcagtctacagatgacagggaaatcagttgactcaggtcaaacgaagcaagaagaagttaagtgggtaaaaaaaaaaattatatatgtactgtaacatac

SEQ ID NO: 29247 - DNA, 2516 bp, Arabidopsis thaliana landsberg
  unsure (1)..(2516): unsure at all n locations
tgttgtgtgggctttgatcagaggtgggagaacgtttttaccaaggttgaattgggattctgatttgggcatgtttgttgttttagggtttagttattatcaaatgatcactattggctattgctttgctttaggtaaccaaaaaaacgttacatatttaaataaaaatgtgtaacacagtgcggacgaaatagcatcaaaattatttatatacatatcagatatgaattgagttaattagtgtctaattattatcttgtggctgccatatgtcttttttgaacttgttctcgttgaggaaaatttggtatgcctaaacatagtatgtttatcaatttggttgagaccagcaaaatatcagtgccaaccctaattataacgattactcatcaacttatgatatacatatccttgtgaatccaaaagaagctgtcaagcacccacttttattttattagtttttttttctgttgatgtatagtacttgattgcggaaaaaatggtaagtaactaagtatgattagggctatttggtattttattcttcaaaaatgaagagtaaggttcagatgtagttttgaaatatactttttgcctaattttggatgagacagacaaatctaatcaaaaagattcagctgatttgtgattactggtaacacaaatagtgtttatatttgtaatcatccatgtgggggtggaatctcctgcaccacatgtctcagttccccttacgcaatcatgtttcttgtttttaaatgctaatgtgatacctatacagtcttaagttattataaagttcatattagtgtacatgtaagagacttataaaataatttgtagtcaatcaaatttttaattgatactaacaattgatccaccgaatcagctttcacaatttctttaattgtagatcgtttgtaacattggacccacgaattatatataggtcgcattcgacaaaatactcaacatacttaaactagttgtcctaacaattagttctttggattttacttgcctatttttatattttccggcttccaccacatattaatttatgctaaagttttcgagaaatcaaatactgaagattcgtatcccgagcaagcatagatgagacgctttgtcgtttcactttgttttcccacccaaaccagaacaaaatttattggccttcgaatatttcggaaaaaacaaacaatattcatttaatggacttgtgaaagaagggtgatattaatctttaatcatgtcacttaattgatatgataaatattcaagtgaatcatgtaaagtggaaatcactgtgaagtagaatgtgtcctaagggagtttcgtacctttcaaccataaaatccggcaaactattaaggattccaatggatataaagatgaaggagagtgtgaatgtgaagcaaacttcaaaaggaagaagtgaaaagaggacaaaagagagttaaacagtggaaagctaaaaggaaacagagatgaccactttcatctcgaagtttcaaaagtacacaaaaacatcaaacatacctgaatagtttcacttggtccactctctccttatctctctctcttgtcattgagcatccttttcaatttcattgtcacttgttgtcatcttcatctactccgtgaatattacaacaagttgtcgtttcatccaaacaaataaaaccggtcccagtttcagaagatcttttgaactgccaagctttcttttgtcttgttcccccctccaaatcctttttttcctcatacaaaagagtctataaagtctccattagtttagaactagtgactactactgtacatattctatgtaagatttgtaggttgggctaagggtgggtttagtaatttccttacacatatccgcggctgcatacaaaactataccaaatgaagacgagttggggcctattagaatctgtccacagaaaaacaatgaatccatcaatcagagtggatttagcaagcaaatatcaagcatagttcaaaatttcatgaactcaccaggagtccaagacaaaaagtaaatattcattgggatggctttcttgaattaagcccaactctacatgtcattggcatcaacctgggtataagaaaaagaaatgacatgtatacttgtttgttgaagaacttttaagcacataaaggcaatagactgagagaacaggaaaaaaaaagttaaagaagattatgcatgatagggaatagagattggtgtattgaaggagaaagcagcccaaaaaaaggttgatgtgaagtgaaagttgctcctacaaagggataaacacaggtattaattagtggagttccaatcagcttcaagtgttttgttgtgtctttngtgtgtgtgtgtgtgtggtgtgtcagcaaacaagacctacccatctctctttctctatctctctcatcttcttactacttttctccacttattacaaactccaaaagcatttgtactgagtctatactttccttatatagcatcaactttt

SEQ ID NO: 29248 - DNA, 1775 bp, Arabidopsis thaliana landsberg
acggaaaaggtcgctcgctgagggatgccagagaggtttttgattttattcctgaaatgaatttggtctcttacacatctgtcggtactggcggttcacagaacggtcagggagccgaggctatcagattatacttgaaaatgcttcaggaagatttagttcctgaccagtttgcatttggaagcattatcaaagcatgtgccagtagtagtgatgttgggttagggaagcaactgcatgctcaagtcattaagttggaatccagttctcatcttattgctcaaaatgctctgattgctatgtatgttcgcttcaatcaaatgtcagatgctagcagagtgttttatggtatcccaatgaaggatctaatttcgtggagttcaatcattgcagggttctcgcaacttgggtttgagtttgaagccctgagccacctaaaagaaatgttgtcttttggtgttttccatccaaatgaatatatatttggtagttctttaaaagcttgtagcagtctccttagaccagattatggaagccaaatacatgggttatgcattaagtcggagttagctggaaacgcaattgcaggctgttcgctctgtgacatgtatgctagatgcggtttcctgaattctgcaaggagagtgtttgatcagatagaaagacccgatacagcatcatggaatgtgatcattgctggacttgcaaataatggttacgctgatgaggctgtatcagttttctctcagatgaggagttctggttttattcctgatgccatctccttgcgttctttgctttgtgctcagacaaaaccaatggctttgtctcaaggaatgcaaattcactcttacattatcaagtggggtttcctggcagatcttacggtttgcaactctctgcttaccatgtacaccttctgctcagacttgtattgttgttttaatttatttgaagatttcagaaacaacgcagattctgtttcttggaatactattctgacggcttgtttgcaacacgaacagccagtagagatgttgagattgtttaagctgatgcttgtgtctgaatgtgagccagatcacatatctatgggtaatctgttgcggggttgtgtggaaatctcatctctaaagttgggaagccaagtccattgctatagtttgaaaaccgggttggcgcctgagcaatttataaaaaatggactgattgatatgtatgccaagtgtggatcactggggcaagcgagaaggatttttgattcaatggataacagagatgtagtttcgtggagcaccttgatagttggatatgcacagtctggatttggagaggaagctctcatattgttcaaggaaatgaaaagtgcgggcatagagccaaatcatgtaacttttgtcggtgttcttactgcctgtagtcatgttgggctggtggaagaaggcttgaaactgtatgcgaccatgcaaactgaacacgggatttcaccaacaaaagagcactgctcttgcgtggtggacttactggctcgtgctggccgtttaaatgaagctgagagttttatcgatgaaatgaagttggaacctgatgttgtcgtgtggaagactctactgtctgcatgtaaaacccaaggaaatgttcatctcgcccaaaaggctgttgaaaatattctgaaaatcgatcctttcaactctacagctcatgtattgctctgcagcatgcatgctttttctggaaattgggaaaatgctgcattggtgaggagctcaatgaaa

SEQ ID NO: 29249 - DNA, 2180 bp, Arabidopsis thaliana landsberg
tcattttttcccattctttaggttgtgatttggtggtctggtctcatgagaggtgctgtatctatggctcttgcatacaacaaggtataaaaagaatgtctttaaatactctctatgaagcttcaaatgacacaaatcatcatttaacacttgtttctattgtagtttacaagggccgggcacacagatgtacgcgggaatgcaatcatgatcacgagtacgataactgtctgtctttttagcacagtggtaagaaatctctggatgatcaaatgagttacataatatttcttaattgaattggacatttggttaatagattctcttgaaccttgttttcaggtgtttggtatgctgaccaaaccactcataagctacctattaccgcaccagaacgccaccacgagcatgttatctgatgacaacaccccaaaatccatacatatccctttgttggaccaagactcgttcattgagccttcagggaaccacaatgtgcctcggcctgacagtatacgtggcttcttgacacggcccactcgaaccgtgcattactactggagacaatttgatgactccttcatgcgacccgtctttggaggtcgtggctttgtaccctttgttccaggttctccaactgagagaaaccctcctgatcttagtaaggcttgagggtaacgtggaagaaaagctttgatttttttttggtagaaaagggtgattcaaattatgcttttgtgtaaattatccatttgtaatattgtttgtgaggacagaaatctgtcctaacgttttgagagcagaaagcaaacatggcaactttgaagtgttcgattgatgtatgtaattatattcatatttgttttgttgtaacacaaactacacatttgtttatgttttgaatttggttattgcttcgaacttgaggatcggattggtacggtttggttcgatttcggacaaaaatattaataaagaatcatttctttatgtcaaaacaaaaatttagtgaacctaatggctaatgatatcaaaatttggtaggtcttgaaacttataatttaatatatttgttgcaagggagactaccatattaaattgtgaaatttatttcattgttctaaattttaaagaataagtgaaccaatttcttgagtgttttagttttgtcaaaagaaatattaagtgaacctaatgcaataaaagtttggtaggtcttgaaatttatttttaatagaataattgttagttgccaaggagaaagccatattaacttttatgtttttttttggtgattagtcgacgagagaaaatgacgtgaattgaaattggaatacctcgacttggaagttatgagagttatcaaatatattgtcatcttttgtacaatgatagtgtaattatatgttctagaggaaaaaaaatgtttgctatttcatcttatttcattaataatatatatgttataagttaaacctcaaccatacaagctctattttcatgttattttttttttgtcatcatatgtaaaattcgaataacaaaatcttcgattttttttctaaagttcttttaaacaattttatattctcttgaatgagagtttgcaaaaacatagcaaaatcttttctaatctgatatgagaaaaacgtaaaccataataaagaggattcatgagagatcattattagtagcggcaaaatatgatgtcgccaatattgtaacatcaatagcaacaatagagaaaatacatttttatttctttcaaaatctcatcttcttggtatcaaaattttcttacttttttttcttttctttgatttattatcccctaaattttctcaacaaatcttttatttattcttctctctctttcgtgatctctatctctttgtctttcttcatctttttcgttcacctctctaaactatctcaatgcttctttgattccattgtcggtttccttgtactcgtcaatttcatgttttttttttttttctatcaatacatgtgaagtttgaataacaaaatcttcgaagatatttgtcaaattcttctacatcatttaataattgttttgaatgcaaaacatatcaaaatcttttctagtctgatattgacaagaacataaacaataataaaagagattcattagagatcattatatcatcgcagaaata

SEQ ID NO: 29250 - DNA, 2328 bp, Arabidopsis thaliana landsberg
tgaagatctctattctacatttggtggaactatgatcaaatctcgctagcttctatttattctttttcttcttctccataaacattgtatttgtgattttcaggtcggactacatattttcctttccattgatcatcttctttcgcttaatttcccgccttgttttgttttgaaaaatcaatgaatttcatttgatttatttatctacattgaccagtgtgtcgcatattgtatgttattgttattttatgggattactcgtcgggtgctattctgtgtaacttgttgagtattaagcgaagatgtggtagttgttttaataatatagatcctgttgtgatcaaatgtagttttcattaatatggtcataagattagataatgtatatatgtggtgcagctagaatttcgaaagatattgaatctttagagaccaacactctatacaattgatatatcaatcgagccgtgcatgtaggtttttggagtgatcgattacgatctcatcaacattttttggcaacgggagatccactccatgcacctacatacttataagttataagtttataaccaataatgcatgatgattttttttttccattgaatttttgttaaagtttgactgtatcatacaattgcttgttgtagtatttttaaaccatcatattgtagaatcatttataacttcattgtaaaactagacatcaatttttgtaagtttcaatttttaaatattatcattttctatttcaataggctttataagcgaatttatttgcagtttttgttatacattgtcaaatgagtattttctcttcttaattgataacatccatcattatatgtaaatcaagttgtctccaatcatacgtttttaaaattttaataatttaaacaaatttatatttaataatttaaaaataaaattatattactataacataataaaatatcataatatttaacattattattttatagagattttcctgtattatttgattgatagtaaatatatgctttttcattgattcattttccgaacttttggtccatatttacatatataatctttttttttttttttgaaaatctggaagttcagacccaaaggccctacctacatccagagccgtgcctcaaggcataagaaagaaacctttgcctacgtccaaaatttttggaaaaaaacttagaagcatatttttctacaagatactcttagtttaatagacccaatattactgatcatttgcatttatctaaataataagaaaataaaataaaaataaaaataaatccaaagaataaggaaacaaacagaacaaagcattattaagttaggttagagaatcctcttcctttattttttaatcgccgtctttttctacaagactttttctaatcctgttactcttgagccttgaacgtattaacattgactcgttagagtaagtttgatactttatttatccttcttctatcctatggtttgatgtaattcttaattatacatgttgtagttttcccccaaattagaatcagaaattttgtaacacttatgttcgaaatttacagatgtcaggaaataacacaagaactcaaacatccagaggaacagataggaaaaaaaagaaaaaaagagaagaggaatcaacaaaatctcaagaaaatgcgttacacaggtatttcaaaaaacctgaaatttccaatgactctatggagaataatgctgaacgacatgatactacaaaaaatgttggagtagatgaaaacatgactgaatgtggtagagaagaagccacttttgagccagagaatgtgaacgcagagttcaataaaaaagatgatgaaaacaagaatgagaagagtgatgatctcgtagagcattgtggattttctgatatgtatgaccctgcaaattgggaaaatataggtaaaggatggaatgaatggagagattttatggttattcaaggtccatcaaaaagattgccaagtaattacagttttcccaaagatggtgttaaaaggcatttctcacatatatattacacaagacaaatgagtgatggagaaaaacaagatcgtcgttggctagtttattcgaaagctgtgaataaaattttctgtttttgttgtaaattgttcaacaagagtgataattcccagttggcaacctcgggattcagtgattggaaaaatattctgaagaggcttaaagagcatgaatctaaccgtgcccatattctctgcatgaaaaagtggctggaattagagctaaggatagaataaaaatcagcccattgagtaagtttgctgaaaa

SEQ ID NO: 29251 - DNA, 1728 bp, Arabidopsis thaliana landsberg
attccaatccaagtatgcagaatgttaactttggtgtaaaaagtgccatagatgaaactgagctctacctctaaaacccgcaaagcttcgtttggtcttaatgagttgaagaattctttgctgttgttcaactgctcagattgagagctaaacatgagatcaaccacaagacctttaaatatattgaagtacttgtaagcgtactggacagcctcgagatcggtcagctcgttcggtggcctcactaaagccttgggtcgttgacctctctcggcctcctcgatcctaattatctgggtaggctctctaagcatcttcctaactgaatactcctccatgagccttgcgtaatccggtccaggatcaggatcccctagcatcgagtccttgaaggtttcaagactcgctccacgcaacgcttttatcctctctacatacttgatgactccggctacgagcatgagcgatgtgggtaccaaaagattgtttggtattgagagcataaagacgtagaaagtgaccattgcttggcaaacaagagcgaacaagctcctgagccagaggtcattgtcctcaatagcaagagccgtgatagtgtcaggaccaccgaggtgtaagagaaggaaggttgcccagaaagctaaaagatcggtgttcttgggttgcggttcgcttccttgattatctgatatctgtcccaccgcgtactctgctgcccagttggctaaaaggtaagccgaccaaatgagcaaccggaaaaaacgccggtgagttcgttttctgtttggtgagagaagaaccaggattgtctgaagggcaagactgagaatcaccagactacgtatgttccatctgtcccaaatatccttcacttccttcggtattgcctcacccatgctcagttctctccgctgaggtttgactttttgttcaccgaggaggtcttgtagttgttaactatgataaaatacttcaggtcaatggtataggaattcttatcgttgttgttgtttctttgttactagtatacattagaattagattttacaagtcgttgctgaataaatcagcggttaaaaattccaatgtattactccttaatctttttatatggttcacttttctcgtagaattgtctattgtgcggtccctttcaactgcactcaccagcaacttttattttgtggaagctggaaatttagtaactacgttcttcatttttttttctttatgaataaagaaagacgaagggaaaagacctaataaaatatgaagtcatattttaatagtttagtgcaactagcaattgtataataccccgttattgctgtctttgtcggctatacggctaagtttgggagggcacgaagctgatgtccgagattttgctaatatttgtgatttgaattttttttgttcgaatatttagtttttcgatttctatttgttttgtaagaaatcaaatatccgttaaattcaaattactacaggatataatatttattttaaaaaggtaaaaatacaaaattatactcctttagttcttaaatgattgtttttctataaaaaaaaattgtttctaaaaaattgatttaaaagtttttcatgcaatatttattggttagtattagttaattatagttttttaaaaataaattaattattattggtttagagttgtagaaaattgtacaacataaaaagtaatacatatacaattaatattta

SEQ ID NO: 29252 - DNA, 1537 bp, Arabidopsis thaliana landsberg
ctgaaaacattttcctgtgagatgatgagtgattatacggacagagaagaagtaacaccaatgaaggagcttgctgagagatttactatgtatgatccatttgaaactgacaaagaagattcagaagacatatttgtaagagaatgtaacaatgttgatctaccctttatataatccacacctgcattaatctcttttcttttgtactctttcgttggattcaggggaaaacaagacgctatgaaataacgagtacaatagcattggcggtgaaacgcaataaggaagtcatgtttcatgagaggtttcgggagaatggtaaatggaaccccaatgacttcactttcaacatcgcctagttacaatatgaacttttctgagtagtattgttggtactctaatatatcttccacaacactatatctcaaatgtctaagcacatatagtagttgttggttcactttatattttccatctattcaattccatagtatctctttcactttataatccatgtatgcttctcaattccagtgagagaacttgttaattttaaaacttatacgagcaacattatcacaagaagttaaccttcacgctaatcatgttgtaacaattggtaaattatacataaaaccagacggtattatatcaatccaaattgacaatagtctctaattcataatattattatataaaacttattgcagaatatataattctagttactaagctcttaacattaaaagtaaaattcagacctcaataattccatcacttaaactcataagtaggcacaggaggagcatcaaagctctccaaaatgtgagttctgctctctgaatgatgatcctctgtttctttcttcttcttaaacaaactcccaaaccaagataccgaaccagaagaagaagaagaagtctccggtaccggtacggactgaccagatatctgacccataccatatggtaaagaagtagctgcatgatcctccatgaactgctcgttatgcgcagtactctgaactttgtttaacatgataccaactccttctatcatagccaacaacacacctccgactaaagccgatctagcagacgcgcctaagccttgacgcaacgagaggaatcctccagtggctgcaccagataagatcgagttccatggatcttccttttgtcttgcgtacaccaacgcacaatcgaaggttgagtaaagaccaccccacacggagaagcttcctccgcttctcggcccgctcattctcaaagcttgaacgccgccggagagacgagctccgccgggagagttgtagattcctcttatgaggtgatacgctgatccaccaacagcacccatcgcaaacgcacctccgacatcatctaggatccgatccggacatggctctctcgatgattctggagttcccattgattttcgattttgatctacaagtaactttttagggtataagaaaagagcccttgaaaacgaaactaagaatgaggaaaaattacaaaaatggaaaaatatcgtg

SEQ ID NO: 29253 - DNA, 1807 bp, Arabidopsis thaliana landsberg
ccgcctattcatatacacacaacatgatcatcatgctatcatcaatcaattgaattttgaacaatgaagaaaaaatgattgttgtgacacgattcgtctaagctaagctacctatgaccataaacgatttggaagagactaaccagggagatgcatccaccgaggccaagaccttcaaagaactgatggaaagatagtgcagccatgagtggctttatggtgtctatgctctgtgaagctccaagtgatatccctataataaccgaatgcacaactatcccaatctcaagcacctgcgacactatacgtcttctgatcaactcggtcgaaccatgtgtgtgtccgtgactagcgtgcgtgtgaatgtgaacatgacccgcatgctcttcttcatctactactacgttcacttgcttgctcccatggttattgctaaaatgttgcctcttgtaataccctgtcgcgaatgtgtcgatcataagagtccccatcgccgacagcatcgctacaaaaccagcaaacgggaacttcccagctgtagtgtcctcaagacatggagagctcaatctctcgaacgcgtctggtaagatatgaacgaaacctgtgcagaggatcactcctgcagcaaaagctttcaccatgaagaagatatcattttccggttgtaacgccggaatccttttcccgatcaacggtagactcacgccgactcctccggctacaagaagtaaagctatcgaaccaagctttagcttcgtcgctttctctgcttcgtcttgagacacaggatcatcgtgacttgtacaatcactcgaggcacaacacatatgcaaacatattatcaatactacacaaattctcaacatagttgttgccgaaaaacatccacattcagacatgagtttaagatatttatgttcttgttctgtaagaaagtaaagtttgaagagttatggtgaagaaagaggagctttttatagagagaaagcgagagagaacctcacttttgaagcgagtggtccataaatgttagtagcagaatctctagttacgtagagttgaccactatacacatttctttgtttgtcgcacacaaaaaaataattaaattctgttattactcttattgtataccattaagtctttaacaatgactagataaaataggatggaacatttacggaaaaaggctgcgaaagaattcattggttagtataagaaattctgcaagcatcttagattgtagtctatggatggttcaagtaagacgccctttcgatctcttctaatcattacttatctatttatacatttttgagatatacaaacaataataaaacaaagacgacaattcaaagatagatgattagggaaagatcatagagactaaaagtgagtttggaacattattggtcttaaactttaggggcgtagaatagggtggaaaagagattagctgtgaatgctaatccttgtaattattaggttagtacatatcttttcactttaccaaaagcaaaatatatgtgtattatgaattgaaaatttgaagacttttttactagaaagtaaaatgtgaagacagaatgtcgtcatgttactatgtgagccgtgaggagagtggttttggtttgatttgttaaatctacttttggattcaagaaacgtaagatggtctcatcgtcctctcaaggtgggatgggtgggtaatgctggcccaatcaaaccacgtgtttcaaattcagatttcaccatcgccacttgagtgtgatggttacctgaacctaatgagtttggccaacttaga

SEQ ID NO: 29254 - DNA, 766 bp, Arabidopsis thaliana landsberg
taacaaggtggagaacgtagatgcatataggagatctctttgtgggatgtgaagcttcaagaaggttaattatagtaggaacattacgcggtgtgtgaacgcaaaccaatacccgaagctcgctgtctggcttcgtttgttggattgttcgtctcttgtatgaaacagatttcttcactggcttgtaaaggattgttacaataggagtaatgactccagtcataaccaaggccacaagtaccatagtagcaaatgtctcatcatccaaaaccttttggtcttttccaacattaagtacaatcatttcaacaagacctttagtgttcaagagtagtccaagagtgattccttcacgaactggcattccatggaaaaacgcaacaataactgtaccgatgacctttccagcacaagcgaggaaaatgacaagaaacagagttaaccacgtggcagggccttgaatggcagctatattagtcttgagaccacttatggcaaagaagagaggtaggagaaggccagagacgaaatcttcaagcttctcaatgagggttagaccaagaggtccattgggaatcacaagaccaaacacaaaagcaccaaagactgaatgtgttccgattgcatcggtaatgaaaccggagatcataactcctgtcaagattaggcatatgtagaactcactgaaattctctccttcaggggttttacgtatgatccaagcaatgcctggtctcacaacaaaaacacaaacggcaatgaaaac

SEQ ID NO: 29255 - DNA, 2421 bp, Arabidopsis thaliana landsberg
aaattggttgccaaattaaaacttaagagcctaatggtgacaatttagtgttcctaattgtctccccttcaacttttcgttggaaaattctttccatgtgaagaaaaatagaaagacatacaaaaatatagtcaacttattggttacccaaatcgtcctcatgcatgtgaattcacgagctttttaacgtacaatgggaagaatacgtgtgtacttttctattaatcttgtcttaatttactaattttatttacgccaaaaaaaaaaaagtacacacgtattcttcacattgtgttacttcttaaaaaaaaaattgattttttttttatttaaggcaagataatagaaaagtaacacaatgttttgctacttttaaaattttattttgttggtatctcatacaattttcatagatatagataggcccaaacattttcatagatataggcccaaacattttctatatatgtattcatattcgtcaaaattatctcgtaaccataatttaaaactgttttcattatgaaatctgaaaacctacaccaatttacatttgttaataatatacaaacaatattccaagataaatttaaattctaactgccgtaatgtttgtggagttttaagaacatagttgtctatgtacatctttgataaaatttgttatatatatgtagtacatcaaatatctttaatagttacacttttgtcatgtttttatatatttaacctaagaattactttcttttttttggacaaacataagaattactataacatttattatgtcgtacgaaattcattttataacattgttgtattcatgaaatatatgtttgaagttttcgctactaaagattcacagctatccccgctctttgattattgtcatactatgtgcatgatcaaactttatatggaaggatcatccatgttctatagactatttctttttaaatgcaatttgtactttgttttaatcaaatacaatttgttttcgtaattctttagacttccaattaatattttttttaataagtttccaacattcgctatggacttgttaaaaaacagtggactattgttctaattcttaaataaacaactagtgaaaaaaactcaactttgttatgtataatatttgtttttttctcaatgtattgcattacaaatgcacgttacaacctcaattagttgttatttgttaaatattttgcatcatagatgacaaagttggtgggccaagtccgaccacgtctctcttctttattcaaattcttttactcgtctcttctcttcactatttatacgaatccattttctcattctcctatcaaaaattacttgagagatcgtttactttcagagagaagaataacatcaaatattttcccggaaaaattctctcattttctcgggaaaaatgttgtctctgcgtttacaaaattttcctctaaaaaagtagtgagagattccataagaccataaccagtagacaacaaattcttcatcattttgtgtctcttgtttgagatcccggtgaaatttagcggcgacgagaaaattttcaggtagagtgtgttaaaaaatgtctagagtgagttttgaagtgtcaggaggctatcactctgatgcagaagccggaaacagcggaccaatgagcggtggtcaattaccaccgatctataaaaaaccggggaactccagattcactgctgagaacagtcagagaacacgtacggcaccatacgtggacctcacggtagatgtacaagacgatacagtctctgtacatagcttgaaaatggaaggtggatctagcgttgaagagagtccggagcttactttgctgaaacgaaaccgtcttgagaagaaaacaacggtggtgaaacgtttggcgtctgtttctcacgagcttaagcgtttgacatctgtttctggtggtattggtagaagaaagccgcctcgaccggctaagttagaccggactaaatccgccgcgagtcaagcgttgaagggacttaagttcattagtaaaaccgactttgtcgccggttggtctgccgtggagaagcggtttaatcagattaccgcgactaccggtggactacttcttcggacaaagttcggtgaatgcataggtaaagactaatgttataatcttgaaaagtgattagaatgttttttttttgtactgattgaatgaaaatttggtattgtaggaatgacttcaaaggattttgctttggaactgtttgatgcattggctagaagaaggaatataacaggggaagtgattgatggacgatcaactaaaggagttttgggaacaaattaatgatcaaagttttgaatctcggattaagacattctttgacatgtatgggtttcggcaatggtttttgtccttttactttttct

SEQ ID NO: 29256 - DNA, 585 bp, Arabidopsis thaliana landsberg
gggcccacctaaatcttatacatcaacggtataaaatcgaacttggttattagggtttgagcttggtttagttcggtttaaaggacatttgctacttttaaatcaaattcaattgatggatacattcgcgctaggggtggtgatttatggcaagtttgagggttggtcaaagttaaagtttagatattcaaagaaactaaaataaacacacaaaatagttagtaatgaaggatcaggtgtacggattctgcggtggagcgtgcgaagacttccatcaattggtgttctcaggagctgttcctgcttctcccacgtgtgcctgtcacaaatgcatattacattttagattgtatatttgcaatatgcataagcttgaaatataagttacggtttatatatatatggccttctgagtgaaaatattctatatataagtgaaaattttgtatagctcatttcattatgatattgaacgcgagttgctttgagtagaaatcaagcattaagccatcgaaagtaacagacgttatatagttatttgatattaaatttcttgccatatttggaaacttacgacaaaacaat

SEQ ID NO: 29257 - DNA, 2145 bp, Arabidopsis thaliana landsberg
  unsure (1)..(2145): unsure at all n locations
cttattatctctcttcttcgttgatactattttggtgtattttcgttctcgtgctgttatctacgacaagtactacaaatgctttagtgaaaatcccgaaaaacacgaccgttccggcggtaatagtgttcggtgattcaattgtcgatgccgggaataacgacgacatgataacagaagctagatgcgattatgctccctacggcattgattttgacggtggagttgctacgggaagattctctaatggcaaagtccctggtgatattgtaggttagtttgcctgtaattttattttcattaaaattttcattgtagtcttacaccttgcattctttttattggatagctatatctatcgaatgcatgaacttgattaatgatttgcagtccgtgactagtttgattttcttgctctataaaatggtgtacaataaagttaagcacacaaagttgctcactttataataattcaaaaatagtataacacttagacaaaacaaaaaatgaagaatatcagaagtgatctaatgattgtctcataattggcataactcatttgttcttacagcggaagagctagggattaaaccgaattacccgcttatggaaattcgaatttaaaaccagaagagctcttaaccggtgtaacatttgcttctggtggtgctggttatgttcctttgacaaccaaaatagcggtagttaattttgagtacctatgcataatttaactttatctaaagaagttatgttaaaataacaacaatttctgtttatcttgttaaagggaggaatacctttaccacagcaattgatatattttgaggaatatatagagaaattgaagcaaatggttggagaaaagaggacaaagttcataatcaagaatagcttgttcgttgttatatgtggtagtaacgatatcgccaacgacttctttactctccccccggtccggctacactacaccgtcgcttctttcaccgctcttatggccgacaatgctcgttcttttgctcaggtaaagacaatttacaattgtaacttgtaaggttggtaataaggcaataactaatgtcacgaataaggttagtaaaatgttgtctttattaaaacttgtttttatttatgtggtggcagacactctatggatatggagcaagaagaatacttgtatttggtgcaccaccaataggatgtgttccttcgcagagaaccgtagcaggaggacctacaagagattgtgttgctaggtttaatgatgcagcaaaacttttcaatactaagctctctgcaaatattgatgtcttgtcaaggactctacaagacccaacaataatctatattgacatctatagtcctcttcttgatctcattttaaaccctcatcaatatggtaatcaatcattattactttattttcaacatatttttaacatcccaaatctgtttttataataaaagattaaaagtgtatatatctttattatgaatcttataggatttaaggtggccaataaaggatgttgcggaaccggattaatagaagttactgcgctatgcaacaactatacagcttctgtatgtcccataagatctgattatgtgttttgggacagttttcatcctactgaaaaagcttacagaattatagttgcaaagcttttggatagatacctcaacagattcttctaatcgatatagctcctatttcttagcatgttccatacacttttaaataatcatttcaactcannnnnnnnnnnnnnnnnnnnnnnnttttctctttttcaaggcttgtaatggtctcttatgatatttgatggttatatatatacaaggttatacttttatatgcttttttttcttttcacaaaggcaatttttgttctttttccattttcaacgagaaagattgattataaccctcaaaatcacttgtcacagtcctgatggagcttagccttactggcactgcacatatgaaaaaaaaaaaggaaatcaaaaagagaggcaaaaacaaataaacaattacataataaatatctttaataaaaaaagagaggtggccattaagcataaggcccaaggttgacaaaaacaaattatgtataaggcccagttaaatctgatgacgcaggc

SEQ ID NO: 29258 - DNA, 2060 bp, Arabidopsis thaliana landsberg
  unsure (1)..(2060): unsure at all n locations
gaaatcattttcatgtcgtcttctaaccaaattttccagctcgcgagatgaaattcttcttctggtggtctgatctcgatgttgtaagaaaatagagcggaaatactttggtctacttcttggcaatcatcttcaggttaaaatactcttgagccaagaattaagacaggaccagagagcttgttcaagagcctttggaacaacttgtagaatctttctgactcaagaagcttctcatcatctctcaagtatatgattagcggagttgtttccgatacagaactcaagacctacagaaaatgacaataattgtaagacatccattgaaaaacaatgtagcaaacttgtgataaggtttgtctttttaccttgtaaagtgattgcaggaaaagtttctcgtcgaaacatagatttgtagtgcgttttctggaagctagaagccataaggcatagatgaaacaaaaagacgtaagaactaagaacacgaagttgaatgcaaatgtaataagaagatacaataatcagttttccaaacctgaaacagaactcgaagagcgggaagatatgctactgatatcagaagcagcagaagcatttctcttgtgtcttggaagacgattagagctctcagtactcctgaattcaaaggagctagtgagctcacaaagacgaaaaatcgattaaactaacttcaagggaaacaaaggcaaaccttgatttaagatcatttccactggtgtgtcgacgcaatgtccctacattttacaagaatgttaaactctttagatcatgtttgaagtaataagaaaagaaaaatgagggaagagtctgtgttgtttttacctcttggttcaacttcgcgttgagagagcatagagaaggaacccatcaaactcgacactttatctaatgttaactcagaaatagacctcttgtgaaactacaaaccaataatagaagaaaccaaaattacttctctgaaatcatcaacataaaaacaaaacacatacaagtagtaacttacaggttctctgttggtgcatccatatttactctgtatctgtttccaaagaatacaaaatgaaaaagcttatgagctattctgttttgtagtgggaaatagtaaacatgcattgattgatttaccttaatagagaagtcagttatatctaacaacaatagctttgattcaaagtaatgagacaaagcttttgcaagcatttgctgataaaattccgcaggaccagaaagtagaatggctttacttgcaggtgcaagattccgagtgtgcttcgatatatcatactcttttaaatgaacatatgcaacacttgtcaacaattctcgagttctcttgctgccatttgaaaaaatgtattcttcttattagaaaacattaaaaaaatagacaatgtataattcactacttatactgatttatgacacttttgaattcaatctcattcacattcttagaaatgcaagaacttgctatagttttagtttactaaacaaactagtatattacagactggattcaatagtatccaaaaaacagtgtagcagaaaaggattaactaaattagtagaatcacatgtgagaatctttctatttctctctctgactgtctttgccaaatcatccacatgcttattgtgcaactaacctaccccactttccatcaatttctttaatttcttcactttcttagaaagaaaacttttgtattcacagaatttcccatctctatcatttctcttaacccaaatatactcacagattctaagattctttcaccacaaaacaataaaagataaaacaaatcctcatagtgaaaacataaccaacttgccaagttattttttccccaaagattcaatctttttaacagctggcagatgtaaaaaatcataaccaacttgccaagttggtatatcaatcacactcttatctaaaatcncatagatctgaaaanaatccctaaggaacattgaatccttgattaagttcaagtcatagtagaactatatanatctgaaaaacacaaaagaacagagct

SEQ ID NO: 29259 - DNA, 2352 bp, Arabidopsis thaliana landsberg
tctcagattggacaccgaggtaacaagaccttccagatcaatcgttgccgtcttcttcacgtttcgtagctctgtgtttagacccgagacgagatcgagccccatccttctgtaatcctcctctttctcctcaggtgttcggttcttgtttgatctctggttcatgatccgtcccatgatgctgtctgaaaccctgattccttcagacctagagatctcttgtacaacaaaatgaagcagagtagtctttccatctgtgcctttaacatcagagagtttaagcagagcatcgagcttgaatgcttttgcaccaccgcgtatggttcctacattcatcctgtttccagtctttaggacagcttctagaagcttcaagaataacctgcttgatttaagctccttgcaagcttcctagtaaagtacttttaagtgttaatcaccgtaacttgaagtgcaagaaatcaataaacgaatataaagtaaacactgtaatacctcaagcatggagaaggagtttctgagatgaaccacttcatcttcaaacgtttctctataaagcattgcttcagctctctgaaacgcaaatggaactccaacaagagctctgagaaacttctcagctgagccaagctcatccacggctcctttgtagctacgcagcttcaactcttcttctttagtcggcaccatcttcaccaacgcttctagttgctgtaaacacaagccttcccctacagataaacattttaacatcagatcagctcctcaatggattgattttggttgatattagtttacctttccccaaggcagagcagatttggtccgcggttgcgttgagagctttcaagagaatggtaaaattctgaagtcttttaggttcaagaaggtgtttccctggtgatggagttttgctcttcccttcctcattcttcgttgagctttgcatcgtatatccaaacagtgactcaatcatctcttcgtctaatctgaataaccacaagaccacataatcacacattcatgaaaaacattttgttgattgtggctagttaaaaacttactcgaaagagcttgttctgagcttatcccaaaccatagtccggtctggtgtagccctgactttatcccagtgaagtggcttcagtttaggcaatggagctccgtctttgcctaatggtctacgctcagaaaaatcaagagacaatggcggtggaggcgttttattaattccagctacttgaagctgttgtggcgggggcggtggtggcggtggacgcggttgagaatttggtacattgatcggaaagcttgtcttcgaggaagaagcacaaagtttttcacataattgcgacgaaagcgtctgaagattagcggtttctggcgaagacagggtgtgaatacgtttgttagagaactgcggaagcggtggaggcggtggaggtggtggtggtggagcagatacagagattccgaagtcgcttctagaacattcaggaatatccaatttgtgttctgagaagcgttgagaggaaccaacgttaacactaccagaagcagaggaagcatttgacaatcttggatttgaatactgagagccaccaccaacggaatgaaaagactcatcatcgtctgaagaatcattgattacaacaacaggaacagaaacagagtttactgtttgttcttcatcattttcgtgcaccgacacaatctctttggtcgaataactactagcattgtcccaatcatgtgagatctctgtttctatacttgtctttacctcttcttcaagcaatccaccattgataccgttcaaatccttctctgtttctcgtatttctttaacagaaacagagttttgtctctctcaagtcaactcctagtgagtttaggtacaagaaatcgagagtagggtttacactaaccttcctcgtcgagctttgagattttccctttttccttttaaacgacagcgttttaccgttcattttcctttttcttctcgcgcagagacagaacactccaacgacacatactacgaaaccgattgcagaagctgtggaagcaacgacaggtacaagaatcttcttaaatggtgctcctttctcatgttttcgccgttgaatctcgggttgttccaatggatgggtccgttgaggtaacggacgacggagatgtggaggaatcggtcgcggaggagctggaggatacgccggagattccattggaccaccgttgggaaacggagaccgcgacggcgccggccaaggagagaaagaagcatactcggcgagattcttttccgtgagtagagggttaataaattcagtaaagctcaaactttccaaa

SEQ ID NO: 29260 - DNA, 2650 bp, Arabidopsis thaliana landsberg
agagagagagtgtggtgagatgaagaaggaataaagtgaaatatcagttggcgttagcaatatgggcctgaggcccatattatatttacgaggacgttgttgcttaagtgtattttgttgttaattgtcattagtcctattaaaatggtttagtttgcaagttttcagataaagcaacaacgctaaacccaacttttgttggttataagttataacttataaatgttcattagaatcttactaaattaaatgttttggtcttcttcctatatttagattttaaagtatgtcaacacgatttttaaatgaaatttaatgttgcaaacttgcttcttcatgccaacatttgaccgaattacataaaggaaattcaatgctaaaatcgtatttttgtaaaacgctcataatcactattttcgctatagagtatctaataatttccatatattcatgaaattaatttgaaatttgacacaaaattctcgtatttttttaacgtaaataaaggtataacaccgaactcgtattttacgactatgttcgtttctaattgcaccacactgataaaattgtagtcaccaattaattactccggtcgtgaattaaactaatattatttgacccatttggaatataaacccgaccccaacgttaatgaaattgtatcaacgacaagtttcctcgtggaagccattaaatgattgagacggatctttttctacccccattcagtttctaatttaatccttttttttttcgggataaatcctattttaaaccaatgaaaggatttctggtcccatatagtttattgggtgctgctcctttatttttcttggtattttatttgactcccatacatttagatttattcgcattgacccccacagcaagagaccataagtcacgttacgaatcttaaaaaaatttcgtctaaaggtagtcacgaaacattattatgagattcttgctatgtttgagaattatatccctcggaattcagttgacgatatatcaatgtatttttgttcttagtcaacattgtagtaatgaaaatacgattttttaaagtaatgtttgtgagaatgaatagcaaattatatcatcataattacagaaaatatacatatctttaaggtttttccttgaaacaagaagaactcttgacatttttatagctaacacagagtctgaagaattaatctcagtgaatttatattttaaacagttacatatcttttgagatttttgtacaaatgttcatataccaaaatagagagattaagaatctgttgacttattctttcttttgataattatatcggttaacttttcttaccatcagtaaattaatactttgattgagattttgttattagatacaattggtctacgttaaaaaaactagtgacatatttggtgtattaggaggtttttcaaataaagtgagcgtttcatacatcatgagtatgtagttatcccatactcgtaaaatattatggcaagaaggaaaaaatagcatcctccaacaagttacaattcactcaacacctttttagaaacttccatataaataatactacatgtaatatatattggaaatatcgctttcgcattgacaagttcaacgtcaatcaagctagtatggtcaacttttccctaacgtttttgttaagctaaaactatttgatatgttccttttgtcctggttctatatggaaattaaagatagatattacagaattatgcattattaaatgtattttaattgatagataaatgtatttgatttcgcaaaatttaaaactttcgatatgagtatatatttttaaaggtacgtacgtacatctactatttgtttgtttttaactaccaacctatttgagtttgttaaaattcctagtttaaatgcattatggatgttttcttgggctaattgttgagtaaggagttatcgtttctatataactttcatatatatatatatatatatatatatatattttaaggattgtgaatgcaatacttttaagttttaaatgtgttacaatttaggatatttgtcgtgattagagatggtcctaaaaaatctatggacttaattaaaaccaaatattatgcgcattaactaattattgattttttgaaagaaaaagatttgaaaacaaaaagtctacaagggagagagagttgaaatcccggctttaataagctaaaggaaagattttatgatcctaaaattcatgaagacatttttgaggtttgctcaatcatttctattttaagatcaaaactgtcattgattgtgatcacatgtattgtttagttattaacttgttttatataagttcgaccttttggatggtaatctctcatcatattaaaatacattttttgttatgaatatatattccatgaaaatgtaacataagaaacaaaaacaacattatatcttaattttttcctttcaaattacatgaaatttgaaagtttgatgcaataatgaaacttatgatatagaaatccttcttttctttttgatttcagcaaaattacaccatagttttagaaattataaatgttttgattttttttttggagagacggttattgtcaacctttttagtgtcaaaagtgacttttttttttt

SEQ ID NO: 29261 - DNA, 1983 bp, Arabidopsis thaliana landsberg
aggcgatgagcgacggccaaatgaagctactagcggatgattcgaatattaaataatcgatgagagaagattaaagaaagatgttcgaatggctgcactcttttcaatttcctgtctttgtttatcgcggcgaaggtattatgcgaccgcctgcactagtggcgcagacaacgttgtttgaattgcagactccgaaggtaagggatgctatactctatatctagactaacacttactttagtttaatcgatatgaccaaaatgattaacttgcattacagttgggaagtatcaagtaaacaacattttgtttttgtttgatatcgggaatctcaaaaccaaagtccacactagtttttggactatataatgataaaagtcagatatctactaatactagttgatcagtatattcgaaaacatgacattccaaatgtaagttatttactttttttttgctattataattaagatcaataaaaatgtctaagttttaaatctttatcattatatccaaacaatcataatcttattgttaatctctcatcaacacacagtttttaaaataaattaattaacctttgcatgataccgaagagaaacgaattcgttcaaataattttataacaggaaataaaatagataaccgaaataaagatagaatgatttcttagtactaactcttaacaacagttttatttaaatgacttttgtaaaaaaaacaaagttaacttatacacgtacacgtgtcgaaaatattattgacaatggatagcatgattcttattagagtcatgtaaaagataaacacatgcaaatatatatgaataatatgttgttaagataaactagacgattagaatatatagcacatctatagtttgtaaaataactatttctcaactagacttaagtcttcgaaatacataaataaacaaaactataaaaattcagaaaaaaacatgagagtacgttagtaaaatgtatttttttggtaaaataatcacttttcatcaggtctttttgtaaagcagttttcatgttagataaacgatattttaattttttttaaaaagaagtaaactaactatgttcctatctacacacctataattttgaaacaattacaaaaacaaacaatgaaaatgcaaagaaggacgtaggcactgtcacactacaaatacgttaataaaatgtattttggtcgaattataactttccatacgataaagttgaattaacatgtcaaacaaaagagatgagtggtcctatacatagttaggaattaggaacctctaaattaaatgagtacaaccaccaactactccttccctctataatctatcgcattcacaccacataacatatacgtacctactctatataacactcactccccaaactctcttcatcatccatcactacacacatctcctattgcaaacgaacataaaacactacctaagagatcaatatggctggagtgatgaagttggcatgcttgctcttggcctgcatgattgtggccggtccaatcacatcgaacgctgcgctaagctgtggctcagttaacagcaacttggcagcgtgcattggctacgtgctccaaggtggtgtcattcccccagcgtgttgctccggcgttaaaaacctcaacagcatagccaagacgaccccagaccgtcagcaagcttgcaattgcattcaaggtgccgctagagccttaggctctggtctcaacgctggccgtgcagctggaattcctaaggcatgtggagtcaatattccttacaaaatcagcaccagcaccaactgcaaaacgtatgttaatctctctcactctctcagatatttaagctataatttgtttctttttggggttaaatattcgaaaggttatattaacggtgttatattaatttgtatatatgtggttgcagcgtgaggtgatgagctagcaacggtgagatgatgctactaccgg

SEQ ID NO: 29262 - DNA, 3009 bp, Arabidopsis thaliana landsberg
actctactgaaaaaggaccccacacatccatatgtatcaaatcaaatggcctaacagactgattattatttgactcaaaagacaatcttttttgtttagctaaaggacagatatcacaatgagactctaacacatgactcttagacaaagaaagtgtacacgaaagaacttttaacttgtcagaagatgggtgtcctaggcgttgatgccaaatctttccatcgaccgccaaggatccagagaaatgagatgaatgtgatgaagatactgcagatgatggtggtgatgatgcatcaagttgtaaaatgtaaagattgtacagaagaatccctctaccaatcatcaagccctgaatagactcctgaataaagcaaaaatccggataaaaatgagcttacaaatgattatgctttaacagactactaactgatatgagattgaacttaaaagagggaacatgcaaaacagcatgcaatattaatgattcagacaaatgtatgtgtccacaatgcgtgatgtcaaccctagtgtcattaggcaatgagactgtaactctagacactgttacagtttcattaaaaaatcccaaatctgaacaaacatgactagtggctccactgtctattatccaacttccatgtggaagatttgaataaagggttgaaagacattgatgttgaaatgtcaatttatcattctcatatctaagagaagttgaaggaaatgagacagtaccagaagaagatgacagatgcatagcaccgtgttcagtaatcaaagaaactgatgaagatggttcgtggtgttctgaaatctcaacatgagtattaagctgctgaaccaaagtctgaatctggtcattgttcatctgattgaagtccacattagtaacaggtgtgttctgttgagtaaccaccggtggaacacagacattaggtgtgttgaatggaccagtcatgacattagctacagcatgtagaggaggtctgggactagagaacgacgctctaggttgaggaggttgaccaaatgattgctgaaacgatggttgagcaaacgattgttgagatgatggtgaccttggttgataccctggagatgttggattactcttgtatccaggaatatatccaggtggatacccatgtagtttgtaacacttctgaattacatgacctgtcatcccacagtaagtacataaaggacgagaagcacctcttggtttataactattctgtactgcacaagcattattatctgcaggaccattatatgagtactcagtataagctgcaggattctgatcaacagagaacttagcattatcagaagcttgaaacactacattatcactcttgtgaaatggtttcaaatttttctgcctttcatcttttgttaccatgttaaacacttcttctatagaaggaatcggcttgagcataagaatgtgtcatcgtgtagcctcatacgagtcattaagccccatcaaaaacttcatcacacgacttctcgcttgtagcttttcccacaaagcagctgcattacattcacactttccacaagtgcacaatggaagctcaacaaaattcctatattcttcccacaaagttactaactccgtataatatgcactaatatccattgttccctgctgaatagcattcaacctctgctctatttcaacactcttggagcatcatcttgttagaaccgtgacattagactattccatctcccttccgcagtgttgataaacaatacactttgtctaattttttactaacagaactcatcacccatgttgctcgcatatcattgcatcttgaccaagatccaaaatctttatgattcccagtaggtttagtgattgtaccgtcaataaatccaagcttgtttcgaacattcagagccatacgcactggttgtcgccatgaatgaaagtctgccccatctgttaatcgatccgatactaagacgagcccagcatgatccgagccgtgaagaaaaaatgtattgtcatattgatccgtcgattgagacattgttgaagaagatgagtaaagaaacaaccaaatccagaaacgaatgaaatgaagtgatgataatggaagattcaatgtgaatcaatgaagcgatgatgaaaaagaaagatcgaaagcttgatgttgcttttcgacttcaaaaaatcagcaatttgagctgagaaacgatgaagaatggagaagatgatgtgtggaatcgatttagatggtgatgaattgaataaatcgaagataaacgaagaagattgatggaagaagatgaattttcctggaaaatttggttgttaaacttccccaagaaagtgagagagaaagtgaatgagaaaaagtttgttttgctctgataccatattaacagattgtgaatttctcattaaacctcaaatgtgacattacattcatatatataatagataagctaaaggagacttattctactttatagcttaataaacaccatattttctaaaatctgagagttaaaataatatagtctaccattgatttaattttccatgaacatactaaaccttataacccgatataaacccaattctatatcaatgttttgtttttactttacgtgcagttatattataaatgtaagattctaaatttttttggtctcgtttgaagtattcttttaatcttcagatctactttttttgtttgacttacaatattaaagatactattattatctattatattttttactgtttaatattgaatattatatagaaataaaaataattgtcagctacatcgatgcttataacttataagatcgatgcgaaagggagacaattagataactaagaaagatttttaaaaacgaataaagatgccttttcccgtgtgcatgttatcgtgagaccatagaaaagtttatgttgttaaaattaatatggcatcgtctaacacgcggaaacaagaaaataataagttaataatttattgcatcgtc

SEQ ID NO: 29263 - DNA, 1393 bp, Arabidopsis thaliana landsberg
gagagttttacttccctatgatggcatttactgattgttcttgtttttgagattcttgtgtgtttatcccgaaattgagaaaatatttgagtgtacgaagagactaaagagctgatcttaaggctaaagtgtcttattatttgagttttggtttgtaattgtatacacatgaatctacaaagcttgaatcagccttctttatatttctgtttgtgggtggagtttcttagctgattcaagctttgtggaacttaaagatctgtttgcaatttctaaagatctatggctatgtgatgactgatgagcttgaaacggatttaagtttctcattttagtcttagtgtaacagtttttacgaaaattcagtatcctttgagcttttatggaagtaaattcgagaacgtgttagatatgtagagttggttatgattctggtctacattgttataagttagatttcttcctgcagtgtgcttgaccttgcactggttaattattatatccatggtattctctaccacggtctgtatttagttttgatgatgatttttttttctcctgtttttatgcaggtaagttcacgtatggccagtaatactttgaaagagatgaatagtcttcatgtaactgagaagataagtgactgtaaagctagcttgaccaagccatgtgttggtaaaatgaatggaaaatctgaagatagaccattaccaaactctgcctccttggattccagtgattctaaagttgtagaagcagagaaacccgagccagagatagctattgtggaagttgaatatattgaatctgaaaacttggataatgtagacgatgctgatgcagttctgaaggtatgtgcttctgtcttgtgattacatcaattcccattagtatcataactgtgatgaatttgttgtatctgtctattttagagatttggaactacattgtttacgccattaagaatctgtttggtcttattgtttcagtctgttttagctggactagagtccaaggactggatttcactctgtgatgctcttaataacgttcgccgactttcgatattccacaaggaagaaatgatgcatatgctgtaagctttgttctctatgctgatgtttctaaataattgtctcttaaagtagattggaaaatgcaagtctcaccatatcccattaacagtgaaaaagtgataccacttgtcgtgaaatcactgaaaaatccaagaagtgcggtgtgtaaaacggcatgcatgacatctgcagatatcttcagtgcatataataatcatataacagatctgttggagcctctggtaacttttctatctttgctatattctttcactgtaaactgcgaactttacttgttcttacagctggttcatacc

SEQ ID NO: 29264 - DNA, 2899 bp, Arabidopsis thaliana landsberg
ctgcataagcacaccgcggcagattctagtgaaatggggtttgcagagaggaacaagtgtcatccctaagtcattgaatccagagaggatcaaagagaacatgaaagtgtttgattgggtgatccctgaacaagacttccaagctctcaacagcatcactgaccaggtaaacttaccaaactaccaaccagaatctctagatgatcttttacaacgagagtaaattgcttgctatgatgaaatcgcggttactgctttaatgggacagtcattttattttagttaggaatcaccgttatttctgttagtgagaaacagagcacttgttagtcttctctgcttcctgagttcttgttatagtagtaactagtgaggaacaggacagagtaaggaaacagagcacttctttatcttctgagtttgttagagaaaactaacaatattttcagcttattcatttgatccaaatgttcacactttgggtcttatttggccctgatgcagaaacgagtgatagacggtgaggatcttttcgtcaacaagaccgaaagtccattcccgagtgtggctgatctatgggaccatgaagactaagccgagcccgagaaacaaacataactatgtaaggaatgtgtttgttgtaacttgtaagatatcaaatgtacattttctgaaaataaaagaaagcagtctcccgtataacctaaaaactgtatacaaatgctctatgccattaaacctcctcgacgacagaggagagttgttgttgtacggccaaaaccgatgcagaaagcttgagatccctggaaacgagcagatctccgatctctccaagctcctcgatctcactccataccgataatccttgaagcacttcgaaacttttttcgtgtctgattccaaccatgatcagatcgtaattgttaccttcctctctcagtaggttcaccagatcactcgcttcctttatccatacctaagaccaaaatgaacggttaaatctaatccggatttgaaaaccggagaaacggagtcaagacttgtgtgtttacctctcgtaaagcgacattgtgtttgttcatggtgtcttgacggaatttttcgatggttctgaaatcgagtcttttctctacgacgtcgtttaggtgtgagacgttttcaccgtcgacaagtttaagacggttaggtttacgtaaggttggtttgtcattctaaccgcaaaggccagtgtctcacggtcgtctgctccaccgaggaatattgaacagatgttgatcctcattgagccgttcttcatcgccgttcccatgttcttgaaatctggaagccgtccttggtccattagaaccgcaacggagctaggtgaggcattccggacgttgcgacagagccttcgttctgctgcagtcccgtcggccatcccgacaatgatgagatcggtttctttttcgaaggccaaggcacatacatcctcgtgcatcgtcttgctcggtgcaactgctgtgaaacattcaacggaaacgttttcttgcaaatcgtggccgcttcggaatttctcgaaggctttggagatctgatctctgcggctggaagacgttgatgactcgtcgttctgacctggatggtgttgaatgaggagagggacgttattttgctcaagctcttcgagattgacggaaacgatggagagcgaagaggcgctcgagggacaagtacccagctccaagacggtgaggatgggaggaacggtttcacggtggtagaaacaagtgaggatcttgagaggtttgtttggttcgtagtgttgaacggtttgtcgccggtaagtgatgtgtttcctctgcacccacccgtagagatttttgacaatggccgtgaaaatggtcgagtgaaccatggcagagatcaccattatcccaaatgcctcgtggcttatattctgcatcccttaaaacaagtagttaaaagtcaaaacactaattggcgatgaatgatatttcatttgtactaaatcaatgtgtaccttgtagttcaagagctgtttgaagatttggacatcgtagatcccttgtatgcagacgatgaagccgacaatcactgcgtgtgatataggaacttggaagtaaagcgatggaaggacgatggaggcaaactttgcagcactaatggtaaagataaggaactccaaagatatgatgtcacgtagattgaatgaaaagaaatccactttgttaccaatcccgatgacgtaacacggcataagaaccgcataacagaagctaccgatcttgtcagtgagaccagtaccgaaaggaggcgtcttaggagtgacaagaccgagagccacggatccgactacgtaaggaaaccctacagtttcagacaggaaagtggcggtgcacaacatgacgcaaatggtgcatagatgggaagccttgagtttctttccttcaggggttctcttcactatccagttgaatattggtcggcacacaactactataccaaccagcagtagtacctttgtgaaggtaggcagataagtggtcttggagtaattttgatgcaagaaactgtcaaaggtaatcaaaaggaggaaaaacccccagccgaagcagttagccaccattatggaggagagggctaaccttccgggctccgagttcagcatcttgagattcgacaaaaccgaatacgccacttgaaaatacactacggattggtttgttagtaaattgtggagctggtcgggattatttttcgccacggttccacggatgttgctcgtgattactgtacatgctatggcgcccaccacgtaaggaacagaaaaggagataatccattgatgattgttagcttgcctcctcgctttataactaacatgtccacaagagcc

SEQ ID NO: 29265 - DNA, 1837 bp, Arabidopsis thaliana landsberg
atttcaatggagacttcaaaccacaaattcaactaaaattcacccactgcaaaattatacaaacaggaaaggagtttcaaagcggagataaacacacttaacttaaacagaatcagaattatacaacagacagagtatatgtgataagaattacaattgaaagagatgagaaatcttcgaaaccaaccttagtacagatgcgaaggcagaagaagaaccttaaactttcagttcgagaggacatgcaaatgcatctaagaaaagaggaacattgaagaaaacgaaggtcttgtacaaaaaccattgcaagcctttttgggcacttgtttatatcgctgtttccacgtggcaaacaaagtcgaaccagaagaaattttggtttggtaataatttatttcgttagtaccggttctcgaaccaaataaaccaaaccggactaaactcagaaccgataaattatggatccgattacattcaagcagaaggaatcatgccggcttttcttgcataagcgaagattccaccggcgtcgatcaccggaccggcatccccgagcggtttcagtttgtattctttcctcgtcgtatgattgatcagcaaactactaccgtcttccttgtgttcgattgtcaccacatcccctgttttgcactcgtcgcaaatcctaacctccgattccaacgggaaaatctcacctgtagctacacagttcctgaaaaagatcctagcgtacgattccgccaccacggctttagctccagccgctccgagacaaactggagcgtgttcgcgggaagatccgcaaccgaaattatcgccgccgatgatgactgagtactttgatttcatctctcctggaacaacgaaacgttcgttgtagaattttggtaagccgttaagcgcgaaagagccgagtttctcgcgatcttctggaatcgaagggatgagagtgccgtactcggcggggattatttgatcggtgtcgatgttgtctttcaagacgttgcagaggccgtggaaagtctctctggttattgactcgcctgaatcggaggacgatgcatcgacgcgtgtgatgatcgtggcggaggaggaagtaagtggtttgaaattgaaaattgtggaggcggacttgagttgcaagaaaggagatgggcagagagtacaggagtttttgtttgaggaagcgaaggatttgaagagtgtagggtttaaaaattgctgagaagtcgccattgttctgctacttcttaagtgaagcaggaaacgaaacatagtcatttatagagggaaaatgaatatacaatttttaattacgactataagttagtatttacgaaaacgccattctaagtcctaaacgtgcgtattgagacacgaaggttggtcgttgtgtactaaaacgtggactctttcgttgttatctgtttgttaatttggttaaaaatattacactaactcagcgttcaagaagtcaaaagaatgaactgattattttttccagcaattttcagcaaatatgaatttcacactcatggtatacggaaattttttttttatgaaaagtgtgaaattgaagtagttaaaattaccgaaagtacaaaacttcacagggctgacgagtgacgactgacgacgaccatatttgcgacaaatctacaaactgtaattttagtgagggttttgctagttctgtttataggatgaaacaaaaactatttttacgatttcatacgcatattataccctaacttaaaggttcgtcatgtttagctcatctatataaaaatccggaagtaagaattataatattatgtcaaattttcaatcaatcaca

SEQ ID NO: 29266 - DNA, 2382 bp, Arabidopsis thaliana landsberg
atgattcctactagaatatacagtactcaaaatataggtttttacacatatcgatgtgtattcagatgctcaggggtaactgttttgatgctgatagttgcttttttattgaaggaggatttatactacccacatccacttgtgcaagatattctttgggcatcacttcataagattgttgagcctgttctgatgcgatggcctggtgcaaatttgagagaaaaggctataagaaccgcaatagaacatattcattatgaagatgagaatactaggtacatctgcataggtcccgtgaacaaggtatgcaaacttccactacagcctctgtaccattgtcttaacgattgttattattctctttcgcaagttcagtatgaggatatgttcgactttgtgttttctttctgtttatgattccactactattttttttgccagccaatcctcttctttaatcatctgtgttctgtgctgttataataggtattaaatatgctttgctgttgggtagaagacccaaactcagaggctttcaagttgcacctaccaagaatccatgactttctctggttagctgaagatggaatgaagatgcaggtaccgcatatttgtatatatgattatgttatgtagattatatggaccacggttactgctgaaccagtacaaatattatgtctctggaatcattagctcaacagtatacaaatatacactaaaaaatttgatagtactcagaatggctttactacattaacttatatgaagttgggagttttacctagtatgtgtttgatagaatcataagaaagaaacgaacaaccttgataaagctcttccctgtttctttttcctccagccaaccaaagcccctactttactttctatccaattactagttataaacattgaacctgttgtccatactctaatgcagcagctattgacagggttataacggaagccagctatgggatacaggttttgctattcaagcgattttggcaactaacctcgtcgaagaatatgggcccgttttggaaaaagcacattcatttgtcaagaattcccaggtttgggataggcagttaatgaagatcagcgtgttgctttggatgttcttttccctctcatgattgtttcttttcatggtataggtgttagaagactgccctggagatctgaattactggtatcgccacatttctaaaggggcttggcctttctcaactgcagatcacggttggcccatctctgactgcaccgcagaaggactgaaagtaataataatgcgacagagttacctttcaggatttcttttctggtggtaattagttttgtaattcctcttcaggctgctcttttgctatccaaagttcccaaggagattgttggtgaaccaatagatgcaaaacggttatatgaagctgttaatgttatcatttctttacaggttagatttggtttctaatacagattggtgcttcgatcagtcatatgtcgtctttctgctctgttgaccttttgttttttaaatgcatattttgaaaaccaaaacagtttccttgtctaatcagctgaaaatttctgatgtcagaatgcagatggaggcctcgcaacatatgagctcaccaggtcatacccttggttagaggtattgtctgtgtgcctagataatatatactttctgtatctctgtgtccaacacatatttgccttagtcccctttgcttgaggttttaagtgaaaagtttactcatttctgttggcagctaatcaacccagcagaaacctttggcgatattgttattgattatccgtaaggcactagcatattccattgattgaatcatctggttaatcttattttatgttttgcaaatttctcttgatgtgcaagaatggttctgtagttacgtggaatgtacatcagctgctatccaagctttgatatcatttcgaaagctgtatcctggtcatcgaaagaaggaagtagatgagtgcattgagaaggcggttaagttcattgaatccattcaagcagcagatggctcatggtaagtctctattcattataaatctatttgcagaattacatattttcctatattttatctttgtatcttctagttggtttctttttggtaacctgtgatatttccctaggtatggatcatgggctgtttgcttcacgtatggtacgtggtttggagtgaaagggctggtagctgttggaaaaacattgaaaaactctccacatgttgctaaagcttgtgaatttctattgtcgaaacaacaaccttcgggcggaaggggagaaagctatctttcatgtcaagacaaggttaataattactttgtatgttcactaaactctac

SEQ ID NO: 29267 - DNA, 2744 bp, Arabidopsis thaliana landsberg
aaagacaaccgaatgagtaatcagtgtgaactcgtccaccaattctgtcacgagactccaatacaacaacctgaaaggaagcatcttgaagagtgcgagcagctgaaattccagccataccacctccaattactatcactgaaggtgatctcttcttcttcatcttctcgtctgttgagacgcaaatagctgaaacaccaacgcaacatatgaaacagttcagggcacaacagaaaataacaaaattcggattcatgtaatataactgaataacttattcattatcagacaaagtattaagatttcataaaaaaaacaaaaatcataagaagtaaagatgatacctttacgcagctgacgattagttttgcctccggactccatgattcaacaatgaacggagtaattactctcaagattattaaaattagtactactattacacagcgataaaggatctaacgatttctgctcgaaaagaaagagagaaatcggcaattgaggagaaaaactaagaattgagatcagaagactcgtattagtgaagtagcttgcaatcgaaggattaaaacctagttttctaaaaaaattcatgcgattttctcttatctgtttcttccacagagatcaacgaagatcagattcgaatgcgtaatttgaagcaaaacaatgagaaacaaaatcaaagagcgatagaaagagagaggctcaggagtcgggtcgcagctttttctattaataatcgtgtttgttttcagagtgctgatttgtaagatgcttattggttgacttaattaatcacattctatacgtttttattattttagtattttttttctgcttcgctttaatcggaaacctacacgctcgagtatgtgattaggataaactcgcacctgttgtaagacacgtgtcactttagaaggacataatcggtaatgtgatttcaccgttaacttgaggaaactaaaaatcgagtaggtatgggactcgctagtcgctacgtacgaatcgtggtggagtaaaccacgttagcgttttccgttttttgtataacgtatgcgttttgagcattaatatgggttaatgttcatattcatagacccaaaaaaagcccatgataatgtcaaatgcaggcctagtctatcctttttattttgtttttctgatgaaccttgagaacaaatataaaagtattgacacatgtatgatctttaggttcccaacacttgattgatactataattcaactgtttaaaaataagttataagtatgagactaacttattagatctctataatacatttgacttagcttttatgcttgcttaggcgaccaaaaataaataacaatcaccaactgtaagaagaataatttcggaggaaaactatatgccaagtcagcctattttacccatatgaagactgtcggtggtcgccggtgccgacagttgactttgcggtcccgccggagatccaaatcccaacatgtccgctggttgttgttgcacggtctgcatctaatttaaaacatgacacgtcagatattaaataaatatatttgtctttcttcaaaacgatgccgtctgcaactgacctgatttcccgccggcggcatctggggaatcccgcccatgtacctagcgagctgctccgataagatttggttctgtgcttggagctgcaactgtaccgggttttgacatactaaaccgggatggttctgcggagcggaccggttcataaccgggaattgagacaattgcatctgactttgcatagccatctgattaatgtatggagatgattgtaccccgggaaacatcatcggacttgctgctgctgctgccgccgccgccattccacttcccatccacatcacttggagttgcatttgaagtgattttaagtaatcaattgcttcatccaatatcgaagctttgtctgtctacacaaaaaagaagaagaagacaaaaccatatttaaacacaccaatcaattacagcttaattaactcagttttttttctgatgaaaagacttactctgctgcagtgaggtatgagttcttgaagagctttcattctttcattgatccgatctctcctcctctatttaagttatgaaaagaagaaaataaaaaacagagttttgtatctgttttctttgtataaatgttatacgattctctaacattaaactatatattatatattatatagacgaaccgatgaagtaccctttcggagagattatgaacttcagctgctcgactccttcggtttgatcctgatcgttggttcgacttgttaccgattgcctgcttaatgtattatgtattactctctgagatagaccaagattacgttttcaagaagttattatcatgagttagaattaaaggaagcatacatctgatagagatacagattcgtcagtgtgatttatacgttttctcttacggtcggttgtgatgcatcttccactagccatttctttgatatctttgccaaagctgcaaccagaggagccacctgatgaggaacttgcgttcggattaagcttttcttctatgtttttgcttcgatcatgactcattgagacatcgagatcgttctgtgatgggttgcttccgcaatggctaggtccaacggtcgttaccgagtactgttccatttctgtttccctaatccccgatgatgaatttgttaacctaaattttggaggaggcatgacttgaggagg

SEQ ID NO: 29268 - DNA, 1875 bp, Arabidopsis thaliana landsberg
  unsure (1)..(1875): unsure at all n locations
gtgtgacgtcatgatactacgcttttaaaacatcgcatgatgatgtcattagcatcaatctccaccgtccaatttatttagttgttgacaatatcgaccgtctaagttccacaccgacggctataagagtttcattataaattttagcaaaataaaatcagcaaataattttttcttgactaagcttaaacgacgccgttaacattttcttctggctaacatgaacaactctttgaagaaagaagaacgcgtagaagaagataacggaaaatctgacggtaacagagggaaaccgtcgacggaagttgttcggacggtaacggaggaagaggtggatgagtttttcaagatattacggagagtacacgtggcgacacgaacggttgcgaaagttaacggcggtgttgctgagggagagttaccgtctaagaagaggaaacggagtcagaatcttgggttgagaaactcgttggattgtaacggcgttcgagacggagaattcgatgagattaatcgggtcgggttacagggtttgggtttggatctgaactgtaaaccggaaccagacagcgttagtttatcgttgtagacttgtagtccttcatgtttttccccttcttacaataatcaattttttttttaactacaatacttttgaaaaaaatggtaaaagaagattattaacatgttatccaaatttcagattcttcagttttattttatacgtcaaaagagaagttatatatttgcaaaactacaagtcaaacaaaagctatttaagcgtttgacgttcctaaacaacataaattttactaaaatcaatgttttaaaaaagtgttgatggtaaagatatcaattgggcctttgcctggcccgtttagtaatattgcagagtaaatatgggcctgtataagggagtccaaaaaaagagcgggcattgcgggttgggtgcgtttggaactttggattgtggattagtcatggtttatctattaatgtctgcggacttgtggacgacgcgcttgttcttcttcctctgtttgcgacttacgaacatatgatctctcatctctaacaatnnnnnnnnnnnnnnnnnnnnnnnnnnntcaactcatgtatactatgttagtctcttcgaactctacatttgtattattctatcgatcttcgaacgaatcttgttgggaggaaattttatgaagtaatcgttgattgattaggattttgaggtgaagtcaagggactttggaagaagcgagtatctgtttactcaattgtggtcctattggttccaatgccttgaagaatctcgtccttggtggtgttggtagtatcaccatcgttgaaggatccaaggttctaattggagacatttggaaacaatttcataggtactaagtaatgactagtttttgattttttttgttgctatttgtgtagttaaatagttatgacatctctttttcgtcgttgtttggttatagctggtggaagattcaatggtgaacctagatattaacgatggagtagactgaacagtttgtgtttggtgataacacagaattacaaaacttgtggaataaccatttattacggtcaaagtctcttgtcttcaaaggcatgcaatagaacagaagttctccataagcgaaggtttcagagacgagaacaacactgtgtttcagagacgagaacaacacagtgtgtttcagagacaactagaacagaacaggattgcgggccagaccgttagaccaatggacattgcgaggcgaatatgggcttcgattggtcgcacgtggcccttggcggaccggaccggctctaaaaaaaaaaagcaaaagccaacacggaccccaaatttggtcgcgggct

SEQ ID NO: 29269 - DNA, 5627 bp, Arabidopsis thaliana landsberg
gatgatataactcgtcggtctttaatatatggtttctgcgggcaaacctagtgaagaagctggccaagttttaaaggagacgagcaatagagggaatgggatcagaggtagcacttacaggttggtgatccaagggctgtgcaagaagaaagagatagaaatggcgatagaggttgttgagataatgctaacaggtgggtgtaagccagatgagacaatatacaccgcaatagttaaaggcgtggaagagatgggaatgggaagcgaggctgttcagttgcagaagaaactgaagcaatggaaactcttgaaagaagtgtaggaaacgtaattgaagcagactctttttttgctttttctattaagcttttttgtacaggaaatcagtcgtatccggcaatggttgaatcagaaagcttaggcctccatttgttcagtgactgctttctgctatacggttaaacgttaaaacaacaaacaagttgaaagttgtatatttgaatctcgaaacaggtgtcattacaaatttcaacatgctcctaccaaacgccctgagttacattataactcacatctaatctgaagggagtttcaaatgttactattcccataaattttggttcagtctcataatttaaaagaaggaaaaatgaactcaacatttttgcaatgttctatttagtttacaattaccgctgaaagtttggatgcgggtataacatcttcccaccttatgacgcgcccacactccccacagactgtgctgctgccgacttttaatccttggcttatgagtgtaagctggtgcgcgattctagtgcagttgcggtttacaaaacgactcctgttgaagcccctttggctggggcaagggctctgtttgtgtggaaggagaaggttttggaaccactggagattcactgaatgggacccgttgaacttcctcccactcaagtgctctcctataaacttcccaggccatgtctttttcttcctttgtcagtctttcttcttcattctcttgtagcaatgtctcgtgctcatggaaactggaaatccagctagtgaaaaaggacatatagtgttacaaagcaagtagcataaaaaaccaaagattttaggtactgatgtgaatatggttacgcttgtgaaacttacttggggccgtgtctctgtagtaagttctccatcaatttgtcgccaccaacacgagataaagtggccttctttgtccacaagattgcttgctccaccagattgctatgtcccgcttcattttgcttgcttatctcagttacggcttcagatttttcatcatcatcgtcaaattcaaaaagatgtaacatctcttctttggagatagtcctgtgcacttgttgtctatccactactctcgcagctagcccttccttggttacctaatcatattaacagatctgattcatgaatgtctctttgaaggaaagaaacagcaaaattcaacattgttttatgcctttcaatacctgacgtttatatattttttcttcaatagtcccacgtgccatcaatctgtacgcaaatacgggcttcttttggccatacctgcaaccaataagtccacgtataataagccaccgtttgtaatgctatattgacaaattttaattccatagtctagaaaatacctccaagctcgaaatatagcttgaagatcataggttggattccatgaaccatcgacgatgatcacacggttagcagcataaaggttaattccaagggatcccgctctggttgaaattagtgtacatttcactcttttgttgtcaggctcattaaacctatcaaccaacttctggcgttctgagctttcagtttttccatcaattctgcatccatcaagggaagttagagtcttcataattgttcaaaaaacattcacgcgaatataagagaataagataccaacctataccagtctttcccctttttccagaactttccttgtttcccatgccgaggtactcttgaaagataaagttctatgagattgaatgtcgggatactctggctaaacacaagcgccttatcctccacatagcactcatagataaaatatccaatagcagaatcattttgccactgaagtacgacaccttatcattattttttttaagtaggtcgacccaccaatcctggcacaaaggcagggttagaatcagagcatgaccgcctcactacgctgctgtttactttaaagttataggcagtagttactaattcactcaggctgagtaaactatagttaccttctggaggtatccatcaactttatcctgcagatcattcatagttctctgtttctctgtcaatatccaaaacaacaatgacacagattattaatacttttctcactattattgaacttgcatagatgcaaacaaagaaagatcactcctgaaagctccacagaatatgatgaagcttaaaacataacattgctgaatcgaaggtcccttaactattgcatgtcatagattattcttggtaagaaagtcttagaccaataaaactaatcctctattggcaatcttattcaaactggaacggtaccaaaaaggtataatatctactgcacctagtattccttgaattcaaaaccaaaagacatctatcttaaccatggaacaagtccaatgtttttctgttccttctatttttcatactagtttaataaaatcttaaaatatgtgagtagtgccaattaagagttacctcctgtaaccatgttgtagtctatattttcatcacttgaacagtcatctggaatatcaacaatgctaccacgacgaccattcttgctatcttcacttcttaattgcggaatccctggatgattcaaaatctgggagacgtaataccagagagagagttcagaatatgaaaacgaataccagataaatcagttattaacattattattcttaacatttttttctcaaataagttgttaatttaagtatagcaaggcctttatcacatttatacctgagccaagacctggtaagcagcaaaaaagttttttctcatcctttcatctgttcttccatcgctgaacccataaagctcaagaaatctctgatacaatatccgttgcaagggagatagcttgacagatattacgaagactgttttaggtggcagatcctttttcaccacattcatatccattctttgcacaaaacctttcaattgctcatacagaatgtgtgacctctggttcataatttttacatcctccgcagttgaattcatatgctgtccgttttctattggattttggaagctgcaggtatggagaaccacagttaaaactctagaaacataacatcataatagacataaaaaaaaaaaaactggtatgaaagacttgccggtttctaaactcagggctacttcccaagaatccttctctcacaaaatcaaccatctgttgcagtacagacatagctaaagatactggagataagaaaaaattaggtcacaattttatatagttccctcagtaacttacacaataatactccatgagattgttttgaaggggtgagccagttaaggcaattcttctctggcatttaacttgcttcaatgcttgcgttgtgtcagccttggtgttcttaatgatgtgagcctcgtcgcaaacaagtatatcaggtccatcctgcagccacataggtttaggaattgcaagaataaaatattgcaagcagaggtatatgcacaagggaaatcataagcaagagagaacatgaaaacagcaaaatctatgatacagatatggcctttaaatagcagaaatattaaccttcaaaaagtaatgtgtaaacataaacagcacgtcaaacgctttcctaaaatgacctagaatattaacaggatagaaatcaataaaattttgcaagtgacattatagtctcaccctcaaggcattacagatccctctggccgcatttaagtccttcacccccctcccaagagacaggtttctaaaatttgtatatcccatcaaaaagactccacccttctttcgccactttgttagcaaatcaaatcttctctcccttcaaaaaaaacattcgagcaggaagtggatagagaaactgtcaccaaaaatacaacttacataggccaaaataagtgtttgatatatgggccaataggtcagtttagtaggaagttaagacagctgagatcttgtgtttggacgagagggcttgcatctatattctttgattagggaaaagatcttcagatagctttagtataagtaacattcagcagtcttatgggccataagttatggcacaccactatagactacccagcccctattttaaatatctaaaacctagactagattagaaaacataagaatctgaattgtcaagtaccaaaagtttctttcatagaagaatttataccttgaaacatctccaagcataaaaatgcgaagcggtttcacttctgaaggcatccacttctcaaactcacttcgccaattgtgcaacacatttacaggagtcacaataagagcagttttcaaccctaaatcaacacatctcattgcggtgtacaggaatgctataacctgaataggtttaagtgagagaagacataaagagccagtaattaacaaataacgattaaccattagtagtatgcactaatagaatcggacgataatacgatatatccaaacagcctcgtgcatgaaaagaattaagcacctgaaaagttttgcccaggcccattgtatgtgctagaatgcaaccaagacctttatcaccagacttgactctgctgatagactgaataatattttcccacataaatcttatccctgttacctgaaaaaaaaaactccaaacttacagcaaaagctatttccataataggcatttctagtcgagatggctatctttaatacccaatggtataggtgacaagcgagatggaagtatattatgatgatagggatacacatatgtaaatgctaacctgatggacttttagtttggcagatatgctacgaggaaccctcacagcttcttcaccaatctccctaaccacattcactatgtaaccactgtgagcatcaccaagaacctcaacttccgcaccttctggaatagatttcacgtctcccatagagctaattgttttgtatctggcagaaaactgcaaggacctaaggcgctcctgtcgtgcctacaaaaagaaagaacccaatgtacaacgagcaatacttaaataattttttttttgaagtttatatacaagtttaacaaaagcaactgccaaaaaattaaacaccttttcgattgcaatctttgttctcgtatctttccctagttcagcgtcatcgattatccgccgaattttctttttcgatttcttctttgagctaaaagaaaaaaaccatgcacgtaagaaaaataccaaattagttggcaacatgctgaaattttcaatttttgttagatgagtatatgataatacctgattgttacattgacatcagcatctgtatcaacagaatttgtatcagagctggaatcagaactcgaatcagagctcaattc

SEQ ID NO: 29270 - DNA, 3447 bp, Arabidopsis thaliana landsberg
ccaaattaaaaaatgtgagaaccgtagtttcgttttcatttcttaacgtctgtttcttcatggtgaggtagtcagagctctaatatgagtacgattgacaaacatagcaaaaaaatcatgatgacccaaatctcttttgcttaccttcgatgaatataagctataacaaaggatttttaggttttggacggatttggaattggaattctctggccttggactatgtcaagatcttacccgtacgaacctacttggtgtgaagaaaaccaagcagtgcttttggaatttatcgtgtatgtgttggatctgacttggattagagctaatggtgaatatataaagaagatgaacacaagagtttcgtcttcgttgacgtacgagagaaagattaaagccaatcattttgagttttctaaataaatttgtttttctgaattctgacacttagtttctttagtcaaattacttttgaaaaaatgtaaaagcatcactttgtttaaccgaattgtcaattttttgaagattaaaactgattatttctaaccttttttcttcattaggtttctagggtttttgttgctttagggatttctagaattggagatttttagaattggggaacttttggggttaacgggtactaattcgggttggtttatgggtaaatccggttttgaagtttttatttatcggttaatgttgtttccggtacagtaaaccaataataaaccacgaaattagaaaatatggggaccgagatctttaactttcgtttcagggggaaactggagtttaactttcgtttcatgtggactggaaacgagatctgaaatctgtgtagatatggtcatatatgaaacttgctagggggacacaggtcgttcacccaaaaaaaaaatcaaaaagaagcacatatcgaggatcaaacctcagaaggttaagattagcatggggtgacagttaccaacaaagctataaacatattatttacattacataattattaagtttagtaaatctacctaggaaacaaaaaaacaatccgtccataaacgtagattttgttaaatttgtgactgttttgtttgttgacgagcagcctaacataatatgactaggataatctcaggatgacatatacaaacgagatgtcttgccgaaatattttctgataatcaaaccataacaaaagaaacctttttttctttcttctagctaggcgttttcatattctatccctctttttccattttagtttgtttttaatcatttttaggcagtccaactcaaaacacatttgtaaagtcttccaaaaagaatcaatattacatgttattatttctttcaactcaaaacacgcattcttttatagttgaatccaaatattgaaacatcaacaatgtactaatacaaactactaaactgcaaacccatgtcgcatataatcgtgtctattacccattatcttaattttctatttagtcacattataccgtattgatcagtacggacgagtattagcatcacccatcggcctaggagcatagttacatacgacccaaacatactcattcttaaaacacctaaccgtaccacaaccaaggtgtgtcgattgattagccacaatctgagtataatgcccacacggttcactgcatttgttggtggcataattgtaataaggcttctccgtaaaccaaaactttgtcgcgatcggaccgctcatggtgtccataggttggacccacccggcggctatattctctccgtacgttccgtcggtggaatgtttcatggcgcagtcttgggaacgtacgttagcgtacctctgtgcatgggcagcaagtttttggtcctacaccaatggagcaaccccgaccgcagctcgaatctggttgtgaaccgctagtgtttctgccggttggagatcgtccattcggctaaagcttctcaaaccatagatttgagttaagacgatggacaataatgttagtacgatgaagctataacctgaaaaagacattttctctcttttgtttttgttgtagaattggtttggaactaactatgttttcgtgaggacttatcagattccttttctgatgggttttcatctccttttgtaagcctcaaacaaaacaagagcttcgtgactatttttaagttttcaatattcaccattaaaccaaaaaaagaagacgaagttgtttttctttttgttaaattatcaaatagtaaaacctatatattgctcttcgaaattgcttaaattaacagaaattaggatgagattctaattttagagtaacaaaagatatttatcattaagttatcactaaaaaaaatattctacttcatcattaatgtattcccataaagattgttcagtaacagaaatctatttttagacactattttcgtattaagaagaattttgctctctgagacacactaattagatgtttccttacaaatcctttaacgaaattctggtaaataattaattaattaagaaagtcaaagtgaaaaacgttcgttaatctccaatcggaattttgattagtcttcttagttacgtacgcgtatatatataatctctattaactctcgtgagtttcatttaacacccgtgatatttgttcgacgtatgtaaaccatttctgaagatcattgtgggataatattttgtaatgtagagtaaaaaaatatgcttagtagtcaaatggtttctagtaactgaatttaacattagaccaaaaaaaaaatgttctagtaattgactggatctgattggtctttgacatgtatgtttatatattaaataaatagtaaatatttgataaaatagtatatataaaaaaaagaaacaatttgtcagtcacggactcgaattaaaccttatgcctaaaaacttcttacgtaattgaacttatatcgatctttcctttggatttggagtggaagataatcaagaaaaaaaaaaaaaaaattacgagtttaagtacgttctctaacgaattggaacttttagcacacccgtgagaaaacgtacaacgctttgtaataataaagaacaatcttaaccgaaaccgataaatacctctaacaatatggttttgatcaatttaataaactcagtaaagagaaacatactacgcacgtgaactatatataactcgattcataagtagatactcaatgtcggtgagattgattattcatggttgagataaatgtagggtaacgatatttccacccaccgagaaagaaatattctcttagagttttgggttaatcaaacaaaacaacaactttaggaaagtagtggtatcgtttagaagtccaatatagctctttaggagggtcctttaaatctcccaacacgagattcaacttttgaaactgtctttatatgaaattcttttctttccttttctatatattatt

SEQ ID NO: 29271 - DNA, 1730 bp, Arabidopsis thaliana landsberg
  unsure (1)..(1730): unsure at all n locations
catttcaactcccacgggttgggattctctgaaagttccaagcttttcagcttccctagctatccgaacatcgaaaggtctgtaatactccactagaaacttgatggcgaatctagaaagcaatgatgtcacaactattgctagcaagcagaaccagaacatccatgtcttgcccacttggaaaattgccctgtttaagaaaaagcgatgacactttcagtatccagaagatatatttttaatttgcttctgacagaatgatatgtagagagaatgaactcttaccagtaaccagggagtgtgggtataacatcaatcacaatgacacatatacaagctgcaacaatggatccccatatggcggcgtgtgtgatccagttccatctgatcacatccatggccaagtgaagattaaccaccacaactgcagctatcgtccataggtctcctaggctcgacgtgtcaattgtactgccccaataagcaaacataggaatgaagaagatggctgcactttgccagattgtgtcaatcattgtataccagaagagcgtagtggaatatccctctgccctctggccaacaccgtagagctgaggatgatcaagaagagtctgccttccaaggtctttgtcaagaataccgataattattgtagggattgctgtgtatatgactgagtacaaaacactgctccattctgtgatggcagttgtcaaggtgtagcaagtaaacaaaacgtacctgcgtgaaattggtgagtgttagtctgcggtcattgttttaagacggaatagtacaaaacatagtaagatggtaactcaccaaaataaaattagaacaaaaactgcatttctatagaaannnnnnnnnnnnnnnnnnnnnnnnnnttggtaattccagtgtccatggacgagcaataacggaactaaaaatctgaactgtcccattgcgaaatcagatgccatcacagcttggcgaccttcttgtccgcttatccctaccccaacatcagccatttgaatcattgagacatcattggcacctgtcaaaacacaaagcatatgagaagatgaaaataaaaaaccaaagaactgggtctgtttagacaggatcaggcagactactttttggaaagaagagtggggtcattaccatcaccaatggcaagagtcatgtcagaagtccggttctttacaagtgcaacgattccagctttctggaaaggagcaacccggcagcagagtatcgcagagcacttacatgccacctggaacagctacattgcaaaaatgagcaattacatcaccatcatagaaagtcataagcagagtacgcaagatattttaatcaacatttcacttaccacatcttcaagatcattgtcgagtacatatatgaggctggtaccgtcaataatcaaggccacattatcactttcgtcattacttgcaatactggcatttgcttcttctaagctcctccgacatgaatccaacgagttgctatttattacaatttgcctcatgtttcttgtcagaagcctcgatgagaagccaatggatatggcagtttcttgcttgtcaccagtcaagacccagacttttatccctgcaatcctcaaagattctattgcttcagggacaccacgctgcaatttgtcttcaattgcggaggctcctactatcctaaggttagtctcaatgtttccagcaacttttcttagcaat

SEQ ID NO: 29272 - DNA, 1894 bp, Arabidopsis thaliana landsberg
ctatgatataaagctacctttttctggaatgacattttacattgtcatttatttctccgaaccactaagccttggttctgaccaaaagcggtctttcaatgtttactatgaggacaagcaagtgggttcagatctaattgtgccacctttcggggcagtgactcaagcttctttgagggatgtggtgaagactgagcttgcctatctgacttttgaagctacaccagactcgactttggacccactcatcaacgctctcgagctctatgtcattagtaatagtggtggaagtggaaacgggacgaattcaacaagcacgagcggtggtggcagccctagtcctggtggtggtagtggcagcccccctagcactggcggtggtagtggcagcccccctagcactggcggtggtggtggcagcccaagcaagggcggtggtggaggcaaatccggtaattattcttttcattatcttatatatatgttgtaaaatacggttaattttaataattttggtttgagataaataatgaatagaagaggctactaattctgacaataataagaaaacggtttgttttgtagaaaagatatcaatctatatattaatatataaatctatatatataagtaactctactctagtggttctttaaaatatatggatactgaattgaaagggaggaactcgtgtgggtatattaattaggatgcaagatttagcttctagttattgacgatcaactgccttttatcaacatgcaagatcataactaggcttaaaggttagaagaatgggaagtgtttaaccaaaaactttcattgtaaaacatagccgactaggaggcggtttagtccgactttgagccgtcatttttctagatagattggtcaaaaacatgctctccaaattactagctccgtaagaaaattgacttaaactgaaaactaaaattataagtcacttttcttcgtttgaacgatattttaggaggaagcaataatggagatggaggaaccaacaaagctagtgaagatgaaaaatctgcaggcatatcagttctcaatattttttttaattaagatgtttttttccatattaggacttttagaagaatagtcacttaatatagtttgggacaatttctagagattattttcaaagtttttgtcgtataacaatatcatttatataaaaaaaaaacatttatgaagctttggatgttaataatcatgttattattgttatcaaatgatatgagatcgttggttcgagtctaatatgtggtacgtttgtgtttgtgtatcaagattcttcaggtaaatcaggagaggagaaaagcagcagcaacttagctttacctcttggaatttcattaccgactttgttaagtcttggagctggtggttggggcgtctggaaatatttcatcaaacctaggcgccacccggaatcagaatgttcgtattctccttttatttttatttttattaaacttattgcaataaatcttattactttgagtggctgctataatttatatatgaattaattaatgtatataaatatttatttatggttgcagtgccactcaaacagaatataacgtttacaagtgaatatgggaaacgcaacagcagtgaatgctgagcaatgacgactacttacatctactacatgccggatccatcatcactcatcaccctccaatatatgttattcttttttcctactgatttattggatgttagatgcattttatactattacagtcttttcatcgtatgtatcacataattctatacttaaacaaaaatcactatcaatcatgaaatgtttatctctatggttttctacaccataagttcgagctataacatattatgtgttgac

SEQ ID NO: 29273 - DNA, 1574 bp, Arabidopsis thaliana landsberg
agttgttgattcattgtttcaggtatgttgaagtgataaagagactgattggattgtgcttatatgtcagaaacggaacaggggatctttgagcaggttttgaaaggtgaccttgattttatatcagaaccatggcctagtgtatcagaaagtgccaaggatttggtccgtcggatgctaatcagagaccctaagaagcgaatgactactcatgaagttctctgttagtgttcttgtttccaaataagttatatctttttgataagagtaagtactataaagatttgtaaaatgttgaatttatattttaggtcatccatgggccagagtagatggtgttgctcttgataaacctcttgattctgctgtcctaagtcgtttgcaacaattttcagccatgaacaagctcaagaaaatagctatcaaggtaaacattttgaattggtttctatcatctataccaaattatgtgcaagatagagagttatacgtgatgtatttgattcaggtaatagcagaaagcttgtcagaggaagaaatagcaggattgaaggaaatgttcaagatgatagatacagataatagtggacacatcactctcgaagaactcaagaaaggtttggacagagttggtgctgaccttaaagattcagaaatactaggattaatgcaagcagtaagtccatttttatactgaaatcaccttttgtttactatatgatgtgagatgtgtgagataataatttggaaaaatatgaacatttgatcaggcggatatagataacagtgggacaatagactatggagagtttatagcagcaatggtgcatttgaacaaaatagagaaagaagaccatttgttcacagcattctcttactttgaccaagatggaagtggttatataaccagagacgagctccaacaagcttgcaagcaatttggcttagcggatgttcatttagacgacattttacgcgaagtcgataaagacaacgtaacaactcattaatatgcaattgatattgctttacctatagttacttgcaagaacattgttctttataatgatgttatatgattgtttttgtcaggatggaagaatagactacagcgagtttgtggatatgatgcaagacactggttttggcaaaatgggtttaaaggtgagttgaagaaacaaaacctcaatgaccccattttttccaacacttattttttcttttctctttttaagtataatttaatctttgtggatatatgtatatgggctgcttactgcttagcattagcattcttgagcaggtttttgtcctctctatgttccacattttttttgtatttaagtttctcatgagtcatgtcctttaactctccctttactcaactaggagaaaaaatgtataggtttcactttggaagataaccaaagattgtaatttcatttttcttatatgtacttttagtaggtcaatgtaaaactctagaaattattgaaaatgtttatgtaaattattacacaatatcgattttaatttgtaaatctagtgagtgataaaatatttaatctttcaca

SEQ ID NO: 29274 - DNA, 1468 bp, Arabidopsis thaliana landsberg
caatgtgtctcatggcagggactgtgaactgtgcttaagagtctgtgatcgaacttcattcccaacagttatgtaatggtactctgacctcatacgcgtagttcatgacgtaggtttgtacccacgcgttagcttgtgattggctcgaggccacgctctgtaggtaagagttgggaagacccagcgttacctcgatgttggagccacgtagggcggctagaacgtcgtggtccggactgtatagcctaactcgttggatgtttttctgtttgaagagcgcaatggtttctgccggtgaagggaggttgttgccgtttcttccatagcaaacgccgacttgtccaactgttaaatattaatccaatatttaatacatttatcacatgtggcataattcatgacagaattaatttgttactaaatatttcatgagagaattaatatgttccttcttttgtcataggactaaaaaccttagactttacttcatgtaaatcctaatattgatcatatctaatgaattatttacattcttagcaaaaataaaaaagagaattaatgtgttactaaaatttagtgactctattatttttttcattgttgttaatcataaaacatatctaatcatttgaatatttgtttttaacttttattttcaaggatttgaaacatcaatataagtgacaaattaaaatttcaatatttaaataattttggttttaaagctaaaaataatagttaaaaaggtctcaaaagttcaagatattgacatggtttgattactctatgtcagggtgatattataatataatcacacatgttatattttctatatacataatgaaataaagaggtattaagtgacctattggatttgtattgacgaagaatagaccgagaagaagggtcaaggacgccaagaatcggagatccatcgtcgttaggtgaagaaagagatgatttgtagacaattaagagcgaggtggaaatcatttactgttatgacattgatcctagctagcataaacaatatatatagtaaattctagagaaagaacattaatatataaccaaatgtaaaatgtcaatatgaaactaaaattaatacacggaattaggcaacaagataaaattatgagttggtaatctctgaataattaatacaatggtgtaatatatggtaagctacataatcagagacagagagagacatttgtctttcttgactcttcataagtgcactcacaagtcaaacaacgcgtgtgatttatgagggcttagccgttaaaggtgtggttgaaatcaagtaaagaactttaattcagacaaaatcaaatgctggttgggctaaccaaaactactagtaatactaatggtctttaaacgaaatgagcccaataaagaacctgagacaaatctgagcccacttgaaagctaaaagccgcctaaaaaggaaacctaagcttaa

SEQ ID NO: 29275 - DNA, 1872 bp, Arabidopsis thaliana landsberg
caacgtagcgctattcttcagaatgtcattcctgtgaagagagaagacctcggtagttttgttttgtctggttggattgtagaatacactttcaatagatgtctttgtgatttaagggcaggtgtaagtttgatgcctttctcggtggctaagagattgggaatcaagaattttaccccaacaaagatgtctctggtactggctgatcgttctgttagatttcattcctgaatactgctggtgcatggatagatgtgagaaagagcatgatcaaactgcagattggtgacattgttcaggaatttaacatggagagaataatgtctaagcccaccattgagggtcagacattctgggtagatattatgaataagctaggtgatgagcttcttgttgagttgaacacagaggatcctcttcaaactgtttatattaaagaagagagtgagtttgggtaccttggagaagctaccaaaggatttgctaaaatgctggattctagttcaccaatgactaaaatggtagcatttgctgagcttggagacaatgaggtggagaaagctttggttgtacctcaccaaaagactgcaatgattagagcgagctgaaagctccaaaagtggaactcaaaccacttcccgccgggctaaggtacacgtttcttggtcccaattctacataccccatgattattaatgttgaactaaacaatgtggagagtgcctttttgttatgtgagttgagaaagtacagaaaagccttagggtattccctggatgatatcacaggcatctctccttcattgtgtatgcacaagctacatctagaagatgaatcaatgacttctgtagaacatcaaagactgttaaacccgaatcttagagatgttgttaagaaagaaataatgaaacttctagatgcgggtatcatctatcctatctatgatagtacatgggtgagcccggtccatgttgtgccgaaaaaaggtggtgtcactgtgattaaaaatgaaaagaatgagctcattcctactagaactataacaggaaccagaatgtgcattgattacagaaaactaaatgctgcaactagaaaggaccattttcctttatcattcattgatcaaatgttagaaaggctagctaaccatgtttattactgttttcttgatggctgtagtggtttctttcaaattgtacttcaccctaatgatcaagaaaaaatcacgtttacctgcccctatggaacttttgcatataagagaatgtcttttggtctatgtaatgctcctggaactttccagagaacatgacttcgatattctcggattttattgaggagataatggaggtattcatggacgatttttcagtctatggatcctctttctcctcatgtttgttaaatttatgcagggttctagaaaggtgtgaggaaaccaatttggtactcaaaggggagaagtgttacttcatggttcatgaaggaattgtgctagggcataagatttctggtaaaggaattgaagtcgacaaggcaaaaatcgatgtcatgattcagctgcaacccccaaagacagttaaggatataaggagctttctaggccatgcaggattttacaggaggttcataaaagatttttcaaagattgctcgacccctcactagattgttgtgcaaggaaactgagttcaactttgatgaagattgtctcaaagctttccatttgataaaggaagcattggtgtctgcccctatctttcaagcacccaactgggaccacccatttgagatcatgtgtgacgcattcgattatgcagttggagctgtcgtagaccaaaagattgatgacaaacttcacgtcatctactac

SEQ ID NO: 29276 - DNA, 2947 bp, Arabidopsis thaliana landsberg
tatcgctcttacagttgttcttgtttatcaagtcttaatattttacccttacctttacttctccctgtttttcctcttccttaaattcatcttcaagcttgaatttcatttcactaatcaattactttcctcgttatccttttttgcagtcaagttaaattgctctctttcaagacttgtgttctttaaaccaaaaaaaaaaaaaaagtatctgtgttcatcaccaactcattcttctttcagatctagggtttcatgcttcactcaatttttttttgtttaggtagttccatcttctaaacgttgtatttttttttttttgccatcataatcatatggagttcgagtcagtgttcaaaatgcattatccgtatctcgcagccgttatctacgatgatagctccactttaaaagattttcatccatctcttaccgatgatttttcttgtgtacacaatgtgcatcacaaaccatcgatggtaaactctaatcctgatctttttttcacaagaatctcacattaaagatctcaatcctatcactttactcaaaatcttaatattgttccctatcactttgatatgcagcctcacacatatgaaataccatcaaaagaaaccattaggggcatcactccttctccatgcactgaagctttcgaggcatgttttcatggcacatccaacgaccatgttttttttggcatggcctataccaccccaccaactattgaacccaacgtttcacatgtctcacatgacaatactatgtgggaaaacgatcaaaaccaaggattcatctttggaaccgagtcaaccctcaatcaagccatggcggactctaatcaattcaatatgccaaaaccactcttgagcgcaaacgaagacaccatcatgaatcgacgtcaaaataaccaggtaatgatcaagaccgagcagatcaagaagaagaacaagagatttcagatgaggaggatatgtaaacccacaaaaaaagctagcatcatcaaaggacaatggactcctgaagaagacaagtaaattcaacatctaattttttggaattctcataaataattttcttaatctagtatgatattgtttttaatattaatattttctaatgattctacctatatttaggttattggtgcagctagtggaccttcacggaactaaaaaatggtctcagattgctaagatgcttcaaggacgagttggaaaacagtgcagagaaaggtggcataaccatctccgtcccgatatcaaggtctcttattttattttattttcattttcttattttcataggagaaacaaaaacaaaatatcatcttcgatactttcaaattcattacatgatacattgagaatcttctaagagaatattaacaaacttttttcacacttgtcaacatgtatacggttttatttcatgcatgaatactttaaacttttgtttgtatatacatatatgtctatgacaattctttaaggcattttgtcttcttgttgcggacaaaacttcacaattggtcagacatttaaactaaagtcattgtcacttggattctctcatataattcaacaaacatgaaagagaaaaaaacatataaaaaataaaaatatttgtttaatattgtatgtattatttacatataaagcatattttatgtggtatgttacagaaagatggatggactgaagaagaggatataatactgataaaagcccataaggagattgggaacagatgggctgagatagctcgaaaactcccgggacgcactgaaaatacgatcaagaaccattggaacgcgactaaacgtcgacaacactcgaggaggactaaaggaaaagatgaaatttccctttcacttggtagcaacactcttcagaactacattaggtctgttacctacaatgatgatcctttcatgaccgcaaatgcaaacgcaaacattggtccaagaaacatgagaggtaaaggtaagaatgtaatggttgcggtctcggagtatgatgagggtgaatgtaagtatattgtggatggtgtgaataacttgggtttagaagatggaaggatcaagatgccgtcattggcggctatgtcggcctccggatcagcgtctacttctggttctgcgtctggttctggaagtggtgtgaccatggagattgatgagccgatgactgatagctggatggtgatgcatggatgtgatgaagttatgatgaacgagattgctttgctggagatgattgctcatggtcgtctttagaccgtgcaatataaacaagtcgaacttgattatatctacctatataattatgctatttatgaaattatgtttgtgcttttaattgaagaattggacatgtaatatatattgtggtttaattgaaggtttcttttggactaaacaaaaattgaaggttttcttgctttatcagattttttttttgttattctctaatttcattttaattaagaatctatatatattgttaaattttctgttatactatatgaatggtaattgcgtttgcggttaggagaagacgaccattaggtccacaacaagtacatttagtcactaaagaataattttatatcgactatgctaaagaaaaaaagtactagttgtttacaaaatatctggttagtatgatgtaatatgggataatatgtgtatggtccgttgtattgtaattttctggaatttgttaccttaccgtcataatgactatatggtccgtcgtattgtaataccagaaattttaggcaaaacacaaacaaaaataaacgtaatgagagttttgtatacattatattttggttttccatttgctttgtatatcaccattcgaaaagtcatacataacttaaagaaaaatacataaaacttttgggatctattttcattaatgatattttgactaactac

SEQ ID NO: 29277 - DNA, 1857 bp, Arabidopsis thaliana landsberg
cttcttctaaaatgtcgccttcttttagagcaactccgccaccgccttcttctaagatgtcgccttctgtcaaggcgtatcctcctcctccgccactgccggagtatgagccatctccgcctcctccttcttccgaaatgtcaccttccgttagggcataccctccaccaccaccaccatcacccccgccaccatctcctcctccaccatacatctactcatctcctccaccgccgtcaccatctcctcctccgccatacatttactcatctcctccaccacctccgcccgtagttaactgtccacccacaacacaaagtccctcacctccgaaatatgagcaacctccttcaccaagggaatactatccatcaccttcaccaccttactaccaatacacgtcttctccgccaccgcctacttactacgccgctcaatctccaccgccaccaccaccgcctacttactacgctgttcaacctcccccgccaccaccaccggtatactacccacctgtaacagcaagtcctcctccaccaccggtctactatacaccggttatacaatctcctcctcctccaccggtttactattcacctgttacccaaagtcctccaccaccaccaccggtttactatcccccggtaacacaaagtccaccaccatcaccggtctactatccgcctgttacccaaagtccacctcccccaccagtttattatcctccggtaacacaaagccctccaccgccaccaccagtctactactcaccggtagcagaaagccctccaccaccatcaccagtctactatccaccggtaacacaaagcccacctccaccttcaacaccagttgagtaccatccaccggcaagcccaaaccagtctccaccaccggagtatcaatcaccaccaccaaagggatgcaacgacagtccaagtaacgaccatcactaccaaacaccaacaccaccttctctgccgcctccatattacgaagacacacctcttccgcctatccgcggtgtctcttatgcgtctcctcctccaccatcaatcccatactactaagtttaaaccatgcatgatcaaaattcttttggcatcaacctatttgtgtcttatggttgatacgagacattcgactttttttttttccgagtaatattttgttcttttatttcttgattaaacagagaatatggagtatatagtttcacttattttattattggttacccatctcttatatgtattttcctttcttctataatgttcagtataattatacattcccttcacaaaagcctcttctcactgtagaactcacattgtctttttaatttctttcatgtaatttgggaccatccttaaaaggtggtgttgtttattgttgttatcctcttttctgttttctccttttcttcggcaaggcaaaagaattgtaggctgaattcttctaagagtttgtattcattttgacagaattgtttatgtttatgaccgttattctacctacattcaaattaatagtgcccaaaaaaaactctaccagatataaagatcacaagaaaagtgaagagtaaattccataaatacacaaacggtctcttatttctgctcatttaatcaaaagctaaatcatttttctagtcttgaaaatcgaatgtaagattaaatagatattgatgatcaaatattcaaacgagcattgatttagactttgggagaatgtatatacggtggatcattgccaactcttgcggatgtcgaaggtgtagaaaatctcaaagtagcatttgttatcgtcatcgatgaactgaaatatgtacaataagatgacatcaaactggccaag

SEQ ID NO: 29278 - DNA, 3723 bp, Arabidopsis thaliana landsberg
ctcccattaagagtattttggtctgaaaacaagtgaaaagacaaacggtgaaaaccatatctcactttgacaaaccatgagaacaattcttttttcatccacttatgtgaaaatttcttttgtcttacatataaaacctagaaagtgaaattctaggttctatgaaatcgaagatcataccgaaaaaaaatatatatgatatataaatttatcaaaagaaaaagaaagaattcatttgtttattaatccgcagttgaaccagatcaaccagctaacccgataacccgaaagttacttaggttcacaatttgggtcgggttgatctatatacatagcaacatgatggaagactcgtgaccgtcatcactcttcaaaccctaatttgctacttctctgctcttgtccgtgtgagtctaggccgactaactctgtcttgtctcaacatctgaaacaaggatataaagtttgtgggtgcttccaaagtggagattgttgttgtgccacataatgggattttcctttctccttgccacggtacaaaaggagagaatgaagaggaggtcgagaacaagaagtagaagtagacgaagagcgaagcaagatccgaaaacttgggtcgcaagatatatccctcaggatctactgatcgagattctgacgagattacctccgaagtcagtgatgagattcaagtgtgtctcaaagttttggtcatctctcttgtcctccagatatttttgcaaccgttttctcatcgtcccatctcaacctcaacctagtctttacatgtgcctattggatcgatacaactactctaagtctctcatcttatcatctgctccaagcacgtctccgtattcctttgtattcgaccaagatctaaccatccgtaagatgggaggtttcttcttgcggattcttcgtggcttcattttattcactagaaatttaaaggcgcgtatctataaccccaccactagacaacttgtgatcttacctaccataaaagaatctgatatcatagcaggacctccttataacatcctctattttatctgccatgaccctgttaatgatcggtacaaactactctgcacagttagttatgcatcagacaatgatttgcaaaatttaaagtcagagctttggattttcgtactagaagcagggggttcgtggaaaagaattgaattcgatcaacctcatctccctacgagactaggattgtgcgtcaatggagttatatattatttggcttccacttggaagcgtcgtgatatcgttgtcagttttgacgttcggtctgaagagttcagtatgatccaaggacctcttaagctgtctgcattttctgagtcagtgggatttatagagtatggtggaaaaccagctgtttttgattataccattatgaaacaaacgggtttggtggacttgtgggtcttggaagatgctggaaaatggtcaaggaaatctttggttttgcagtcttgtcagatgcatttagtcgataatgacattcagtttaatgtggaaggtacaactcaaaacggcgaggttatcttggcacccgaaacgattatttcccctttttacattctttattatgatatacagaagaatgatatgaggaaggttgaaatccaaggaatgccggaccataagaaggatgggatcaaaggaacaccggactttggtttcaaacttatggataagagtgaaagcatcatccacttggaaacttgaataccattactttgtatttcttcttttatgtgttgttaaagattatcaacattatctttatttgtttttgccttttaataatacaatgaaactattcatctataatttaataacttttagttatgttccaaacctacaagaccagatatacgtattctatctaggcatgtcactatggctaaatcagtcctaatccatgacatgtctccgaagcaaaatctaacaaagtaattacaagtgaaaacatttgtttttttttgaaagactaagagattctgtacctaggtccgtgaaaaagacaagtgaaaacaatctaccggaataaaaagttggtttagagtaatctctagtaaggtttagagttaaagatagtggtgctatctttagaactgatttcgcgttctgcttcagtcgtgtccacaccattatcagagcttcttcttcacaaatcttccttgttagaattaacctcagcgaaactttttggtgcttttgagtttattgactccctcccataagtcccttagtaaaagtgagagtaacctataagctcattgattgttcttctaaacgaaccagcccattagcaggcccaaaaaaaaaattctacattttgaaaaatccaaaatcaatcgcctgaataagtcatgtactttctagcttggttctataactttaggttgctaagtaaaaacatattcaaaaatcgttgaagaatcagaatatgaagattaaaatttccaaaagcattttcaatttaactatgtaatatccgttttcaaaatcccattacgatttcgattttacagctttcttaatatagaaaccatagatttttgttttttctggttcacaagattcgaacctaacataacataacataatcatcgttcaaaagaaaccaaaactaaacacaaatgatcacaagtctcgagtgagcatcacgcgcctccttttaaatcactaacataaatttctccgccactaccacacggtgacgcagctaaaaattagaaagaaaaaaaaaacaattcaaaactttccggtgatataacaccgttcacaaaaaaatacaaaaaatcttaacgagattaagtaaaatcaaaactagacggtgcagccacaaaagaggaagaagaaacagagcatggagactaaggccaccgactcgaacgccgtaacaactttccacacaacgtcgtcgaccaccacagacaataaactcagctccggtcgacgccaactcagccaccttggtacagatccagatgaagtgaaatggatcggccaccaccagcggatagatgacggcattgaagtggattctagtgtgtgtgtgtgtaagattctactagtgtcgaattagtgtgtacctggctaattgtggaaaaaaggtaaagcttttatggcggaaatgatgggcatgagaggattgatgtggtccatgcgagtttacagatgtgtttttgatgtgttggatgtttttaaaattaacggtgatggtttaatttagtcatgttacattttcgagatgtgtagctgtgattggacatattgggatctgtttttggttcatgttcaacttttatagtatttgttttttgaaaagaaaaggagaatgaatagttgtttcctcctccatcaatgtggtcaatgtggcaggttgaaatatttaaaaacattaaaccaagttgagttataataataatataaagatttttttattgacaaaaaatgctaagccatcaccaaatttcaaaatgaaagagcaaggattaaccttgaataagaatattgtactccgatcctctatcatttgaataaacgtcaagccgtaattttttccgttcaaatcactaattccgctgtccggtgccctgaaccaaacaatgcgttgcggtttcaataataactaaaatctctacatatatgtgtatgtatatatttttgttcttatttgtaccgcactattctttt

SEQ ID NO: 29279 - DNA, 1685 bp, Arabidopsis thaliana landsberg
tctccaaatgacctatcggaaaagcgtaacaagacattttcccttcttaattaaaaactgtattcattatagaaataaataaatacatatatgtaagttaggcattttgatgtaagatttttagatttatagttatatacatacttcccttacaattaatgtacatatttatgtaaataatagggacgaggcaatagaattatttttacttataaagtatttaaatagaactaaaaacatgtcgggaccgaacaaaatgtgcgacccataccggatcactctgatctatcccctgcctctcgatttaaaagcactaaacgacaaaactacctttttgccaattacatcattgcttgtgtcatcattcctttgaagcaccagacagactagttgatgaacctaacagcgaagctcttagctcacagcttctcattttaaattttagcaaacacgtgcttgcacaatttttaatataacaaatccagtcaaagggcaagtgtttcccaagaagacaatcttgatatgaacatagaactatatactactgtagtactgtagctccaaataattgtagtgaaacaaacggaaacggagtaataaaatggttaaaacaatatgcatagaattggaaaagcaaaacgaaggaaattaactactaaccaaacgagttaggtttatcaaaaaaaaccgagtaagttttataaaaagacaaaacaaaacgagtaagataaatggtgtaaaatggatagaacgaagataccaaattcaatagaactaattaaaattgagtgcttctacttatatacgttacgttactgttaaagactagttcatgactagtttaactcaatttttcacgatattgagtaatgtttataaatttattagataaataagtaaggtgatcgagttatatatattgagatattaaccgttaacttttggaaaaaaaatatatatattcttacaactttcagatgaagaggaagatcattttattttaaatattgtacgacttttgatgggtgggtacatttcattgttccacactgaattttgtttaaaatttgagaaaaataactcgtactattctctattttactctattaattaactactacaccagccagtctaagattttcttcgttttcacgattcgatttggacgtcatatcactatacatggcgtacatgcatgaaactacatatctccatctctcctccacacattctctttgaatacaaacacgacttacacggcccaatacgtaacaatttattttatataatggagtaatacacattaccaatacgtaacatttttcgtattatatatgacggtagttaaaatttattggtacaaaagaaaaattatgcattatatatttccatgacgagctgtgatgatttattgagattagcttttgatatccagaagtagagtttagcttctgcaacaaaagttgacttataacaaagttccgaaatagtaaaaatgcaaacatcaaaaatcgattgaaattaacattgaagaatataagttatttttaacaaatgttttattttatctcaaagtatatactcaaatactttcacaaaaaaatatactcatactttagacacggttttaaacctttcctttctagtcaacacgtacgttgtacgtagaccttctctctcttatt

SEQ ID NO: 29280 - DNA, 1653 bp, Arabidopsis thaliana landsberg
gaaaaatccaagtaccttccagctcccaccccaccaatcttttggttcacaaagttggatatcgcccgcccttgagctctgacagttcccaatagtccagccagtgcaacaccagcagttccctgataactcatacccaaaccttattattattatttttgaaaaagatacatacaagaagtagctaaaaaggaaggcagctggattgcaaaattgtgagcatacctggacatcatcattgaacatgcaaaatttcttccgatatctttccaatgttccgaaagcccatttcgcttggaaatcttcgaactaaaatgatggaatgaatcatttagtcatccttccaaccgaaaggtaaatctaaagaagatagtaagagatatatacctgtacgacggcctttggccaacgtgtaaatgcagcttccataaattcatcaataatctcaaggtactcctctccttccaacctaggttgtctgactcctaaatctgtacaaagggaaagacagacgaatgagatattagggaaacacatgtacaccacatggaccaattaagttcacagcttacagagatcattctgtaggagcttttcattatttgtgcctacatccaacataattggcaaaacctgcagaggaacaagcgtataattttgaataaggaggtgaaaccttagttaggtacagcaaacaaaaaaacacacacaagatcatgtggagatcaacatactctctgtggattgattcctgcagcagcgacatacatgtcgagctttccaataggaatcccaattccctgtactccaaggtctcctaagcccaaaatacggctaccatcagtgatgacaatcatatctacctgcggagcaggccagttataaatcatagacatcatctctcctttgtctttggcgctgaagtacattcctctcggtcttctatacaaaccagaatagttctgacaaacaagtccaaccgtaggagtgtatataatgggggcaaaatctttgatgttatcaataagaacctgcagagaagatgagttatgatgtctcagagatgtgtcaatgtgggacagtatttagagccaaaaagactcactcggtagtacaaagtctcattacggtcatgcaatctattcaacatcctccatttagctaatgcaacaacgttttcaggctctccttttgtgttgttctctagcgaacgaaacgactcaactgccaaattatgtttcaaaaccaaaagtctcagaaacccgaaaagaaacataaaaagattttaactttggacaatggatcaaaacttactgaaacgatcacattgctgtacacaggtcataacacgaggaggaagcaagcctcgtatccctaatctatctctctcagtcaaaggaaaacctgtgtcctgcaaaagcaccaaagagatagagagaccataacaacaacaaccatcagcattataatcaatttttagaaccctaaaattcagaagatcgaggataaaacacacaaccttattgaaccatggatcgtgaagaatatcagcaccacgcttgtggacgatgcaaggaccaggaatcgctgtggaaaagcaccgccgagatccgtgtgttcttgccgcttgcgttgccttgacaacccagcaat

SEQ ID NO: 29281 - DNA, 1146 bp, Arabidopsis thaliana landsberg
aaattccatgttaggtgagtccagcaccacgaatgaacaagggtaaaagttgtttccaatctgcaaagttcgagattttcagtttcttatgcaaagaataatgaaacagaaaagcaaaggtgaaaaccttgtcagaaaaagattgacggtgtttaccttgataggagcaacatgaatgcggcccaatatctctgtttggccaacaccatgggcaatacctttgtagcgttggtccataagtctcagcaatctgaaagtaagtagtcatcaagacttgtgaaattttccatcattctatgttacaagaaggaccacaggatataaacatggaagttacccgcatctctcagcacaactcttggatataattgtcgactgtgcaccactatcaacgaaagcctggagatggtgtaaatataggtttagaacaaaaaagatgatctaaggagtgctcgataacgcctctaagcgcactgagagaccaagaaaaattgagaacagatagtaaggtgaaacgagggtataatctggttgcaaaattctaccttcaaaggtacgccgttgacctccatatccacatagagcattatctaaggaagtgataaaaacaaaagaaatcaagactttatacaaaaaaaggttaaggaatttcagaagcataaactaaaacacaagcatacataccacccgagcaaaaccttcaggattatgttcaagggcagcttcccagttctcatcaattcctttctgttcaaatatatcaatcaagatagtaccaaaagtcagaaatgacacgaaaaggtaacaatcaaattaggagaacataagaaactaaccaaagtgaaagattgcatccaggaatcacaaaagagttatttgccactaaagtaatacaagagtccagtacatgttacataagtaagaacaattaacctgacgaattgcagcttcaattttcctctgtgcttcaacatcaaaaggatctgcatacagaagggcctgcaaggagggaaatacacaagcagggttatttgtagtggtagatgtaacttaatgtgtggaaaaaagagaagctagaaactctatcaaagccagttatcctgaaaatcatttttattttgaagtaaggcttacaagttcctcttc

SEQ ID NO: 29282 - DNA, 1327 bp, Arabidopsis thaliana landsberg
  unsure (1)..(1327): unsure at all n locations
cagatactgtaaacacacagaataccataatccagttacgataaagaaaaacgcatatgtgaatacatgatccttaatatatttacaagcataacatactcattagagaattttcaactagtcatcctggaaaatgcccaagttcttttatatgcccactcttcaaaaaagtacaggaaataagaagttatcggttgatgcaactcaccccaccatgttgcagctgaagcttgattgaagggcagtatgccggtaaagattattaagcacaagtgcaggatcccctcctcttttgagctatagagaagtattggaaattatcttaattaccttccaatatgaaattttaaagcagactaatacatctaagtgcagaggaaacagtgtaatacctcaataaccacacgcatcccattacgatcactctcgtcacgtatgtcacttatgccctctagcgtctgaaaacaaacaccaacatcaatgaataaagaagaaactttgcaagcatataaggacatactagaaatgtaacacacctctgagtaaaataagtacatattgctaagtgaagcaaaataaacattagatgtcgcaagtttagttgtaccttattttcaacaagttcggcaatcttctggacaagtgtagctttgtttgtctggtaaggaatctgcaataaagtcacactaaaggcattactctactgctaataaacatttttgaaaccctcatccatggagatctgaacattaatctaaaaaactaaattgatcacctctgtgataataactgcattccgctttgtctttggatccaacaattcaacttcagcttttcctctaactacaactcgccctcggccagttcggtaagcatccaaaacccttgaaagcgcaaacacacattagaaaattataagaatccaacattgtaaaaggaaatggcatatgaatgcaaactatttttttaataaaggtattcaacaaactcgagagtaaatgtactacacaacatataagctttcagaatattaaaaaatcactcacaccatcagaaaaaaacatgatgattcaaaaactgcatatgacagacaaataaaggaaaactattaactggaccatcctcttcactcattttctaggttccttttaannnnnnnnnnnnnnnnntgtaatctgttagaatcatagatcaaaacaaaacaaaatgctcttctatttccataaaaaaaaagtttcacactctagaagtgagtctttctatttgatcctatagatagcctactctcagatattagcaaacgaggtgggcaaacaaagtcattaat

SEQ ID NO: 29283 - DNA, 1171 bp, Arabidopsis thaliana landsberg
aacgatccctcttgttcttcccggtgctcccccgttgattgtttataaatccaacacgatcctgcccacgaaaagacgtttcattaataaactctacactggataacataagaaagaacattagttggctaagatcgtgtacattttgttcttggttccttctcctgtttcttgaatcaaaatcttgtcatccatctttgttactgtgtgctccttgggcagattgatcccttctactgcttttatcaaacaatcacaaaatccatcagacttcctttcctacttaattagtatacattgtgtctactctttggttttattaccttctacaccattcacaggagcaaggtcgttaatccccaagagattctgaaacagacagccattgttgcttgaaatggatgaggtttaacaggaatttattcataaataaaaggtaggttaagtcaccttaagggtcttgtagcattcctcaaggttgtcattatacagtttgtgttcaaaaatgccagaggatttccctgctttgatctctgcgtcagcgtttctaagccgcttttggatttgctcctctgtctctgttcctctgttttttcagcacttaaaattgagaacttgcaatgaaaaatctgaagtaaaaaaacaactctaatgtctggtttttaccgggcacgaagccgatcttcaagttccttcattgaaggaggacaaacgaatatgaatatcgcatccagtgaactcgccttcactgacctcgctccttgaacatcaatatccaaaatgcatctctatacacaccaaaatatatgatcatttgatggatcaacggcatgaaagagattgatgttacaaatattatctttttattacctttcctgaatctgttacaacctcaacggattcaatgctggttccgtatagattgccgtgaacagacgcaaactcgagaaacttcccatctttgatttctttctccataacagtcttatcagtgaaatggtagtgaacaccattcttctccatacaccttggagctcgagtcgtgtggctcacagagaacccaaacattgaaggaaactccttcatgagcatcgatataagtgttccttttccaactccagaaggaccgcttataacaataggcttctctgcatttccccttactccttga

SEQ ID NO: 29284 - DNA, 1716 bp, Arabidopsis thaliana landsberg
  unsure (1)..(1716): unsure at all n locations
gtttatggcgacgtatattttcatacaaatgagttcaacaatattttttttcgacaaaaaaaagaaaagaagagttcaacattattttcacacccttttaacaaaaaattgacttctgtcccaatacaaaagaatgttcaaaaggaattttagctaacaaatttaatatttaatatagattatatatgtaaaagcaaccaaaaatctcatttaaaatgtttagtcaggtttcttcaagttactgtctagtaactccaatatctgaatcataaattttatattaaaatgaacaaaaaaaacaaattattctctggaaactatttacattttagctaagaagagaagagtaagaaggaaaaacgaaccaaacccgctcccaaccgccattccaaagtcggcgcctatggttcttcctgaccgtttgatcaatggtctctcagaatcgcgatccattgtaccttcagaacatgagaatctgagttccccgcagagatggttactctcaaagctcgagtttggaaacgtctgaaactgaccaccagaagggattgttcccgagagattgttataagcaacactgaacctcgacagaaacgagagcttttgcagagaaaccggtatcgagcccgaaagacggttattagacagatcaagagtttccaagctcatcatacccgaaagcgagctaggaattgatccagataagtcattccatttcagatcaaacacatgaagcttcttcagattaccaaactccttccaaataggtccagagagattgttatgagcaagctcaattgttggcggaaacccgaaaatctgattgtattgcaacgctctcgcgctttcgtttcttttcatgaaaaatgagaaatctggagatggctcattgactgagatattacggctagtgagactctccaacttagttaagctcttggggatttctccggtaaacgagttgttcgataaatccaagtagaacagagcattgaaatcaccaatccaactcgggatagctccggttaaacggttccaagaaagatccaacaactgaagatcattgctcgagcttaaccacctcggcattgaaccagtaagcctacaattcgtcattacaagcaccttaagcttctcgaaacgaagactcgaatcatcgggtaaagcctctccatggaaattcaatgtaagaaccaaagtcgtcaagttcttgcaatgctgaagaatcccaagcgcagaagatatattagccaaactcgaattcgataacgagaagtaagataagctctcgaagttcttgaaactctctggtacttgtccatggaaggtgttcctcgcgaggttaacgttctttaaccgcttgcaatccggtagattctcaggtaacctcccattgaatctattggtacctaaatcaagagagttcaaagcaatcatcgccgtacaattcaacatcaaacgacccgataaagaattgttcctcaagttaagcagattcaaactcggtgaattcgccaacgattaggtattcctccaatgaatccattggtctgacctaagaaaaactttnnnnnnnnnnnnnnnnngaacacatcagggatttcaccggaaaacaaattccaagaaacatcaagacgaacaagacttgagagattcctaatctcacgactcaacgaaccagagagacgattctcttgaatccctaaaagattcaat

SEQ ID NO: 29285 - DNA, 2279 bp, Arabidopsis thaliana landsberg
ttatccatagtataccatcccatattaatatcgatccaaactcttcccactatataacctcgtttcgtgaaattaaacattattttatcattttgttatgaagttcgaatatttataatattggaaacttcaaacaaaaattaatatggaccaaacttcataattgtatattgattgttacatacatgatttcacccgtaatatatcgttcagtattaatatctttttaatatttataatatttatttcttataaagttcataaaattttaaaatcattaatatttaaatttattttatagagttttaacttttaaaaaagtttaaaaaattgtaatatttaacttttaataaagtttaaatagatataatatttaaaaacttttaaacttgtagttatttaaaataaagaaccggagtaaaccgaacaacacttttaattttggatgtttgatatatcaaggttctttctcattcgttttcagaatcactttggtcttttttatagtatgactcttaacgatttcctcatttttaagcaatgtgagacctttaaaatttattttttttcatcgatggagtattatatgtttgtttgaaaaaatttgaatttcatcagatgcaaaaaaaaatataatattttattaactatatgtgttttatatataaactaaaagcaaaattatatatataaccaaatatagtgacaaaaaaattagatatttaaatttaatgtcgatatatagattttaggaaattagccttaatcgaatatagttcaattaaaatgatttaattgagaataaaaatttaggaaagagttaattcaagtaattaatgcaattaaactaattgtaagtttttacttatatagtatttgattgagattaaatttgtaaggactcatattgcaaatagtaaataggtgaaggatttttggccaaaaaccctaccaaaaatgtatatgtagattcaaaaccttggtctattgtgtgatccgagagctttgtggaattcgacccttcagtgctacaatcgttctcttatttgagagagtgggcttaaggcaatttgacctatatcaaagatacaaaggcaaagactcatacggacttcagcttcaccatcaaagcctcgagaagcaagaagaagcttggttagtgatttggagtcaaatatgactagatgtcatgtgtatgattgagtataagaactagaaccacaaccggatcttgaaagcctaagtagtgttttcttgttagaagatacaaagccaaagactcatacggatttcggctacaccatcaaagctttgagaagcaagaagaagtttggttagtgatttggagtcaaatatgactagatgtcatgtgtatgattgagtataagaactagaaccgcaatcggatttcgaaagcctaaagtaggattttggttttaaagtttgggatctatggtttagggtttagggtttaggtttaagggtttagggttaagagtttatggtttagggtttacggttttgtgttttagatttagggttcaagggtttgggtttaggggttggattttaagttttgtgatttagggtgtagtgttttggtttagcgtttatgatcaaatatactatgatacttagagaagcaagaagattcttggttagtgataataggtttttaagatcagttaatcctaaagcactatcatgtcgttgtagtattgaaggttgtcaatccaaatgggtgtgatgctaacaatcaagatgtgatcagaagtcactaagtcaagccaagcaataacaggttttggtgtgttctagcagttctaagtgaacatgcagaaaacagaaattcaagcagaaacaataaaacactcgaccaacacagctcgttgcagagcagtgggtgtggtcgagtgacaggtcgagtaacagacagaaaatgaaacagggatactcgactgcacagtctcttgccagaaaactgggtggtcgagtatcaggtcaagtaacagtaaagaatttcaaaaactaagcaacagatgaaaagatgcagtaaacagcagtagagtaaacaataaattcaatcaaataaagaattcccgaggatggggtaattgagtagcttcgtttcctcagtttacaggtgattgacatgctcaataaattatccctagacaacaagttcattaaccaaatctaagtgccaccgcaacagagacactcaacttaacctagtcctagactcaatcaccattgacgaaagctaacctaacaggcat

SEQ ID NO: 29286 - DNA, 1897 bp, Arabidopsis thaliana landsberg
gatggtcaggaattctaaatcagagcttcgacagcttttgtttgtctggtaacatagatctttgctttgctaacgaggacgaagcagcagagctccttaggtaattgatgtttcttcatcccctgcaatgatctactcagggtttcttttaccctttctcttgagtccatgaaatactcttaagctctggattgtgagtttcaggggtgagcaagaagcgggtccggaggcagctcttgagttcctaggcagacattgcagatgggctgtggtaactttagggtcgaaagggtgcattgcaaaacatgataaagaggtttgtctttcctaaaaaacgtggtagcttataatgtagctttacatttcacttagccttaatttaactctttaaagttcatagcgaattagtattttcatctccttacgtgtgatcaggtggtacatatatcagccataggagagacagtagcaactgatgccacaggagccggtgacctattcgcaagcgggtttctgtacggactaataaagggattgtctttggaagaatgttgcaaagtgggatcatgcagtggtggatctgtcatccgtgctctcggtggagaagtaaccccagaaaactggcaatggatgcacaaacagttgcagttgaagggcttaccggttcctgacatccacaactgatgatatcaccatcagattgtagaatttcaaacaatttcgttgaagggccggttctgattcaagcagctcttagcattatgttgttcacagagattctcacagcatttacttcaatacacattgtgttgttttcaatctttttttgtgaaaaataaaaatgcgtttgtcagggtttaggatcaatcttacttactccacctttctgttccttaaacaatgttcctttttctggctcaaacccttgaacaaagagaaggccgatgatcgagccgacgaaatatgtgatgccataggcccccatagccgacatcttctctctctgttttgcatgagtgacagtaggaagagcggaagggatacccgaaaccggaaacccccttaataaaggaaattaatgttgtgaggctgaatttcgactattgggcctgtaagcccaaaccaaaaaaaaacaaaatttcgttctttcagctttgagttcaacccaagtatcgggtgttataaacgtaaggtaaatgctgtgaagtttagcaattaatttaattaattaacctagagatattgttgcctctatcaatatgttatgctgaagaagatagccttgccagtctcttattatatattttatcaaagaaaattcccaaaaaccaaaggggaatttttattactgaaacccaagctaaagataacggttttgacatatagggattaggatttgctacaagatataaaagtgaccgttgaagaagattcacacaactcttaagagtatgcttgcttcagcaattgaagtagcagaaacatgcgaaacccgggaactgagcgtgacaagccccgtgtgaagcacgttcccatctcttacactgactgtcacagccacgagtgttgccacaaaaccctgtccatgtcttgcttctcctctcgcaaattcttccttccaccgccatcatctctgcaaattctccaatcacaagattttatatatcatcatctttcatcaatgagattcatacatattacaaagagattacagtcgaagaagcttagagtggagtgatgatcataccagtggaagctataaggaagatggagaggcaaaggaagagcataagtgtgtaagaagaagccatgactttttgttgtatggttaatattcactagctgagagctctttatatacaaatgtattaggcgatcctctagagtcgacctgcac

SEQ ID NO: 29287 - DNA, 2204 bp, Arabidopsis thaliana landsberg
tgaggaacacatgtcaaataaatgaagtgtcacttgttagctttttagcgcatgtttttaaggaaaccttagagttgtcaacgctatacgtgggttatatatttaatattaattttgaattttaaataaaaatttacatttaaattataaaaataaatgtacatacaattgttaatatactttttgaagaattttatgttttatgacctaaaaacattactatggttttacgttttttacaatagtcaactggtcttactaaccttaaacactattcattaattacattgatggattcttctttctttaaaatgtatagtagattttgtttttggtttttttatatgatttttttagcaatgaaggtcaatccaatagagaaatagtgaaagtttaatatatattatttttatttaatttattataaatttatttgatgtgagttttttattttattgaaaagccaaaaaatgattaaaatgtgtaatttaaaattgtttttttctaagcagcagaatcaaacaagcaaagaaacaaatactgcaccaagcaaaggaatcaaagaaacaaataaggaagcaaacaatgaagtaagcaataaacgcacagaaggaaacaaagctaaataaacacgttgagcatgtaagcaaaggaatcaaagaagcatatatacatgaatgcttatgcatgaaaattacttgggggaataagaaaaagtttcgaatcttaaacagttccagaattatgaaagttctaaatatataattatttttaagctaatatgttactatatactccctatgttccttattaatgtattttgtaggattttcacatatattaagaaaatatattaacaattgattgtaaatgtatctttttgtgattaacaagtttctataactccaaatcaatagtattcaaatatattttttctgaattttacaattcatcaataataactaataaatattgcatagaaaacctagaaaatcaatattttagaaacaatttttttttaatagaaaatcaacaaatgatgaacagagaagtaataaatataaaaattaatatcattataaattaatagaatataattgtcccaacattattaatttatagatatatttttttaatttatagatgttttgctatataaggattgattattaatctaaattttttaactcatgatttatttctttttaatttgggggatttgcaaatgtaccatttttttattacctttaatttaagggatttgcaaaatttgagctctctttatatatacaaaaaaaatgtgctcaaatatagaacgattgcactatccgcccttgtacttaaactggcactgagtgtgatagaaagataatctttattatctctttatgcttatcgtaatagttcacgcttatctttaactctctttctgcttgatttctgaacctattaatatagacctagtgtaaaacataaaaccctaattctactatggaactgacttttcatatgacttcaagaccatatatatagtacaacaatcgaattattttgctctcaccgaataaaactcattagagaacgaagacctattttcaactatgggaacttcagagaacgaatttgaaaagcttacactatatgtaggagatctttattcgagtgttgacgagcgtgacttatacacaaaattcaatgagttcactcatgatatttcttcagttaaaatttgttgcgaccgaaacacagtagtgaaaccagaataactatccatcatagttaaaactaaatcatcatacaactcgtgaatactagattcaaattagttaataaatttttatattcaaaaattaatataagtacatgatataaactaatctggaacatagaaagaagctaaatcactgttagactaactaaaaataaatgtaaatatattatgttaaattcatattaatggacctaattatggtatatttacttaaaataatttttattgacttaatattatgtataagtattaagaacactataaatattaattagactttcacttgtaatcttgtaacttaaaaatagtacatgggtcgattatctttttgggatgggtcaatttaatatttttaataaaaaggtaagctatttttaaaaattccattggggtcagttgatcaatagtcaatactgttgggcacttacgtcta

SEQ ID NO: 29288 - DNA, 2045 bp, Arabidopsis thaliana landsberg
  unsure (1)..(2045): unsure at all n locations
catagttctcaaggtaagtcgtaatattctatatgttcgtctatattaattgtttcatcatgttgcttgtttctagggtttagtcgttacgttgaggaaatagtttactttcaatgattgttccctaatctaaaacactttttagttttttttttgttagtattatttaggcacacgtgtatttgtttcgatttaaattatgtcgatttttctttaacgaatttgaatgttaattggtttgatttatttattttttcgtggggaaaaacagcgaagactgcaatggaggtgctgaattattgtaagttaaagggaaaacctatgaggataatgttttcagaacgtgatcctagcaacagaatgagtggacgaggtaacgtgtttgtcaagaatctagacgaatctatcgacaacaagcaactttgcgatatgttctctgcatttggcaaagttctctcttgcaaagtggctcgcgatgcttctggagtttccaaaggatatgggttcgtccagttttactcagacctttcagtctacaccgcatgcaattttcacaatggcacgctcatccgcaatcaacatattcatgtttgtccattcgttagccgtggtcaatgggataaatctcgggttttcactaatgtttatgttaaaaacttggtggagactgcgacggatgctgatttgaagaggctctttggggagtttggggagataactagcgcggtggtgatgaaagatggagaaggtaagtctagaaggttcgggtttgtgaacttcgagaaggctgaggccacggttactgcgatagagaagatgaacggggtagtagttgatgaaaaggagttgcatgtaggaagagctcagaggaaaactaatagaactgaggatttgaaagctaaatttgaactagaaaagataatacgggatatgaaaacacgtaaagggatgaatctttatgtgaagaatcttggtgattctgttgataacacaaagcttgaagaattattctcagagtttgggaccatcacttcttgcaagtacgcatgcaatagcaaaagattgatttgtgactacgacgaataataaatttaactaatgaattttgaaggtcatggtccattccaatggtattagcaaaggtgttgggtttgttgagttctcaacgagnnnnnnnnnnnnnnnnnnnnnnnnnnnntaaaccaagtaatggtcttttagtgttgccttcttaatcaaggaactcacactaattaattttttatccttacacagatgctcaagatgaatgggaaaatggtgggaaataaacctatctatgtttctttggcacaatgcaaagagcaacataagcttcatttacaaactcaatttaataacccaccaccaagtcctcaccaacaacctatcttcagtcaagtggtcgctccggcaacaatgttatctcaacaaactccattaagaggatacaacttccaaccatattctatgtgcggatcaagaatgccaaacagttgccctccaatctctatccctaatttcatggtgccacaaccatttcgtccaacactatatccacctgctccgcttgtcggcctctacggtagtttgccacagccactactgcaaccaaatctatggaacccataccgtagattttagtagcttttaggaattaacattatgcttccaaaagcgaactggttggattgatagtcttcttttattaagtttagtcatgttaggttttcatttacgatattctcgttggtttgaatacggtttatgtttcttgtgtctctacttttcaacattcatgtttactttgagcttgatcaaaccaagattaaattacagaacttgttttaaaagtagacgaaaaaaccaatgcaaataggtttcaacttaagtgatggaaaaactacaaaaaatgtctctgcatcaaaataaaaccatattcaaaaaaaatcccaaattgtggttccttctcaaaactatcaactatctaaaaccattttggtaacattgaagcatcacaacctatt

SEQ ID NO: 29289 - DNA, 2345 bp, Arabidopsis thaliana landsberg
  unsure (1)..(2345): unsure at all n locations
tgcttcacacccagaatacgaggaaacactaaaagaatgaggataagctatatcacaaaaatgttgtttacacaaggctagtatagcaactttcgttgatcctgacttcaacgcttacttgattccaagctctttattatacagcaatcggtgtatcctgcgtaagccagtttaatcagtttagccataaagaagtaggtaactacatcaaattataatcatcattaagaatcattgaaactcaaaaccattactagttttagtactaagtcagttttggttaaaaaaataacatattgtcgccacctaaccaaaacaaatgttgcgtccagaaatatagatttggtttgatgactaaccttggaactcatatttgagacggctagattgaacttctctttggtttttgagccagcaacctgacctactctcgccactttactaaaagcgccactaaaccaagcagcttcagcagtcacgtacctatttggaagcataatcacaaacaaagaaacaaattcataaagtcagggtagaaaagtagttaaagatggacaaagttgattcctgccatatctattaccaagaaggatgtctaaggatttatacctgcttgatttgacagctgaacccgtgtcgtttaacttcctctcggctgcaaatattgctgccatagttttatcggagacttgaagcttttgatcaacagatttaactttctcattaacagcagaaataccaacagataacttctcagtaagaccaactcgcttgtcaaaagatgaaactttannnnnnnnnnnnnnnnnnnattggtgcttttcgtcgaaagccttggctttattcactgcatcttgtccaagagcagacccttttgccaaaaccgttgccaccacatcttgtgctttgctaacgtatgctctactattaccatccatgttcgttttagtctgcacaaggcaacatgtttaatactatactatatcacacatagacaagtttctgtatgaaaatcacgtctcctaacctgtgtagtactctcttgaagaccaagaggcatcgcgttgtccaacattcttacttcctacatgaacagaaactaagacatcaaatagaccggacttgagtaaaaacctgtttcaaaacaacacaaaacctgtgtctcacgcctctgaacatagttttcagctcgtgttattgtaacaatctggtccacaatcgtcgcaccctacaaggcaagatgtcgattctgttactgttgtgcacaaatagtctcataactagttcaagtgtttgttacaaagactaaagacaaaactctctaaaaccattcctaagcaaaaatgcacatacacatacatgaatgtttattcataaaaagtgtcggtgaaaattacataccgataataacaaggcaatttcgagggctttgggatcagtaaatgtaacaaatgcgattcgagactgtccaaattctctgcaagtacaaatatttgaaggtaaagttgaaatgaaacatagaagagagtatagaaggagaaaatttgaagtttacttttggatttcaatgtgttctatgtcgcctgagaaggagaaaaactcgtgaatctctctctctgtggctagatctgagacattatttacttgaacacttctcgtcgtctacatcgaattcggagaaaacaaaattagtaagcagaaacttttgtagctcaaaaatcagagtaatattattgttcacctgcattgttgtagaagcagctcttgacgactgcgagagaataataattttgacggaagagagaagaaatgattttgaacagcccagccgtcgtcactgtttgtccagctaagctaatattatctctgcctaaataaatgtgtattttccttatttaggttaggtttactgttttgcccctcgttttagtgttttatttctgtatgtaacctagataataaaatatgttagaatatacaaaaaaagttttggtcaatagagtaaagtatgaacacatggttttaaacgaaagtttcgttaatacttattgccatattggtggtggtgcttgaacaatgcatgagtcttctggtcaacggtcaaacggtttggttcaattagtttttcggttttctaatgaaattataaaaataatattcggttttgattcggttctcgtatatttcggatcaaattgtaatctgtactaatgtttgaatcggttgggtttgcttaccaattttagaggagtttctatatatattcttcaattgtggaattatccggtttattttggttagcacaaataataaaaataaattgggtaaccaattggttcgattaa

SEQ ID NO: 29290 - DNA, 12286 bp, Arabidopsis thaliana landsberg
tcatctttcttcctcacttcatcgatttctccacagacgctgtttctctatccacgcgccttagcgggcgcgtgcctctctccataccttgcgtttcgtctccgatggatactgtttcggaatctcacatggctgctgctatggcttctcttggtgggattggaatcgtccactataactgtggcatcgccgctcaagcatcgattattcgccaagctaagtcgcttaaacatccgattgcttccgacgccggtgtgaagttcccggagtatgagattacttctttagatgcttttggtacttcttccttcgtttttgtcgagcaaacaggtgagtgaatcatattcgttttttttgcaaaaagaatctgaatttaatagttacaatggtgaatttaagtttgtttgttgtattgatttaaatgcaggaacaatgacgactcctaaattgttaggctatgtaacgaaatcgcagtggaagagaatgaattacgaacaaagggagatgaagatatacgattacatgaagagctgtgatagcagtgactattgtgtaccatgggaaattgattttgaaaagttggagtttgttttagaagataagcaaaagggctttgtggttcttgagagggatggtgagactgtgaacgtggtgacgaaagatgatatacagagggttaaaggatatcccaagtctggaccagggactgtgggtccagacggtgagtggatggttggtgcagcgataggtacgagggagtctgataaggagaggcttgagcatttggttaatgttggggtcaatgctgtagtgttggatagttcgcaagggaactcgatttaccagcttgagatgatcaagtatgtgaaaaagacttaccctgaattggatgtgattggtggcaatgttgtgacaatgtaccaggcacagaatttgatccaagcaggagttgatgggttgagagttggtatgggatctggttcgatatgtaccactcaagaggtttgtgcagttggtcgtggacaggtaaattaaaaagctctgaatcctaactgtttaatcttttaaaaggtgtaaactttgtgactatatgtgactaaacagatttgtctttttgtgtgatttggacctgttaggctactgctgtgtacaaggtttgttcgatcgctgctcagagcgggattccagttatagcggatggtggtatctcaaattcaggtcacattgtaaaggctctcgtccttggagcatcaactgttatgatgggtagctttttagctggaagtactgaggctcccgggggttacgagtatacggtatagtcacatcttctttcggtttaatttacagttttcttgaaactctgtttgttttgatcgttttgtggtaataacagaacggtaagaggatcaagaagtaccgtggaatgggatcgctagaagcaatgactaaaggaagtgaccaaagatacttaggagataaaacaaaactcaagattgctcaaggagtggttggagcagtcgcggataaaggctcagtgttaaagctgataccttacacaatgcacgccgttaaacaaggtttccaagaccttggtgcttcttccttgcaatctgctcatggtctgttgagatcaaacatccttaggcttgaggtgaatgaaacttgttgtctcaattctaattcccaaaaactctctaattttgctgagattagtgctaatactgtttggtttttgtgacaggctcgaactggtgctgcacaggtcgaaggaggagttcacgggctggtttcttatgaaaagaaatcgttttaagctttggcctaaaattgagtgctaagagtgtttcttatatcatgttccatgttatttttatatattactttcaatctagttactttagtctttttatttattgacatgatttacattgtctcctaaaatcaattttcctctaatattgtcttatatctactaagttactagaagatttgttgaaattttgaaaagaactcaatataaatgaatgaaaagaaacagcctttgtttttctaaactaaacaaacctcttcttgttctgaagcaacaaagaagaagaccaaagtcttattttcatttactgagtttacctgccagatcaacttggatcaagttaaagattcttcctgtaagctaacaggctcgtagatcactgatttaacaagactcatcagatcatttgatgtgaatccatcgtccttcctgtaaaacaagttccacactttgctcattttcaagaacgcttctttgcattcccttggaaccacacttcctttctcctccaaaactagcttatgcaattcttccctctttctctctgctaaacctttcatcgattctatgatcacttctttgctgcgattgtctctctcgtgtttcatgtgcaatgaaaccgcattcagcttcccttccgcgctttctctctgcaaaaaaacatcaaaagggatatataatcccaaatctatgagcagaggtttgttaattaccattattttgttggatttaggcgtctttgcccatctttcaactgtacagtttagtaaaaagtttgagattttaagaagagtcttaccttaaaaccttgtatgtcatttagaagacgacccatagtgctcacgagcttgtagagctgattatattggtggctatcgactgtcttctctggaagtggaggtccgatcagataggtagctgggaggacaattggtcctaatgcaaatgatatgtacgcattttccatgtaatcctccaagcttggtgttgacttgtcactggaccactcggcttctctcaacatagacttgagcagatccaaccactgcgtaagatatagcaccaatgaagtatggtcagatgagttgttaggctatgataacagagaatataattgtgtgggatgattgatacttaacaattttcacaatgtggtgtgtcacattgcgtccttgataggtgaatgctttgtctcctgtttcgagaatggtgtcccttagaactgagaatatgatctcaacatgttctgagctgtactcaggaacaccgttcaaatcccacctgaaatttgtaagcgaagaacgattatgcttttacgagggaacaagcagaggaagagctcagaagaaggagccaaatcaacatacttttcgaccaagtgtatgaggttttccagttcttctttggaccctccaacatcaaagaagtcgtctacaaccgttgtaagtactccacctttggcccacgatatacgagcatcagatagttctggagaaaataaagttgcagccccagagaaataacagtaagccagcttctgtctggcaaatttcagttcctgcaatctattctccacaatccacctgcaagttggtgagcagcattgctgaattgtgactacataacaaatagaagtcacacctgaattcataacgtgaactcgttcaagtgtgtggttatatattagtaaaactaattagcttatgcaagaaggctgaataaatgaaaaagcttagctgggagcgcacctatcaagacgttccatttcttcacggtgtatggactggcagaaattgaagtcatccacagctaacttcaggatatcagaggtgcaaatattgtgcaaactagaacacagaagaaaacaagaatgagaatgaatgccctgattagattgtcgtttaatggaagctggctgtgccaaaacatatggcaacacaggctagaaaggaaagaagaggaatttaccgatatgaggtttttgtaactctggtgttttccacagcagaaccattgagtatttttctcctgtgatctgatctttctaggcttgcataggagggaaaagcaagagcatcctcgacctgaaaaagcttcgattctcagatagctctcacaggaggatagataagcaaaagagattacctctttcttgaggtatttatctcgaacagaggtcttaacccagctggacaattccatctccagatattgtttagtccaacaacactgcttcttcaaagctgattcatgtggataactttgagcagccttaaatgattctaacacagaaaacgtattcttaacatatccttccaaagtatcagagaaaccagattcttctgcaaatggttttagcggatctgcaacaaatacagcgtctcaacttaacatggacatgcatttaactcaaatctaggctataattatctgaaataaagaggtcacttcaccgtaagacacatcatagccatgagcaagcaataatcggaaagccaaagcacaagtggccaagtccaaacatatttcttcatccccacgaagccaatatctgttcattggtcaatgatggtttacaagttaaactacaaaatcatcataacaagtttccatatttgatgaaggcatttacctataggtttcatccaatatgcttttgatttcggttttgaaatctctatcaattcctaagctttcaagagtgacaattatactaaggcgtgcatattgatcaaatggataaactgaaggaactgaaaagataagcaaacttattagcagcggaactctctatatacaaaggaaatgatagtcatgttgaaagatatacctgcagcctcgaatttctgaaggagagaacagagataacggagacaaccatcattcccaaactgagtaaaagcagctgctgttgtggctggagaatcaaacagtgacccatttttcctttgatatttgactatcaaatcccaatcttttaggtttcttgtcccctctaaaacataggccagatatgcttctcttccctttgaaaacttttcactatcactgatcaaatattaaatcaacaaaaagttatgaaaacgaagacttctgtacaagaccatctttcagtttcgtctgagtatgctaataaaagagcaggagtataccatttaagatccagatctctttttcgtatcatgtcatccaccacttctgagcccaatggaatcgtcagattcaaatctctagcatatttaatcatcccaggaaatataatatcaaaccctgttggtttctgtatggtttcatcagtgactaatgcagaattcagctcaataaactggagacctggatttttatttgacactcatcaatccatgaatcttccaaaagtgaaacagtaacaaaagagaaagtaaaaaaccgacccttgtttatttgtctttcaccaattccccacttctttaacgcgaggatactagccagtgtagatgataacacatccttcttaagagattgatggtcatggttatcaagtccccaagatccatcttcatgttgattatccaataaccatttcacacactgtgggaaaagtggagcattttgggagctcggtgatggaaccattgctacccaactagtatcgtaggccgaaacagaaagctccactttctccaacatcttcctaatcttctcctttgtttgctcaaagctctggatagtttaagagtattagttggtctagaccagaattattctcttatgtaaaagcaagcaaaaatcagctgttttgtttatttaccacattgttagctcttgtctgtacttctgagtccaatctccgttccaaagtagctgcataacaagagaacattgccatttgattcaggtaagagagtgtagcaacaattatttacttcattgatatcagtcctaaatcctcactaaaggaagattatgtaagaaaatcaatttcaattgaactgacgaaatgagcatttcgtataatccaaaagatcaaatcaggcagcaattcgcagagtagcgtaaaaatacagaataatgccagtttgcttcaattccatttaatcaccaagtacatgcaagggaagaaatcaaccaatgccggaaatgaaaaaagagagatatcgagagtgagagtacagtaacctgagatcggagacgatcaaccggaggagcgaaggttgatagacataaagaaaccagaagcaaccgaaacggcgtcgtagcaacctggtgagatgtcatcatcatcaacagtgacagtgagagtcaattccagattgtgaaacgaaaacaataaaatcaaaaatgaaagcgacagagagagaaatatacatactcgcgacgaattagccttgatgactgacgacgaccgtaggacccgaaaatatctggaaatctggcttaataaatagtagattattacaagtcattaccatacaaataaatcttttttgaccaattacattacgacaaaggataatcaaaatcaggaaataacgtgtacatgtgtatatcaaccgaacaggtggaccgcagatatcgactcaacaaaaaactacttttatgagattattacaagaactgaagaacatatgattaaatctaaagactgaacaaaattctctgcttattttgcaatttccaactgtaattcatttacattattttctaaacaccatttactggctagtatcttaacaacaacaggacaaaacacaaacgtttgttttcaacaatatcaaaattataaacgaactatatacttattttcgttttttctcttttgttagctaagccaaaactacgccgtttgacgatggagggatcaacgcctgatgctcgaagggctctattactgtaaacctccagcacttctgttccacgaaaggtacgaggggtctccgagttgcctgaaaccattaatacagaagatcatttcactgtacacgttccaaaatctgaaaagtgtaataatgtcttaacaaaatgaagcatgcatgaccctgagagtgacgtaccttggcttaactagatacaatacggcaaatgtaacagccaagaacaagcaaatactgcctacagtcagataagcaatcccgaggaaatcattccttccgccgagccagctagttgttgacagcactagcttcttctgcccattgaagctgtaagtgttgtagttgttctgcaacaagaccgttatggtatcacccgcgtgtaggtctgtctcaatcttcccatacagcttcctaaacgttggcaaagccgcggttcgcatccagactatgaggtcttcttgctcactcaactatccaacggacaactcttacacttgttaaaatcctatcagaagaaggaatctaaattgatcgatattcaaggattttttaccggtttagaaatattaagagttccaccgcctattggtgctcctttctgaaaatttttagggaagacatttttcccaaacttgttttctctgtcactcttccatgagatacctttcttattcacaagaagttgttggctatttcttgaaaagctataagtatcgttgaacaaactccaagcaacaagaccacatggcacaattggttctccacccacattatcctcaggtgcacaggtcttcacatcatgctcttcttttggacttcttagttgtgcatcgtttcgacttttcacatacctaatcatatacaatcaaccagaggagtaactgtattagtgcagggaaagtaacaggcaaaagcgataactattactaagcagataaggcaaagtaccgtctatggttttggtagaaattctcaagttggtagtatacatagacaggatgcttcatagcttttgtcacctgaaaaaaatgaaaggctttagaaagagccatatctagaagaacagctaatatacacaatcatagaaggaactaaattgccatagaagaagacatgtaccgttattgttctcttacagatcttatctccttcaccctgtatgtaagcgaccatgttgtttctagaagatgttggaatacagtctgtgtcatatcgatcaacaatctcgactaccttcaagtatgaatgaaacatatcctcaataaaaccacaaaaccgaagctggaaaataaaccattagaaaaggcagaaaaacaatagcatgatgcacatactccctgagaagcaaataagcagatcactccaaggggaatgaagacaaccccagcgacaagaaatgtcaagatcacctgcaaatggccatgaacaataagaaaacagcaaaaagagtaagagtcatccttttccactattgtaacattgaacttacccatcttggagtaagaattggcttgcacgctggaagctcttgctgagtaaacctagaatctggtaaagaaaattggttccttgtgaagttaagaacagagaatccaaagcaaccatacagtttgtttaatgggagaacaatgtttaaagttttcgaacaaaagatttcaaccaatgtcacatcaaaacccaacaactaaacgtgagtttcaactacacggtgtaggacaacttgaaaaaccaagctgatgaacctatacacctcttgtatatacgaatctacatcaaacccagagtatacaagaatgctattagaaatcaaagaaacatgcaaaaacacatggtgatcgaggtatagcaacaccatcaacagagaactttttgtcaattcaatacgaattccaggaaagaaagaaaaaaagaagacgaaatttctaaggacgatccatgactatacaaaaagttcgaccaaatcagaagattagaaggatagatagagatagaaagatcacattttggtcgcttggaggtttttttgacaccggaaatctcagacgatccgcctcctccgacggtggaagatgccgcggtggaactcatcaccgaagaaattgattagaaatgaaatctcctctacaactatattccgaatcgaatggacggcatgagtcgttttgggaagaacagatcctacgcgaatgaggggaagaatgttaggttaggcttatgaaacatatctacttggggaagatgtatagatcttttagatgaagaagcaaaactctcgacaaggaaaaaagaaagacgactttgacaaatgctgttatcatgggagggaaaaataaaataataataagccaatttttatgttattttttaaagggcaatttgggtaaagaataaaaaaacggaagttttcgaacaaatccggcaaatgcggttaaactgccacgtggattacacgtcattaataattaacccactcgaatacagtcaaataacccacctgtcatttttgacggatccaattttgaagatattttacttgtaaaaaatctcttgacaacatataatttcgttgcctagtagcttcttcacagcttctgatctcactagtgttcgtcatctttgttcgattgaagtttgggaagtggtgatggtaataggagcagcagcgcgtgtagccatcggcggttgtcgaaagctcgtctcgtcacatacctccctcctcctcgtctcttctcagtgtcgccaggtaaatcgtctgtcttctcaatcgattcttctgtatttacatatttactcgtggattcgtccgcagtctctcacggagaaaaggatcgagtggtttcaaaatcagaacaatggttatatatctgaattcagttttttctagtatttctcggatcttgtggtctcatggaggaaaagtgaattgggtttcctccggatgtttttgttaaagaacaaatgtgaatacgttatgataatgatactctgttaattcaattgattatcagatgagtatggacgcacaaagcgtttctgaaaagcttaggagttctggtctattacgaactcaaggtctaattggaggcaagtggcttgactcgtatgacaataagacaatcaaggtcatacaactctgccttttaccctctctctttgttttggggatgttattttggaatgctttatgttgacatcatgttttcttcctgacaggttaacaatccagcaaccggtgaaattatagctgatgttgcatgtatgggaacaaaagagacaaatgatgctattgcttcttcttatgaagcatttacttgtatgcttctcttcttcattactttagcttctttcttttcgagcttcttattctaccttaaactgttccgtctctcctgctcaatgtttgatggtcacttctattcacgctgaacattttgctctaatgctcttacatgttatcacattcagcttggagcagattgactgctggagagaggagtaaagttttacggagatggtacaatcttttatcccgtagcaatgcgttctcttttacttttgtagtgttggatggggatgtttaggattataaggttctgagccacttcatttcaccaaacacaggtatgacctcctgattgcacacaaggaagaacttggacaacttataactttggagcaaggaaacccactcaaggaagccatcggagaggttaatgactcatcttttatttgagaacattgaatgtgctgtttaggcttgtctcaactgtagcaatcgtttcttaaatgcaatatatgattctgcaatttagttaacaggtagcatatggggcaagttttattgagtactatacggaggaggcaaaaccgtgtatatggtgatataattcctccgaatctgtctgatcgccgactgttggttctaaaacaggtttccccattcatgcttctatatttaatacatgcagcttttttgtagtgacatagttctgcaccctaagcttaacttgtaggtgcgtagttaaataattgccaggctatctgggcttggaaacctgtgacttggctctgctttcccacaccttcccaagaatttttttttgcaattttctaagtcttgtagcaatgtgatatgaacttggagagccttacccttgctttgcgaattccattttatatgtggatattcctcgtgtacttttttttccatgcaatgtggctgtatttgtaatcgcaagtgtttactatacatctcaattgcttgactctcttgattttctttgcagcctgtcggtgttgttggtgcaattaccccttggaacttccccttagccatgattactcggaaggtcttgctttttttaccattccaatttaccttcttctttctgtaaatagctgcctagtacccagtgagtatgtagaacttttttcattaaatttgatgtagatggtaaatggtattgtaggtcggccctgctcttgcttctggatgcacggtggttgttaaaccatctgaacttacgcccctaacagcacttgctgcggctgaacttgcacttcaagctggagttcctccggtaatcttttatattaggcttgaactatacaaccaactagcgtctctggtcacatctagatggatttcctcatgtcagggaaataaccaataatgtgttaagttcgaacacagtagtctttccgttttacatgtaatctgatttgaatatttgatcagcccatctccaagagtttgtattgtcgtcaatgtggctactatctgatgtatggacccattgatgtaggattaagtggtttaaaggctagttttttacgaagtttcttttgtgctaatgaactctttgggcagaccatctctttagggttttgctcttttttttttttttttttttttggtatttgtaacacttcatgtttcatttgcattattattttcaatagggggcacttaatgtggtcatgggaaatgctcctgaaattggggatgctttgcttacgagtccacaggtttctctaatcatatttgtgtacattctgttatttgtatctatgccactagtagtgaattttgataagtatccttattaattgactgcttttgtttctcgtgctactcaggtgagaaaaatcacgttcacgggatcaacagcagttgggaagaagttgatggcagctgctgcacctaccgtcaagaaggtatacttaagcaacgatatcatgctatttaaaataatattctctagaatctagattgaataccccctggtacctcttcttttttattggtgtaggtttctctagaacttggcggcaacgcaccctctatagtatttgatgatgcagacctggatgtagctgtaaaaggaacggtcagcaatagtcataaggttgaaggcatttctttatccaaaagatgcaaaaacgttgattcatctggaattactcagaactgacagtatcccgtcttttttccatactagatgtgtatatagctttactgcttatatagatacttatgtccatgatccacctatcccagctcttaatttcaagctcaattttcttagaggtgcactatgggatcttcaataccctaaac

SEQ ID NO: 29291 - DNA, 1215 bp, Arabidopsis thaliana landsberg
ctcagctcataattattttttgcttgaatcaatagagtaaccgttcttgatagatgtcaagtgccttgataatttttccgatgaacatctttctgtgcattctatacttaaccgatgttgcaaatgttgtccttgcttctgacattgaatctgtcacaacaacaagagggaaagcttaagttttagtatatgagcgattatagataataacacattggtgtatttatctttagtgtaatacctagcaacttctggtcttgctctgctgttgtgggatattccgcaagcatctttcgacattcatcttgcaattctttaactgcttttctttccgcactcggtattggaggaagatctatgtctgaccaagtaggtaatgttcttgctgcagcgataactgctccatcaacaaaagtatcgcccctcgataactcgcctgccacagatttaggtaacattggtgctcatttctccatcttttgtcaaggaatagagaggaaacagaagaaaaggaacttactgtcatggtaatattcttcaggaagaccataaatattgaagaccgataaaaaggaatttaaatggatgcgagaatctccagagaactttatagcatcccacggattctgcagcagaccagaaaaactgaataaacgagaaaacttgcaaaggaaacatagtttgtgtaagatgaatgtgattgtcgtaaaaagcattaccacaggagttgagaagccgtatctttccataagcatgttgtttttctggcctggcatgtaattaatcgtcatctgtgaaaagcattataagaagatagataaagcagtgaagtgaggctgacacttaggaacatttgagtctcttacctcttcgcctttcttaatgtcttgaccagcatttgacataacctccagcatgcgatctttaggacgccaatgtaggaaacagtttggttcaaatgagtggtttagcatgtctgcagagaatgatcaatcgtgagattcttatttagttcctcaacaaaaagttcattgatactaaatcttaatttatcaataactacacaacatgctcttccttaccagcataaggaatcatcatatttaattcctgaaccaaagcaccgaccctagtttgcatactgatgcatcgtgtctgtgccatactaaccgcccatatgaatctttctggatcctcggcaagccttttgatttt

SEQ ID NO: 29292 - DNA, 2718 bp, Arabidopsis thaliana landsberg
atctctccttgataagtgttctccggagcctatggaatccccaaatggccaaatatctttctgacttctttttttttctcatgcactttttttgttcttatgcacttattatgtttatctgtatataatgtattgcatgaaattttacattatatttcaatactacaaaacaaatttgagtcaccaccacccaatactggtagtgtatatctatatatatattatattatttacgaattaataaattatattaatcaaatctagaatggcataccaaaaagtgatatagtgactagcgagttacgttacatatggattaacatgtgcatgaaaattatacatgtatttatatacaaatacacatgcaccaataacttaggaaaaatagtgtcattaaagtaaatacaacgtacatacgcaccaactgcacaggctgtcaatttgataaatcataatgcattgtacgttttttctttttttgcaatgatatatgtaacccggtttcgaccacgcgagtgaacaactaaacaaaacccaactaggtcaaaatacattcgtttccccttacaaattatacaatataatggcagaaaatttaaaccgtttctgaatcccaaatttacaagaaccaaatattagcttgatttggatgaagccggtcaatttatataggtttacttcagtaagtaagagcctaaaatggttaggcttaggtgctttgcttgtaagaaaggagaatttgtactttaaatgaaaaatataggaacaacctaatttatatgtttggtttggtctctctggtcttctaacgaactctagttaaagctgccatctccatatgtatatatgccgggttcttgttaatacgcctatgtcaaaaggtatttttgtgtgtgttacgataactagcatagttcgacatttgaggctgagtttatattttgaatccaggcacagccgcacattcaaacttgataattctttacttaggcaatgcatatgtgatctcattcattatgcattcatttatttaccgataattctttacttaggtatgaatcttccaagaaagtcttagtcaaacttgaatcccgctggtgagatcgatgtggcaaataataaagaatctgcatggtggaaatatatttaacggtatacagtctaatagtcttttaccatttcactaatttttattaaagttgtacgtacgagaataatcatagtcataaatattatgaaatagaaaatcagatcaatgttgtccgtagtttgctttataagtgagataaagttacgaaagtgtggtaaaatttgtctcggagagtaacttgaaacgtaaagatgaaacaaagttgttaaagatttgattcttattagatgtgccacgcttttagagaaccaaaaacgatcatgaaataaattcgctgtttctatcgagctctttttgttatacattatactatgcggtatagaattacgtaccatattgtttaaataattatttttatcaaatagttaataactgtattaaattgctgataaccaaaacaaatttggtatggcttggctcttcggttaacgttttcagtttttgttgttgttgttgttgtaatttcataaattattaagagaccactacattattaagaggccattttacatattctattaatatatctgtaaaaatctactcgttcgacaaatttataaacttttatttctttttgaaattaccgttttgccaaggttttttgtcgacaattatgtgcatatgacttaaacgttgatcttacttgttttaaaactcttaccgagagaatttactctttattagaaaatttacttcctctatatcttaacgttgaccacatagttttggagtccaaaaatactgaactttcttagtcacgatagtgggcattgataaatgcagcatgagactatatatcactattgattatctgctacaacgatttaatgctctttattgataaataattcacaacttcaatatttttgtctcagttaaaattaccaccggtatggagtcaatagtaagtgatgcccaaaacttgccataaactctcacactagctctcactctcaatggccccaaatcccttaattttatgcattctttgtcaattacaattttttttttgtcgtatatacatctttccatatctgagtccacatgttgatatattatatcaaatatttcttagtggaaaactcttttaggatttggatatttagcatagttttaaatttgaattgcccttttttaattacgtttatggttgaaactataggtggacttcttggaatatacgtcatgtaaacattaggtcaatcaatcatatcacacaccatacaaaatattcaattctctgctataaaataagacaacaagtgaaaaatactacaacaactaacacaagacacaagacacaagtggtgtcgttgaaattttaatatgcttcaaagacttttgaggtttttgggccaaggaatccaagtttctgtctacacttacaaatgggcctgtttgagtccatagccacaacacgtgtcaggatttgacgggattctaaataagacacgtgttaagatcttcatggccctttaccgccgtcgtcaccgagaaatgccgcagacagatttgctccgggaacaataacgggcaaattttttaggttagaagaaaaaaaacatgga

SEQ ID NO: 29293 - DNA, 1652 bp, Arabidopsis thaliana landsberg
  unsure (1)..(1652): unsure at all n locations
aaaatctttctgaggtaaatttgtaatttcgtcagttttttattcctccttatcagtaactctaggtggcgcggacttgttcatatgctaaccggagattcagctttgggatgccgttgcagccaaactcattgaattagtagcctctctagtagaaaatattcgatataaaaaacgactctgttagaactcagaagttattacagtttttattaattggccaacattttaagaaaaacagaccaactaaagaggtctctctacatgataaacaacctcaaacgttaaatagagagattaagaaagttcgtaagttttagactgaaactgcaaaacaaaagttccatgacgtaaacatacacggcacaacatcgtggagactaggctctcttggcaacatcgccatcgtcagtttgatcaaacccaactggaccattctctgtgttaccgttctctgcatctccaaattgattgtcactgccaccaaattgttcatcgcctcccaaaccgctttcagtctgatgatccgtatcattgcctaatggttggttgctctcaaacttgtcatcaaagccagcattagtggagctgccttgggcaaagttttcacttccaccaacaccacctgcaacaccatatccaccgccgccgccaaaattgcttccatagccaccaccaccaccaacagcattgccactataaggagggttacctccataaccaccagcatttccaccataggaagagttaccaccaccacccccagcatttccaccataagaagagttgcctccgtaaccaccggcaccacctccataaccaccagctggagcaccataaccaccatctgaagcaccataaccaccaccaggaccaccgaatccccttcctccaaacccacttcctctttcagttgcataattcaccctaattcttcgaccatgaaggtcctatatgcaaaaaaaaagagagtaacaagatatacaatccacaaacagaaagattgctccaccattcgacccatcattaagagagagtaagtcgttgcttaacagattaatagtatttcaagctagatgataaacatctaccctacctatgttgccaacgtttgaaaggccacaaaacttaagtgttctaaataaatgaatcgtcaaggcacatcgatttgaaagaagtcaaacattcaaaacaaaacaatattggtcagaaaaggaaaagaaacgacaaaggaataaactaaagccacacaacatcttagtatcacaagaagctggaacatttatgtgatacctgtccatccaattgcatggcattactagcctcctcagtcgaagtaaatgttacgaaagcaaagcccctagatctgcctnnnnnnnnnnnnnnnnnnnnnnnnnnnnnnnntgataaaaattagtcagttgttaagagtaaaaccacaaaaatatagcaaaaggaatttaatacttcaaaggttagagttttgtgcaataacttaaagggagaaagctagttaccatcaacaacttctccatatttgctaaaagccttctcttaagccaaactcatcagtgctgtaggagatacctgaagaaacatagacaatttttgagacaaacaaaacaaaaaagagtattctttcgacagctgaa

SEQ ID NO: 29294 - DNA, 3049 bp, Arabidopsis thaliana landsberg
  unsure (1)..(3049): unsure at all n locations
gatgtacatcataaaatgaacgctgcccattaaccgactctcaaatcactaaaatcgtgagtctattgtagatgattaattaaaaaaaaacattataaaaattgctatacatagttagacacaagatcaaaagtttgaatatcaaattaaaatcttgatttcagtttttattcaactacgggatggttacaatgaacgaattcatgccaaacactatctcagttcctcacaacccatgaacatgagaaattttgcttttcttttccttacgtagtagttgctataatcatatgaacttaaaacggatatttaaaaaatgaataagataagattatattctttaagaaagccatttctattaagtaaccaatacacgccatgtatttcattaatgtttataatcacaaattcttaagataaagagagatagtaagcaatccctagttttatcggatatcttcttgagaatgaattctttaactctcttttttattagaggactattggtgtatatgagggtagcgtagactctgcgtaccttttgataaattattcgatgcggttctacgtcgattatagctatagaaaataacgtattatttaagacaacaaaatcttaataatttatatatagtattagtagtactagatgtgattctttaccccaaaactgaaatatctttcatgtgattccttggttatctacattcacgaaaacctatatccttccttgtcttacttgatttaaaataatacaagctaagtatgtaatctatacaattaaaacaagagattataatagacatggatatactattccatattttttagcaattgggtctatagataggaattttgctgatccaagtttcgtaatctttatgtgaattttacaaaaatcgaatttaaatgagcacgccagttaattattacattaccgtagtatagatgacactataactataattatctccataccgctgatcttgtaaaattgttggtaacaaatttgacgttggtgcaggccgtttgaccgatttatagaatgataaaattgacatttatatactacaagaaaacatatatatatgagtagataactctcgaagaaagttttgttttgtgaaactatcacatatactatcgatagttaatcctatttttcaaacgatcatatgcatgaaccaaaatcaataacctctactcggataaaaaaaaaaattccatttcacagaacagtatgtatggtttatattatttctatgtcacatgaatctccttgtgagttgtgagtagtaaaaagaaaaagaaaactataaatgaacctagaccaatcaattaatcaaacgaccacctatatatatctcatgaaaattcgaaaaatgtaacagtccaaatattaactattgaaactacttaacaacaaacacaaacgccacgcccatacctctctatatgcataccatgaacgtagtcataagctatagggtcctttctnnnnnnnnnnnnnnnnnnnnnnnnnnnnntatgtttatatctcagtgagttaggacaactaataaaagcacccctgataatattatgcggcctcgtgttcttacaataacaaaaccctatgtagaaccctaccttttaagaaaggattatataggtctttctatatacattaatatatatgtgtatacacacctatcttatttagatatatgcattctttgtttttcctttttggaacttagcttatatttcgatctcatgtagaatcataccccctacttagtgcaaacccattgcaagcacagcaaatccccaaaaaggataaaatttaatcgcactatactaatacaaattaaataatacatatataaatggtaaagaggagactcatctcgaggcgacacgagcacttttccggctattcctcccaccacacaccacaccacatttcaccatggaaactctacaaagcctttctctggattcccgtgactgtgacctctctctatttctttgatttttctcctccaagaatttaccaccggtttttcgtgatttaaacgtctatgcctccacatgcacatttttatattcaattattcatgtctatctaagtaacacttaatctcaggctccatacctttttatgactctactaattaactcgcaggcttcaaatggttctttcttcatgaagtttatatagtagtttgattaagtagggtttgaataacatttaatgagtaatttgctggttgtgatttagaaaaaaccacatcatcatcaaatatgtgagatggagaagttcgagcggctctctttcccatttgatcaattacggttttgcattattaagtaaacatttgcatttaggatttcgcataagcttcttaatggtggctaaatgttttgcacaatatttcatgcataaaattcagcaaggacataaggtataatcgtcattaatatgcttagaaacatttgtataaacgagaggattgctcatctagagaaactctattttttctttctattattacactaactctattttagagtacaattagaatgatacataaatcatgttttgttatagagtcactctattttaaagtaaaaaatagaaatatacattgaagatggtcttgatcagttaaaactatcattattcatttagaaatttcaagaaataccatcttataatatatcaaacaatagaagattcaaccaaacaaaagtaaatttatttaaaagttcaataatttcatatttttcttaagtaaacagaatagattttggttttaaagattaattatctttataaaaaaaaaaggaaaatctaaacagcttaaaaccaagcaaaacttaattagaaatatgtttttatttgcgtccactctaattagaattattattatttgactgataataaactcacgaggaaacctaacctaaacgtggcagtgtaataataatatgagaggaggacggcaacaaaaatctgaacgatgggggaaaaaagaaagaaaagagtattaaccgagaatcgccg

SEQ ID NO: 29295 - DNA, 2521 bp, Arabidopsis thaliana landsberg
caaattaaaacttagttagacctcaaagtatcaaagacaggttttgatgagtagattcatgtgttcagaagtgaagagggtgcaaataccccatcttcagatctaggaggagttggaagtgggacgctctgctgattgaactgctgtacattgtataattccatgaccttgtcgaaattctccgcccaccacttttgagcttgccatttatcgaacatttcacggctgcaagtaatacaaatttgaagaaatcaaagagctgacttaagcatatacaatacagaaccaaagagctaccaggttaacagtcttaggttcacaaaactcaagggatctgcagtaaattgtcaaaactagaatctagaaatatcaatcctagggagctaaagtgttcctcttgccatgaagaaagttagttagatcatcttgctctcattatatgttccacatacaaaaagaactttacgaaattcacaaccacttccccacactttgtccttggggaattcatttaagttctccatcggattcaactaccgaaatataacccacatctcaaagacctttcttggcaaaaaggatgtacaagttctcataattataagaaatggtttgggaccacttcaatcgattcaagaaaaatgaaagcagcaacagtttccaacacagaaatctcacataataatatcctaaatatcaactgtactctcacattgcttgtctccaagaaccacacatctctacttccaaaatcaaatcaaacaatttcaaaacagtatggattagttcatttgagtatcatcttcaatattcccgattggaaacacattgtaccatcttgattaagtccaatatccaaacttttacttagtgtaaatcctacaaaacagttaaaaattacctgaaccgaatccgcttcatatcattccctccctcaggcaatgatacaaatgtgatgaggacaccaggctccacttgagcaacccattccttgagctcatcttcttcctccatgaacactgtagactctgtcctaccactcatggattcaggtgttccttctccactcaaaaaacctttcaaccttgactccatttccttccccaaaatcttaggtgttgagcttccactccctgctctcttgtacgcataacgaaacctcccagaattcgaagcaacatccgaatcagcgtagcttcggttcttattctgattagacgacccagaacacggtttgcagcttttgtaagcacctgatgcttttactgccatgtctttaatctgaagattcacatacaagaatcacatgttattcacaaaattaaatacacagtgaaaaaagtcacggacttaaattgatttgttcttagcttccaaacagaaaccaacaagagcaaaaaatggtccttttctcatttgtgtttttttttcgtgaaagtgacacagaggaagaatgtttatctctacctgtgacgtcagggacttaatctgcttagacctgggtgtttcaataactctgtcttcttcttcttcatcctcttcttgtttcttagatccaccattgttggtgtttagctgcttcgtacaagctatgcatgtcagcatctctatcactcactaaagagtttcaatttcgacctgagaatttagaagaatgaaacccaagtcacttcctccaccaaaaataatcaaatctaagaaatgagaacccaaaaaggctcataatttgtacctttttttgcaacagtagttacgcacttcaacttctaccctccaatatataaacccaacactcactaaagtcgattgcttttctctcaaccacagagattcagatgtagaactccaccagtgaaatgacggcaaagggaaggaggagaccgttgcggcagaggaaaattaaagtaccaggatctgtagatcagacctagaaacgccttggcattaaagactcttcttttttttaaaactctctgggtcggtttacttgtggcttgaaagctcttatcagagagattgagtgagatacactcttaaatctcagcactttatgaaatccaaagccgaatgcagaagcaaaatgcaaaaaagctacgaatttttggggagagatagagagagagaaagagaggagctttgatatttgggctttgagatcgtcggacactgtgaaagtttgcgcacaagtgtggtgttgtgttcctcctccttcctaatactataaaaaaagctcactcttttctttttcttcagagaaaaaaaaacagtaatggctattttcagattcgtctttaagtttgatactttatggattattatgaccaaaccaaaaacaaacaaaaacgtaacacagtttttactaacatagattaaccaattaaatagttctacagctttattgcaattttaatatccgcattttgtcaacttttgatttattatttataataaataacttagttttgaatcgtcttgtatttcatttgcaaacaaaactagtagtatattggtaaattttact

SEQ ID NO: 29296 - DNA, 3301 bp, Arabidopsis thaliana landsberg
ggtgatgagactcgagctcgtagaacttgatactttgagatatgcattggtataacagttgcggttgagttagtagcaaatccatcaataattttaatgtttatagttttgtacactgaatattgattttgttttgctctctttagggttatagttcaattgctgtcgtttgatattgttagatttttgttcgtaatctttgtttcataaagactaatttctcatataaaataaaaataatgtaataatttctaaataaccttccaacgacgtcttctttcaacacccattggtccttcacgcaaccccgtcaccgtcatcttcttgacccgaccaaccgctttccgggtcggtttcttccacgtgtcaccccaattcatctctcttcctcccaaagatatctttagaaacaaacaattccaatcgcgtcgtcaacaatgaatgaataattttgatgtatttgtaaaacaatggaagcatcgagaaatcgatcgctcgtcggaaacaaccgatctccggagatgaacgaaaacgacggcgaagatgttgcggcttcggcagcggtggaggtgtgggatacgttgagtaatggattcaaacgtgcacagctttatcttgatcagaatcgtgatttgatacaacgcgtcaacgaaaaccacatgtctcgaatcccagataacgtcgctagaaacgttggcttgatcaacgaaatcaacggtaatatctctcaagttatggagatttactctgatttatctctcaatttcgccagaaatatcgatcagcggcggaggacgaccaaggacggcgacaccacaactaccaccaccggttcttaagcgcgattaggagtgtcatggagtttgtatatgattacaaggattaggatattgcactagtctattacgtgttctctaaggtattttatgcttatgtattcagctcctctgcttttgttttgattctgcatgatctcattcactagtttcatgatttttttgatactacattttctaaaagcttttatggattgaaatagcttttagatggctctggtcagttctatagctaagtattgaatatagatcatgatgaattgatgatccattccatcataatgagcaatgagtgggtaagagtcttagatgagccccactaggttcctcacacatcataaatagtttactgcaataggtctccatgggcacaaggcgttgttaggccagtaccggatgtcatgaaccctataatgctatccaccgatcaccggatgccgtgaaccctactgctttgaccgcaaaggttacgtgatagatacatcaaaacaatgttccatggcatggtgaaggaattcattgaaaatcaacttgggctacaagccaattgcagtttcagtcaaattcctaaatttctagagaagatggaagcatatgttatcactggttttgactggttatatctgatatttttggccaatttactggttatcccgtttactagtaataagattagcttcttcatctacagagcaaagcagcatgggatgaagatattcgtgctgatacagcagctactccatagagtttccatggcgtatctaaaaacaggaaaggccgagtactattttcatggaaaagtctgttacgcaagaaaacgaaatttcagagtccagtgacaccattctgttcttgtagcatttgggacgtgtttagattacaactaactcgtaagagtaactttaaaatgctattcttagagaggaagttctccactgtctgcaattacgactttgctcttaggagttccgctttgtttgccctcagcttcaatcttataaactacatccattccttgcaccactttcccaaacaccacatgccttccatctaaccagcttgttgtcaccgttgtgataaaaaactgcgaaccatttgtgtcttctcccgagttcgccattgaaagtacacctgtatccaatcacattgtcaaccatcagacatttctaaatacttgccaaaactttgcttcaaggaaaataatgatcaccaacctggtccagtgtgcttcagcttgaagttctcatcagcaaacttctgaccatagattgattctccacccataccgttcccatgcgtgaagtcacctccctggatcataaagctgggaatgattcgatggaacttgcttcccttgtagtgtagaggtttcccactcttccctacacctttctcccctgccaaatttaaacattgtaacacaaaccggttccgaaaagattaaataaaatgcatcttatctccattataactccgtaataatttcattagatctcgaaacaaatgttaatgaaaacaaatactagcactctcattgtccggcttgtaatattgtttcgagattgtgcataatgtaaagtttatatagtgaaactataagaatatagttagtagattacctgtgcacaaagctctgaagttttctgcaaagaagcaaacacactcacgaattactctcttagatataaagcacacactaaaatagtccagaaccatgatcaaaaacttcaaaaaccatataattgtacctgcagttttaggaactgccttgccaaatagtcctataacaacgcgacctgcgacataatcataaccagagaatcaatcaaacatcaaaacaaaccaagaatcatcagctgtatctgagcaacaatccattttaacaaatctgtaagcttaatgaacaaacattttgactaaaatcatcgaatcataccagcggatttgccgtcgatctctacatcgaagtaaaccttgtgagtaatttccttgagatcttcttttgcctgaattaaacaaacagagatttgaactgtctcatcataatcacatagttcttaattcctgaagtataacactagaagcttaagcaatctggtgacttccattagaatgttgatgtagatctaatgtatcgtttgtggtaacgaaacatttgaacagatatcgattcgagaggatatgaatgaagttacctgaattgaagctatggctccgaagaggaagagagttccgagtagaataaagcttgctttcgccatcttcgtgatagtattatttttctcaaatcgaaaagtgaaaacagagtagtagttgaagaaaggaaatgtttatgtttgacgatccaatgctaacatacgctggagttgttattggacttcttagtgggctttttaaatttaatgtggaccattttatccaacacaagttgtatcatttttacagtattggataatggtgaaaaa

SEQ ID NO: 29297 - DNA, 741 bp, Arabidopsis thaliana landsberg
ggtggagaagatatatcagtcctctagcaataccattgatgatatcgtttctcttttgccaatttaagctagagcttcgtgtttggtctacacatccaacacaaccaacaacaagttaacgttttcacaaaaatgttcaattattagaacagaagctgtttgagtcactaaccaaagagatgcgagtcaaggcttaaattctccaagtactcatagatcaacatcttctcacccttatcgacgcaacaacctagaagccggacaaggtttatgtgctgaagctttgcaattaatctaacctcgttcatgaactcatcagtcccttgtgaggacattttcgatagtctctttaccgcaatttcttttccgtcaagtaatcttccctattaccacacatgtgattatacaatgaaaccttgtgcagtggtagattttcaatatgttttgaatcacttttaccttgtaaacaataccgaatccaccttgtccaagcttgttgtcgttagaaaaattgtttgttgccgtggcaagagcttccaactccaacaatggaagctctaggtactcactttttttttctttggatgtgtaacccctcctagatactaccacatcgttgattagcgagtcttggcttctcacttgatcaactgtttcattcagacattaaaaaaacaaaacaatcaagacatttgattatcaaaatttattggcaaaaataaaggaaatgaaagctaatga

SEQ ID NO: 29298 - DNA, 3139 bp, Arabidopsis thaliana landsberg
  unsure (1)..(3139): unsure at all n locations
caccaattcattgtgaagtagaacactacgagtgtaacaataggaccaatactataatcgtaagttcgtaacttatatttttaacaactttgccctcatttgctttcctgtcgttgtcactatttaattcacgctaatcaatttaccttcaaatctatatagattaactttacagtaacaatataaaatgttgatgctatatgaagatattgttctgagtatcaaatcatgtaggcttcactagaccttatgataatattatagtttacctattattataacgtagaatttcttgagtttatccaatgggagaagcaaccggcaacatcggcataaacatggaaaaaaaacgtatcgagaaccaaaaacacttacttgtttatataaaacccacaaatactaaaatttataataaagattcattaccgtacaatttaaatattaaattaacacatacattatacatgacaacaaacagacatacaaatgtttaaatcgtctaagtattacatatgattgaccagagcaacaaaacaaaagacacattacatatatagaatcactatataacaaaaataaaaagtcaagttcttgatttaatcaagatcttggtggattttgatagaattgcgtacctggtggcatgaacacactagtcgtcatgttacttgaatagtaaccaccagaatttggatctacaaacatggccgatgatactcctccgccaccgtcggtcacaactggaggattaaacggatgtcctcctcctccgcctctgcggatgagctctgatgatcgcttccgccactaccgccactcatgtagctgctttcagggccttggtcatacnnnnnnnnnnnnnnnnnnnnnnnnnnnntattgaccgtcgtttgataagcgtactgaccatctcctccatcatctacgccactcattttaacacaccgaaaaagcgcatctgagctcacttcccccggaaaacttgcctcccccatttctaaccctaaaaacatatatacacaattatacacattaatcaacgtccataaacacaagattacgtttatgttttaatgttatgtttcacttcaaaacagaacacaacatttaaatgttttttatcaaacattttttcacactgaaatttgattaaaaataaatatagaatgttgtatttttaaagtaaacaaaatttgtgcaagtagtgaaaggaaaattaaactcacatatatttttgtgttgaaaaattcgtgtttcttctaacaaaaacatatggttcgaatatatatgaagttgtctggatatcaaattgtttataaagacataaaaaaaaaaaacctgctgagtggcatggcaagcgagaagaggaggatgttcctggaagagtaggtccctatggcgttttggatactcgaaccgcctcctccagcaccgccactacccgttccgccgccacctccagatgtggacatatgaagctgctgttgtctctcgcggcgcctcgcaacggggatccacgtgctcctgacgtgagtggaacaatcgaatccacggcttttacagcaagtcctgcaacgcatatgagtgcagtctttcttggcttggttcccacagtcccgacagctaatggtgatggatcttgatgaagtggctaaatcagagacgtcgatctgatgacctggataaagatctaagctttgttgttgtggatgtgaatgatgatgcatgagcatctgctctggtggaatctgccatacttgttggctcgagcttgggttgatattattggtgtttgcgtttgatctataccaaacccaatttgtcttttgttgttgttgattttcttcttcttcgtctccgttgttgttgttgttacctcctaatgagaatatcccagccattttttaagacctaaaacttcaaaccctaatcttgacccaactatatccataattcagaaaccctaattaccatgaaatccttatccttttttctccttcttcttctcactcaaattcagccttatactcccttagcttgtgggtgttgttgctgctctccgaatctaaattcgaatgttctacaagatctctctttctctctctctcttggaacaaagtgtgtttcttggtagtgagtagttgaagtgagagaaagtaagaagaagaaaaagaaacagaagagaagaaagaaagaagaatttaagctgtctacttatttatgaatctttatttttctctataaatttctgcaacgccgccatgggcgtttttagatttctctctcctctgctctgctcatccctagaatttaagtctctctctctctccactactctgatttggtttttgcagattctatgaaacccaaagtgaaaagcttttctttcctcttctcacttcggctttgtctgaacaaaacgcttctagttctgtccgtatgaaagtaaaaaaaggattaaacaaagactttctctctctgctatctcttctttctctctctaccgactcagagtttcacacccacggggaatgatccaccggtcctagctttcttgttctcatcccatggaccagagtttgccaagtggcgaatgtgcttaagcttgttttatcttaaaacggatgaattcaattcttttctttgaaaggtagcatacataatttttttcgtggttatcaaaaaaaaaaagctagctcatgtgtccgtacgtattaatgaaccgtatttaatttagggtaatttgaaatcctacgcgattagaaaattaaatccttctttttttctttttctttggccttaagcttttttttgtttaatctcaaacaatagtaattgctcatctagctgcctcagggttatatcttgatcaaatttattagagcgttcttaacgatttgattggttaatatggtccgaaaggctaatgttacgtattccaacattttacccttattaagtaaagccatatttagattttttctgaggtaaggaatcttgtgatcaatcagaacaactctttttttccttcataaaatattccctttttcattatcatacatgtaaatatgcctatttttatcgatgcctatgctattttgagtagaccatacatggtttaaaaatgcttaaaaaaaca

SEQ ID NO: 29299 - DNA, 2725 bp, Arabidopsis thaliana landsberg
  unsure (1)..(2725): unsure at all n locations
ggctgggaaatggcacggacccggtccatgcccagaggcaatagacaaacagtgcagcagccgcgttttcagccacctcctgctatcaacaagtcactctcagtcaactcaaggcttcttcctcagggtagcggaggtctcctcaatggtggtggtaggccaagccctcttttgcaaggtaacggttctagctcagctcctcaagcctctaaacccattccaactgttgagaagccgcaaccacggtctcaacctcagccacagccacaggcnnnnnnnnnnnnnnnnnnnnnnnacgcaggagagctcgagagaaaaaccaagtcgcttcttgaagagtatttcagtattcgtttagtggatgaggcattgcaatgcgttgaggaactaaaatctccatcttaccacccggagctcgtcaaggaaacaatctcgctcggtctagagaaaaacccaccattggttgaaccaattgccaaactcttgaaacatctgatctctaagaatgtgctgacatctaaagacttaggggcaggttgtttgctctacggttccatgttggatgacattggaatcgatctgccaaaagcaccaaacagcttcggagagttcttaggggagttggtctcagctaaagtcttggatttcgagctggtgagagatgttctgaagaagatggaagatgagtggttcagaaaaaccgtactcaatgcagtgataaagagtgttcgcgagtgtccatcgggacagtctgtattggattcgcaggcggttgaagttgaggcatgccagagtttgctctaaaagtaaattggtttggccggcaaagtcttaaaatgtttacttgaggagtagtctgaatcatttttcttatataagttttgagttaatatgacatacttggaagatttggttcagttttgttacatctttgtttttttcgttcatcttgagttttgaacatttcagggtgaggagaaaaaaaaacacaatttgttgattgtttatcttattcttagtgcctacacaaatttttgtctttgacattaataatctaattaattgtgggatgccttaattcaatttcaatcatcgttgaaactcactcagggtaatggtaagtatggtactaccattatataaatatagtatgtattaggactagggtaacatataacaatgaagatttgattgtattcctcactgttggaatcctcttcaatatcgaatggactagagtaaatataggaatcactgtcactatcttcatcaaaagactccacaacttcttctttcttctttcctggaaacaacttagcaaagcataacaggaaagaagagaaaagaagtgtgaagtactcaagtgatgcaataactaacaatggttttaaacttttcttcctgtttttggtattgtcccttactcatcttgaattcagaatcactgtcagtctctgtttcttcaccaagtgtctttgtcttcttcactgttcagagaaaaaacagtgtcttctttttcctcttccacttcagtgactgctgagctaatttctttagctgtatcatagcgcgatagatactgacctttaatatgagggctccataggcaaatagtaattgggcattatgcattcatcattcatcaaagtatatagtaaaataaaccacaatacctctgtcttaaaaaaaatggtattattatctccaggatacaagtaaattacactttaaagtacaatatgtgtgctcaagagaaagaatcaatcaagaggtcaagcaacatagtagattgggcgtctgtattcatcaaaatactcatcgcggtgcaagaaacaaattgcgtaaattgcgtatattattcctggtaagtagcctaagcaagtcagtatcaaacaaatgaagaactcaacctacaagttaaaccaaaaaaacatgagttaggaaaaacaaaattttaaaattttattttttagtcccttaattagtgtttctttttaacaaaaacaccacaattatatttttggtaactgatctccacatacatcttattgattggtttcggtaaaccggaacgcaaccaatttcaaaccgtaatcaaatcaatttaaactacggtttcgatttctgaaataagaagctgagaaaatttcagagatctcaattctcagtttgatgaaatttaagagagatcgagagagagagatgaaacttacagtgcaacagccatgcctgagacaaactccgacaggaggaagaagaattgcgatgaagatctcgcagcaaagctcgcaactactcgccattaatttacggagattagatcagatttgatgacttgaaaaagagaagaagagagaagcttcacgaaacaaacaaccacaaatatagtaggtgttgtgtccagcgacgtgaatcttaataattaagatacagagtgtaccgcgagatctttaaccgtttatcctacggttcgttgttgatatctttttgggtattgacgtatgacgtctgtttattggttgactcacgggagctttggtatggcttcacttaccatattcttttattatttaatctcattccagctgataaatgatattagtactagatgagctacattgcattatcttggattgtaaataattatgagtatgaaaatttaataattgtgccaaattagttgtaaatacaattaagattattaagatatcattaaaattaacac

SEQ ID NO: 29300 - DNA, 1550 bp, Arabidopsis thaliana landsberg
gtctaattgagcccacataatcacaatctcggatcattactcattacttggtttgtttgtctctctggttgatctgacttgaatcgtaatcttaaaaacagagttccatgtagatctggtatgtgttcatcgccaatccatgtgacatcgtctcagttgatttctagtgagatctttcctgttccgatgattaaggctctcttataccctggtgctgtagtcaatggccttgccatcaacatgacatttccaaagtgggaaaatgtgttagatatctacaatctcaccaatgtgaaagaagcttctgcagtgaccgatcttcaacgcctagaggttcgcttattctatctcaagagctcctaacacagttcacttaagattctactaatagtctcacaagtgatacattttgtacaggttcttgcagggagctacttttctgtagctggggcgtttgtgggtttgctaaagcctggaaggatgagcatgtttgggtcattgctactagtatggggtcttgttaaagaagggatcttagggaagccagtaaatactgacccagccaaaactgtttatgtgtacccaactatggtgcttgcgatgatctgcgctttctctatgataaagtatgacttgaggaaagccacgagggcagctccagctcgtcccattgctaaacctctaatgagctcttcaaaatctaagctgaagtgagttttttgagacttaatagggcttgtgtcctgtctttgtaccaacacccgggaaaggaaaatgtcccggaaaatggcattgtcactatattttgctctcagttaccttatgtttcatgaattgtctattttctaggacactgctcagtagtcaatatcttccaatatcaaaaaagcacataaatacgaaaattgaaatgagtagcaatacaaggggttccaatgaaaaaccatcgtattgcttccagtttcataattcgtccatcttgctcttcaacttgttcgtgtaacagcttattaactgtagtttttgaggaatgaatccttgataaagtcccccctttccccatataatatagcgtctctttacttaaccgaaaagcctataacattcaccacgagaggttcggatgacttggttaagtcctaccaatggtatgcgtttcttggtcaaatgaaatagtgtttttgaaaggcacaaacgatttgccattgacattttcaatttctgactaattctttatcaatttctttctccagtagtgcaagaaacaagttttctctcatctttacagaattcaaagctctggtgtagttgaagtcatataagacatggatcagaatcagggtattacagtccttccaggtgatgcccttgtggattccatcaaagagaacttggaatctttgtcttctctttcaaccaactgttgtatctataaggcacctgagaggctgcgcagattgaaccccgatgcttattcgtctcgagttgtgtcaattggacccttacactactgtaaagaagaacttctagccatggaagatcatacactt

SEQ ID NO: 29301 - DNA, 928 bp, Arabidopsis thaliana landsberg
atatcaaatgatatgtttcttttagcgttcacgtgcatacctttttagccacaaatttccctaaatttattacgtgtgcatacaaacaatcctaaatcatttgatacagaaattagagcttgtctttttctcaataaatctcttgaaagctctatctattgcatttggcccaattataacatttattgcatttgcttgcacactattgccttttggttctctgcaactttcactttatgaaaacaattttcaaaaatttatgattttcctagagatgacaagttgaaagttgtttcatttatgaatccaactgttgtgtgaagtgtctttgaacaagaatgctatgcacagtaagtagaaagctaatacagacacaacaccaaaaatatcatcatgcgaccaagaagttaattctaaagctaaagctctcacatgtggctctaaagagatggttaacttacaaatctgagctcacattctccttgactttgtcaccatgtgtcggttgcttgacgcatagccaaacttgctgatgtctggtttaagagataaccttttttttgacaaaaccaattaaatctctatgagaatattgcatcaatcaccaaaagtactgaagatattatactatcagaggtaaaaatgtttaccctttggacggacaagtgttgcggatatctttgagaggggcacggagaccgctagcacgagagccagtcccagaatatttgaaagacgatatagctgagacaaatctttccactgatttctctgctatttctgagtaatgccctatatgcgaaatgttcgatccaaacttctcaacatcatcggtttctaatggtgtttctgcattaagagcttcacaagatagtacatgaataaaatcagtttccgtcaaagatcccattgcgcctatataacaatt

SEQ ID NO: 29302 - DNA, 1659 bp, Arabidopsis thaliana landsberg
ggtgttagatttgccggcatccatcatgtatcctcagtgttgtgggagagataacatgtgtagtatgtttctagtgtgctttcgggtaggtaagcacgtacagttggtgtcagtgtcagtgcgtcctctttatgaagagtcattcaagagagctttactgactttcaagcatcaacgtgtctatgacccaaatgctgaagatatcatacacttgtgtgacatttctgacaaccttggtgaagattcagattttgtaggcccatatcctttgagacaagtattttgacactaggcctccatttatcaaaattaattaacatctaattgatttcttaacataattcacatcgatgccacaagatattgctaagggtatagcactaggccagcttgatcccttcacacagttgccattccaggtatattaagacttttttctatttatattgtctccttctttttccctcccggagatgttttcttgactcgttgtcttgttttcttgaatgaataggctgagagtgttactcctaaattggctgttgatgatatatcccgtcccaaaagtttcaaacctgaaactgtaaagaaaaagcttgatttgccagtccaaaaaaaccttctcaccaagtacttctgtatccttaaatggcgcatcccatatatttctttgcagtttattacatttggaatggggtttacttggtttagtaggatttttgttttgatcaagatgtcctgtatgtctttaagagtttcaatagctgttgaaactggagatgtttttttatctgatctacttgttcttcacttaacatctgaaaggctttgcgtctgttgaggcaaaaagaaaattcaaggctcctaggatatcaccaatgtctctgaccccaactgatgagtctccaagcattcctgatgacaacacaccagatttagatgctctttcaagccagacaacatatgaatccccggtttatagcttggtaagcaactagaagaaccacatttttgatctggtcgaaagttgtatcacacgctccaatctctttgtgtctttagggtgagaatccatgtgttagcgaagttgcagagaaaagagattcacccgatgacggtacaatatttatttatttccatgattgaaaaaaattatactctaaacttactatcctgacttaccttttacgcatcacaatcttttagatgcactggaaaggaatcacaaggaccttcatcataaatactgcgaacgggaagtggataggccgaagtcagatagtttgaaggttatagtaagaagcaagtattttaagcagaaacaggaggacaaaagtctgaaacaatcgatcccatgtcttaatgattgctctgtgattggtcagagaaaggctgttaaaacttggattaacatgtcaagcgcgtctaaaagagaagagagtcacagagctatagcaacaagtccatgtttacaccatgaccgaatctacaacgatcatgaagatgctaaagaagcgagtttctctgccatgaacgaggtggctgagagaacaataaacacccacaagattaaccatcagatcaatgaagaagaacagaacccatccgttgaaattccttctgcctttagtactcccgagaatgttatacctctctctt

SEQ ID NO: 29303 - DNA, 2776 bp, Arabidopsis thaliana landsberg
  unsure (1)..(2776): unsure at all n locations
ttgaaactccaaaaggctaaggagaaagtagcccccaaggcttaagcttttatgttttattcttctctgttttggaattatggctatgttcaagtgataggacttggtgcagtcatgtgaggacatctatgttactcgaccaatttttaagctttgtattctgttatcagttcttaactttgtcgacaattctcttctcttcagttttggaattgttgaattcatctttaatgttctattgttgatgcatatcacataagctgttgtgattaccttcttggttaatataatatttctgaatctctcggaggctaaatcaagcttgcactttaatgttctcagcgtcatgacacaactatggaatagcaattttgagtcttaaatcttaactatgcttcaatttctgggaattctacaacgacagtctcgtatgcgattaatgaagtcagctccagaaataatatacttactggtctttattttgaatatagtaaaactcgattcagtttttctcttgttcatcttgacttacctcatgccttcttcattaaagcaaagttgcttgtgaaaaataaaaactcaaggaagcataattaataaacgatttaatttagtgaaagagaaagcctacaaagaggaaataccctagcttgaaaaaagcaagccaagaaggcagagatgggaaaatctatccacatatatcaggttgtactggagaaacaagctggcaaatcgctattgatggacgataaagaagaataataactctccagcaatgtcatgttctgtttcaggtcttgatgatgacgatggttctcattaattgttgaagtgaaatcatcaaaccgaagtgtgtcgcaatgatcaccaagatgatcttcattggaaccacgcatgttcttcattacaccatttccttcgaatcccgtctcttgatactcctgtggtaggcttacaagcgggggacattgctcttgggccaacactgcgctgaggtcgatatggctcgtgaattctcccaagaaggtcgaatctgaagacgtgtttagcagaaacgatgggatttcatttgacgaggggagcctgggaaactgaggttgtgtttcttgtgtggcaagaaagagatttgtgaggtattgttggtctaaacatgaaaccggattgaaaacgtttggtgggtttgtcgtatgaagtgaaatccaagtaagagaagggacttatagtgggaacggatggagttgtactattactagttttgggagtgttcatattctcatggtgaaactggaagtgagagctaggtttgaggatcttgtctgaagaaaaatggtatgtgtttgattgcttttggttagacattgtgtcggtgcttgtttctggtggtaacgaggaaacaaaagagtgagagagagctcttagggtcgttgtgttggtctttttgaagattctgcatatagcccatgaatcctgcagtggtccatatcattcaaaatgttaataacaaatgagtttaatttatagaaaatagaagtccactaatttcaaaataatatttgcactttgtttatttaattattttatattttatttttgagaaattgtttgaataaacatacttattaaaagaaagattagtagtacaaaaagaaaaaaacacacacacacacaataatttaagatttaaacttaatatcaaagaaacataaaaggagtacctaaaatacatatattaaaatctctcgcatttaatatttgtcaaatatgtcttctaccaaaaacttaagactttattttgctttctcagacctaaagatagatatacaaaacaattaaatcaataaatttctcatttaactcgttcaaactcactactttacaacacaaaaatgcaccatgttcgagatatgtatttactcttcaaaaacttctaaccaaatcttgcgatcttaataactaataatagctcaacttgtcgtccgatccggataacttccaatcctattttctttgttaataaacaatacctaagaaaaaattactgagagaatatgagcttacgttgggagagacaggagagtcgaagaatctcttagaaggaggagatggttcggagagagaaggcaaacgaaactcatgcatcatccaatcagtcttaactcctttcgctgctcttcctttgtagaacactaaggacttctttaaacctatgcatttgtttccttctgacgagtatatcggccggtccgttcccgtggctttccaaaaaccagctccggtcactcggtttggcctcgagctgttcctatacttcctgtcccttggacaataaaagtaccattctttttcacccgtcatcgcaaactctacgatattttaacaacaacaaaaaaacaaaaaaacttgtttagactttattttcttatattaaaccttataatatgatatacaaaagtatgaaagtcatatatacttggaagatcccaggggtcatatttgtagatatcgagttgtcttatgagctcaatggagagagggttgtgttgaaccttccgcttcaggtagaagcttacgagctcttcgtcggttggatgaaacctaaatccgggcaacaatacatcctccattttctgatcaccgtcgttgtttctatctcccatttctctaaaaccctaaaaacaaaaaagagttgtgaagataggaaccataaaagganctagctggagtgcgtttggtagagaagagaaagtgcggtgagtgnagtggtttagcctgtgtt

SEQ ID NO: 29304 - DNA, 1534 bp, Arabidopsis thaliana landsberg
caagattttaccattctttctggatgacataaacatgtgtttacatatattatgctggtgctagtttttttttaccccggaacaattatttggttgagggagcttgataccacactattggggcagcttcatctgatgcctttggtctctcgattctatcacaagcgacatttgggtacaatactgaaccagtactaatcaggaccgtcttatccattagtcactatttcagtttccaaatacaagagcataataaccggaaggtggtcatggtgatcataacagacagattctggttctgctcttcaaagagattcaatatttccataagagagtcaactagaggagatgaaacagtgaagagttgagagattgatcattacaaaagaaaaaacttaaaatccaaaagtgctacgaataacagatcaagaagagatagagatagattccatagaagttccacaagtgtttggtttctcttctgattcacagcaacacagagacacttctatgggaagtagactggccagttgtaatagtacgagtccctgacttctttgggtatcttattccactgaggaacaaagagtagaatcaaataaacgtgtgagaaatgttgtcattagttatgttgtgaaagacagattcagttcttaggcaaaggtaagaaccttgaattcataaggttgcttctttgcccttgcttttttccagtggtactgctcaaacagcatccacttgtcatggtaactgccacattagagagtatgagagacaaccatacaaaaaccatactttggataagccacagaacttatccgggagaaacatgattatttgatctacaagaccttaaacacagttgatcacactatgtatcataggactaaacactccatcaactattagatgatattgaaacctgaggttttagcaatgcctatgataacaacttcattcaattcgcctaaagacatcaaagtatcttctgacattactaaatcttcaaacattgcgctataaccaatctaatgtagcagaaaaagaagaactttaacagtcaaaccaaaagaatcaaaacataattctcaccggagcaattcagagaagaacaaaaacacatgaacaagaaacccaattcggaaatcaaacacgaaaaaccgaaagtacccaaattcgaattcgaaagttcaagagagagagagagcgagaaatacttgaactggttagagagctgccacatgttacgattatccctaggtaagaacggggaaagctgctgaaccaatccatatattcacgaaacgatctgcatctgcatgtggcactcctggatctcccctgtacgcatttccaaagtacttatgcatgttcactctctctatcgtcactctctgagctaatattcttatccggcgaatgatcttggataaataaacttccaccctttctacctaatttctgaccggttacagagaatatcatatcccgtcatgtatctgtaaatcaaaaacaacttgacgatccatttaga

SEQ ID NO: 29305 - DNA, 1478 bp, Arabidopsis thaliana landsberg
tatgctgcttgggagaagcttcagaattagattgaagcaacaaaggatttggttagtagggtaagtgctggagcaaattctggtcgagcttcttcagcagaaaaggtattaactagtacttatgaagcagagaatatgtatgaaacttacttgaatttgtgtttatataaacagaaactggagaagcttcaggaagaggagctaatagagaagccatttcagcggaaacaaatgaaaatccggtttccggaatgtggattaagtggaagatctgtagtcactgttaagaatcttgtatttggttttgatgataaggtgagatgatatagttagtcaaatgctgttggtagtacattttattgcttgtgttttgatctgtatttctgatgcaagcagatgttatttaacaaggcgaatctagctatagaaagaggagagaaagtcgctataattggtccaaacgggtgcggaaagagtacattgctgaaacttattatgggtttggagaagcctatgagaggtgaggtgatacttggggagcacaatgtattgccaaactacttcgagcagaatcaggtttgttctatcatgaagaaatggctttttagaggaatcagaaaatacagttttactcatttgtttggctgtaggcagaggctcaagatttggataaaacggtgattgagacagttgttgaagctgctgtagattggagaattgatgatataaaagctcttcttggtcggttcaacttcaaagctgacatgttggatagaaaggtctctcttttgagtggtggtgagaaggtaacataatgtctatcattatcctcaatataatactcatcatgttcttcatcgccttttttcttgcggtcttaggcacgccttgctttctgcaaattcatggtgaaaccatccactctacttgtgttggacgaacccaccaatcacttagacataccttcaaaagaaatgcttgaggtctctaaccatactcttatctgttcaataggccaaactgttcttggaggttgagtatgatctgattctctgtttccttctttcatcaggaagctataaatgagtacaaaggcacggtcatcacagtctcacacgatagatacttcattaaacagattgttaacagagttattgaagtcagagatggtggtttaatggactatgcaggagactacaatgtaatgaaatctctctcaacctagtttcctcttgtaaatagacctttgccaaatttgttcattctaggttgtgttttgaactgttttgaactgtttctcagtatttcctggagaagaatgttgaagctagagcaagggagctggagagggaagcagaattggaagaaaaagctccaaaagtgaaagcaaagtcaaagatgtcaaaggctgagagagaagcacggaagaagcaaaagatgaaagcgtttcaagcttccaaaaagaagtcaaagtccag

SEQ ID NO: 29306 - DNA, 6115 bp, Arabidopsis thaliana landsberg
  unsure (1)..(6115): unsure at all n locations
ccattagactggattaaaattagtgacctgtgctgcgagaaagaataattgttggttcttatattcttctactaatataaatttacttagtattgtaaatttttaacagatgaaatttctgcaataaatatcattttacttgatgttgctgtgaatttactgtgtctctctctcaagctaattgttttattgatgggtcctttctgtttgtgatgtgctcaaccggaaacattttaattgtaggacactagcatggataaatcagatgatcaaatcacagtcatcgaatccccgcaccaatctgatctgatgatagaactcattaagaaactaaagccacaggtggtggttnnnnnnnnnnnnnnnnnnnnnnnnnntaccagttcatcgtttttgcacctgttggaagtgacaaaagaaattggatgtcgacttttcttggatatatctgatcactttgagttgtctagcctccctgcatccaatggggtactaaaatatctcgctgaaaatcaactaccttctcatgcagcaattatctgcggtctggtaaagaataaggtaaagatttcgatcaaccacattggtgacgagtatgcattatgttgtatctcatttaattgagaactaactaactctgagatcaattcatgctcttaaagttgtgtcatgtgcgttctacaggtctattcagatttagaagtagcctttgtcattacagaagtggatgccattgctaaagccctatccaaaactgtggaagtcttagaaggtcatactgctattatcagtcaatactactatggttgccttttccatgagcttttggctttccagcttgctgatcgccatgccccggctgaggtatgtagtttaatctgtcctaacatacgtacgtgttagattttttttcagggttaagttaaaaaataacattcgtgttagatttgcatattagtattccttaaaaaaagtaggccggctgaaaaaagacatgtggtattcttggaaaagacatttagtgatttgttttcatgataccctaaacctcataatcccggaccaataggagtaacataaaaaaatctagattaagctcgcttgtagaacaaagttaaaccaatgtgtatatcgtaaggctggaaactctactcagttctctattatgtggcttgtagagggaaagtgagaaggcaaagtctgaagagatcattggattttcaagctcagccgtctctattctaaaagatgctgagctttcagtcactgagattgacgaaacttctctaatccacatggatgttgatcaaagtttcttgcaaattccacaatctgttaaggctgcaatctttgaaagttttgtgaggcagaacatatctgaagcggaagttgatatcaacccaagtattaagcagtttgtgtggagtaattatgggtttccaaccaaaagcagcacaggctttgtatatgctgatggctcactagcactattcaataaactggtaatttgttgtgctcaagaaggtggaacgctttgtttacctgctggcacaaatggaaattatgttgctgctgccaaatttttaaaagctaatgtcgtgaatatcactaccgagtctagtgatggctttaagctgacagaaaggactctgacgaaggcactctagtctgtgaagaagccgannnnnnnnnnnnnnnnnnnnnnngttagccctacaggcttggtgtacagcaatgaggagatggatatactgttgtctacttgtgctaagtttggagcaaaggtcatcatcgatacttcattctcgggattagaatacagtgcaactagctgggatttgaagaacgctttgtcgaaattggattcttccttttcagtttcgctgcttggatgtctctctttgaatttgctcagtggagctattaaactcgggtttctagttttggatcagtctctcatcgatgccttccataccctcccaggcctgagcaaaccgcacagcactgtgaaatatgccgctaagaaaatgttggctttgaaggaagagaaagcaagtgactttctggatgccgtttctgaaaccattaaaaccttggaaggcagatctaaacgcttaaaagaggtactcatttctgcctatactcccttttgcattatcatcagagctcagattgtcttagattgtttgcaaataacaaatgaatatttcaaatggttaaagctgtgggaaaggctttagtggtaccgctcaggtctttttgaatctcatgttgttaacaatattgcagcagaggagtaaatggagtaaatgttgatcgcataatcgcatgatgttaggttgttgatcttcctttttaaattatttgaacaggtactacagaactctggttgggaggttatccaaccctcagctggaatctcaatggtggcaaagccgaaagcttatctcaacaaaaaagtaaagctgaaagcaggagatggtcaggaaatcgtcgagcttacggattcaaatatgagggatgtgttcctcagccataccggtgtttgcttaaacagcggttcctggactggaatccctggttactgccggttttcatttgcattggaagatagtgagtttgacaaggctattgaatcgatagctcagtttaaaagcgtccttgctaactgaaacgtgccagtttcatttacgatgtcatcaacttgaactaaagggcattgtgcattgctggttctgagacttaaaacatagatcttcgtgtgcgttgctttgttctgttgtttgtaaataaataagtttccgtttcttggtgcgccccataacgggtttactttttggaagtatgatattttcatgctaataaaggagtcataaaactttgattttgtttgtcttatattttaatgtgaataagtctctttgtttctatgatgtttttttcttttatgttcgatcttgggctctctatgatgttccagaaaaaaagaatgtgttccagaaaagatatcaaataagtatctcaaaatgaatccaaagctaaatggtttttgtcacctctaccaattcatacattctagatctggtattatgtatgtttcgtgaacccaaagtttctgactttctgtttatgaacctgtgtaacaatcatgatgtgagaattggtacacaaagaagattcatctgttaaattacaccagtggtattctcacaatttacaaaagctacatatcgttctattttttacagcatggttaataaaacgtgtaccaaccaaaacctgtttttttcttcatgaaaccaagacagcaaaatttagagtgtgacagtgaaataactataaaagccgattcaggtcgatgaccagtctcaacaggcgatgtttactccccctccttcacatgacataacctagcccggccaggattaagcagagattctgacattctccaaccctatcaaaatggaattttcagatgcacactcaattaaataacttaaaaaggatataacaggtttctcccaagttacctgttctgcagccctgcttttgaagacgccatatgatgtggaaaccatttcacacgacttcgcaatacgagactcgagctcatattctgtaggagcaaacgcaggatctaaatgctccaccgatcttgggttaccatcttttgattgattcatgaaatgaagaagcacatgtgcctgtgatatatgatcatgtaaccgaatgagaaaatttaggccaaaattacttcgtctcaacagaatagtgattaaacagatacaaaatcatcctacatgaaatgctgctttgagaatgtcatctgagttagcctgatgtttgagcagcgcatagactttacccttggtagggctgtacgttaccatgtatctttctttctgccattagtaaagagaataaagtcaattacagtatcaagataaagcggtcaaggcttgatattaagggaaaaaacacatacatcgaaaaaaggctttacagccatatacgtgctggggtcttggaatgcatccttaaatctggctcctgtcaaattgtaggaaaaaacaaatcagtaagggtaatgaaaaaggaacataatttatatggaatgttagataacacataccaagcatcactggccgatcatccacccatggaaaagtgaatatcttttcttggatattaccttcctgcaatgagggaacccgtcctgcagatagatggaaagttcaatctgtgaagtttgaatatgacaaacctcaaaaggggtgagaaatcagagctctaggagcacactcaagtgcatgctagcaaagtgacatagcttacccgtcttaagaaaggactccactgctactgtaaatctagcacggtttagtgtatgcaatactacagatctaacctgtaaaggacacagccacgttttttgagcaataaatcaagagaaccccaagtacataaaaagagatatacttgaaacagagctggattctacctcttggtacgagctcatgagatagccacatgatagaagaccaaatgttgtgaccaacgaaggatttctttttgatatcaggatgctaaacccagttcccatcttcacatagaaaataataaaaacaaatgaaaattttagagctcaaaaagagatcaaacagaatctatttcgacccttaagcaacaagtagcaaactagcaatgtagccacctttagttcaaatttaattccgcttgacagattaaaccaacaaaacacccaagaaacaatgaaaactaatgttgaaaaagggtcataccagatctgcaatattaccaacacactctcctttagcagttacgtctcctatgttttctcctttagcaaaggctttatagatcggtgtacgagtagacgttgatgttactgctgcaacattctgtgataaaacaaatgattgagacaaaaacaaaaatcaaagaccaacaataacattgaaatcgaatagcaattatgagtgataaaagatgataaaactaccttaacaacattagcagcacaagccagtggaagaaaaagatgtggaactgcagccgtcgccaactctacaccagcaccgagctccatcaatagatcaccagcaaaccgtaactgcaagccaaagtgagtttaaacgtgagagagagagtcaaccatcgcatttgttaagtaatggaataagtacctgtttcaaatcataatcaaatttctttccctgcctcgcaaaaagcattttcccaacacgcccagcaccatcctacaagaattacattgatattcaacaatgagtgagtaagccatgttttaaaggattgttatacatgcatgatgcatgaaaggatatacgagaaaggaaaaccttgagaatccaattgatggcaacagcagcagaagcagaactgtttcttgaagctccaacagaattaagaagagtttgagtagtaaacacacccatagctccaccaaagaaatgctacacagtcaaaaagatcaatcatttacactgaattctaaaaaaaaacttttagaaagtaacgaaacatactttcaaagctctccaagtcatataaggaacataagactcattaacactcccaggaaagccttcaggtacaacgtaagatctaagaaacgaacccacttcctgtaacaaatcaccaaaaacaaaaattgaacacatttcacatatttaggaaaattcaaaaaaagagttcatcaatggaacaaggcatacatcaaaaggagtctgaggagactccaagctaatagcacgaactgaattcttcttgaatctcccagaaccatcgctctcagcgacatacttaaaccgacggccatcgatttcttcgcaacagatcaatctcagagtcgaatgaagaaattgagaatctggaggtggaggagagtgaggagggagatcatcaacgggaggagaagcgagagaggcgctgattcggagagtttcacgggaaaggagacggacggagtcggaggcaatagtgtcaggtggagaatggtgtgtgagcttgacgcttggcattgttgttgttgtaaatctaatgaaggatcgatgaagaagggatttaatggagt

SEQ ID NO: 29307 - DNA, 2317 bp, Arabidopsis thaliana landsberg
  unsure (1)..(2317): unsure at all n locations
tcctttattgcttcttcgttaagtttcgacgttgtaagcaagatccgttcgtgaatccgagttctcctagagatcttgtgttctcgtctgttatttagcttccgctctctatcacttggtatcagattcatctcgttcctagtggtttgatttcctgtcaagcaagatgtctttgaaagacatgagatgggattctagttttaagttggatattcctaagttccatggtgaaattcgtgtcgattctttccttgattggctcgtggatgttgaagaaattttggagttaataagagttcctgatgatctattatagtttcgcttgtgacgaataaatttcgaggacacgcatcatcatggtggcatcaagtgaagaaatcacgcaagcaagctgacaagagtccaattaaatcatggactaaacttaagcagaaattgtgtgcaacctttttacctcgtaattacgatcatacaatgtataattgtttacgaaattcgagactaaaacggcgcttggtggatgattacacggagaattgtggtggctttcaagtcaaagacttcgtcaataaacctatctctgatgttgttggcgatgatgtatcgtctacaaaacgcacctatgatggggatccaaaaattggcgtcaaagatgatggatttaatgatgtcaaaaatgatggatttgatgatgttgtttccaacgcggagaacatcgatgattatttcaacacacaagacgttgacgataacgacaaagccgtggcaaataaaatcgacgatgtaaatgtttttgtagctgttgttgaagattgtgattcacatgatgatccaagtcaagacgaaggcgctagctttgatgttacaaaagtcagtgatctagttgataatgttaatcccatagatgtcttctctaatgtcttttctccggttgatgatggttgtgaagaagacgtctacaacgcggattttatcggaaatcaagtggtggaatacagaagactttcgtcaattcaatatgaagtagtcatcactaatcatgacaaggaggtagaagttttatatctggataatggaaaccacatttattcattttttcttgcaaacggtcattacaatatcaatgatgaacctccagatcgtggtcgaagcgagattttgttttttcacagtgagttcgatctctgtaacaagatctatggtactttaatttctaatagctataaagaggaaaatccttgctatgttgattcttacagagagataactgaagttgagtgtgcaaaacctctcatattttctcgtcattgtgggttaactagtcaagattcacatgtgagctacaaaactaataaaacagatgagggagtatacgtgtgcagctcacagatggagtttatgaattgggcttttggaagagaagatccaattacaatttcattgtgttgtaaaagtgacgtttctgatgtttacggtgaagacgtaaatgtcatatatcacactgatattttttctagcatgggagctttgcttacaatggtggctttatgtgttgaaaatattctaatggtgaggctattaacacatgagattaacgatgtgtcgtctgcggtcaccaatgctatgagttttcttctcaatgtgtatggagccataattacagcaacttttgaaagaagaggaatatttctgttgttgtttgatgtgcgccacgagccaaaaagtggccggagcaacgtatttgatactaagcgttgccatgatttagtacaagagacatcatcctcgatcaatcaccaatgtcaagaagagatggaatggtgcagtcaagtggcagcgttgatcgcatcacttcggagcagaatgagcgagtattggtgggatagttcctcacaagaagacttgttgatactaagccgtcagcggccactaggtgatctctctattcctgaatatatatatgtgcagagagagggaattacaagatcaaatccaaagtcataggtggttttctcatgcatgttttgaggtcttctatggggttctcaatnnnnnnnnnnnnnnnnnnnnnnnnnnnnnntagtttgttatattgcggtaacaacaactctggggaactatatgaggagcacactgatggtgaaaaatatcaccttttggttgttgtgggttcttttggcggtgtagttatgattggtggcttgtcaaaagtccatattttgcatcaccaccaggttctcgtcaacatggagtcatcaatggttcatgtgatttttgtgctgcttcatcatgttgtttggatggtgtagtatcccga

SEQ ID NO: 29308 - DNA, 1808 bp, Arabidopsis thaliana landsberg
actttataaatattggatttttagtgacatcaagggtttacagaggattttttagtttaaaatacaaaatctaaatctcctagtttcaactgggtaagtgaaatttgaggagattttacaacaaatcataataacttcccaaaattcacctaaaatcatctaaaacttaaaatcatttaataggattgaataaggttcattttaatacttggcagttggcacataatataaaaagatggttagttaagttattgtcttaagttatatgattgtgcattgctgttgaaagatttgctgatctacgttgttgtcatcgattcgtcaagattatacgaaccagctacatcctacatgtctggtttttataatcacattgaataaaatgaataaatctattttattgaaaacgtcacgtttaaattcatataaatttgattgattatataatgtagtccaattaattaatctctcctctatacagctgtttctatagattattaattaatggacttcctcgtttcacatggtagacatttcagatttagctttgtgtttacccagatctggattcaggtatctcggtttaggaattgtaaagtttcgtgtagttttatggggttgtgttatcggttaaatttggtttagtctagttggaactcggtttgcttgtcccgtttgttttaattatccggttatatttggtctaacgaggccaattaatgcccacgattatacaaacttttcaatttaaagttgacttttactttcattttaagacaatggatactcattttgatcgatgtagatagacatagagaacaagagaaaaagagagaaagatggagttcgcaaacacgaaatgggtggctgcagcggcgagcatatggatacaaagctttagcggagcaagctacacttttggaatttattcttctgttcttaaatcatctcaatcttatgaccaatctactcttgacaccgtctctgtctacaaagacatcggagcaaacgtaggcatcctctccggcctcttctataccgcggttgcaagccgaaaaagcggtagtggtggcttctttagtgggccatggttggttatatttgtggggctactccaatggttcgtcggatatggattcatatggatggcgacgtcaggagtgatcccacggcctcccgtggctatgatgtgtttgttcatgttcttcgctggtcattgtcagcctttctttaataccgcgattgtggtcaccgccgttcgtaacttctccgactatggtgggaccgccgttggcattatgaaggtaggttatcttgagacgtgagaaataagatattaattcttgtattaaaaaaaaaacagtcgatatattaaaatgatgatacatacgaccggtcttttttcctatatatagttacataaactagtgaaaatcagtagtttggatgttgtcttgtagaccactaaataagatacatcggtagataacaatcatagataattcttaatacgtacataattctcattacaaacatatatatacttgataagttttgtagcccttatgtgttgtatttcttattttttattttagggttatcttggactaagtggagcaattctggttcaaatgtaccacatcttctgtggaggtgacccaaggaattacattcttctcttggccgtggtaccatcacttctcatcttgacgttcccgcccttcgttagaacgtacgacacagtcatcgcaggcgacaagaaacacttgaacggtctctctgccagtttctttctcataatcacctat

SEQ ID NO: 29309 - DNA, 522 bp, Arabidopsis thaliana landsberg
gctggcatcttcgacaaatttttattttcatcttgtgagaaccttgacttacgtgtagagatctgaatcacacgaaccagtacattgtggggcttgctctctgtgctttaggaaatatttgttcagcagaaatggctcgtgatctcgcccctgaagttgaacgattacttcagtttcgtgatccaaatatacgcaagaaagtgagtgttttcttgtactgtcattgtacccgttcagataacaggtgtctttgttgtgagggtcagtggtggaaatgttggaaaaccttagatgctaggttgccgtgcatgtattaaccacgtgaaggcttgaatttacgagctatgtatcattttcacgaatttacactttacttctgtcatttttttgtatgcatagactaatacattaaagtgaactagttttttttttctttatttaggcagctctttgcgcgataaggatcatcagaaaagttccggatctttctgagaactttattaatcctggtgctgctttact

SEQ ID NO: 29310 - DNA, 5957 bp, Arabidopsis thaliana landsberg
tcattagcctcctttcaagaaagtgattacttgggtccaatgctttctggtttagtatgcagatacattttttctttcatgtaaactgattcttttaaaaagaccatcctaaaggtacaaaagaaggaagaatatcagttaatacctcaacagtttgactctgctggagatgattcagatgaagattcttggtgttggactgtttggtcttgatatggactgtcttctgctgattgatgcaagtcggattctgaatgattcatatatcttaaggaagaagaataattctgccctgtacaaattaagcaaccaaactcaggttatttttccaagaactgcatatattcattcaacaggtaaaatctggagttagtttctgaaatggaaacaaattcagtcaactagtaaggagatgcaaaaaatggtaatcctaactttagatttcaaaacgtgagagtcatacattctcacaagttaaacttctccaacaaatgtacttcagcttcttttcttaagtacaaaagatttaaattacataatccctgcataaatcacataatacatgtgataatataacacttagagaaaaagaccaatttggttgtctactaagcacaagaatttggagatttgacagtggtttttctcagcacatggagtctaagtaaaagataaaaaggtaagagaagacattcctacacctgcgaacatctaattacaaggacaaatctcattataattaaccaaaataagtgcattaacattttcatgtatatattcaccagcattgatggaaattgtaatgaacaaaagaaaatacaaactccaaaactaaatctgcacaatgactaaaagctgaacgggtcagtccacatttgcatcacaatctcttcactgctcttagcttagttaggctttgcagctttgtagatgaagattgtaatgaacgaacgccaactcttccagatgctttcgttcacagtggctcattccttcagttagcaacaacttctctgctaagcttctcttcagcttgtaccttgaagcaccttcacatgtctggctcagaatcttaatggcgaaactctgcagctctgggtgctggctcgccttttcagtccaccaatcaactgcaaataaattttaagacaacataatgttttgctcactgattcaacaacacaagtatctctacaaacaaaacaactatatcgaaagtcaacaagttcactcacttggagatattcccgagatctgatcaggttgactggcctcgttaaaacaatctttaccgagtctgtacctatcaagctgtgaggcaattttaatttgaccttcttttgccacatgaaccagagagtgggtgagaccgctggaaacttctggatcaagatggaaatcagttgagtagaaagaagttggattcagatagtaaccagcagcatgaagaggattgtggaggtgcttgttccagacatcatctatcacatcccataatgtaaggtaatgttttttctcgtcattgaattccttcttgatactcagctttatgccgtccaaagtgtcatagatatatccgacatgctgattgttgtcggcatttgaaaacaagcgcagaccgtcagtcagaggagatgtacatttcagaatttcttcaacagcctcccaaaacgaggaatcatttaccaaatttgatactgatttgccttcttcttttttccaaacagatgaagcaaacatggctgccaagtttttcttcgccttgaaaacactctttagaattagatacggcttaacaaactcaaactcggaggaggagactgttatgtcttttccatgactttgatctctgtaaattttcaaagctgagggattgttgttgatgaactcccaaatggtattgaccttatcaagtatgtctccaaaggaacgcattttcccaatcttcaccagcataagctcgaaacaatgggataaactcacagaccagaaaacttccctgtcatgacccgaaaagagtttgcctaactcaccaacccaaccagaggtcgaacatgcaataatttgagtcacgttatgcacaccaacttcctcaacgagcccatttactagcgatagtaaggcagtgacatcgttttttacaaccgaaacatctatggatttaagatacactggacccgctggacagtcagcaacaaaggaaacaagatcgtggcctttcgggtcaatccaagcatccaacaagatgctgcaaccggtgatcttccaggaatctttaatattcttcacataatcctgcacttccttcattgcttcttgaagcaaccggccgtttaaatcatgagaatcagggatcttctgaccaacacctagtgccatcatcatttctttgaaacatggggaatccacagctgaaaggtcgacgcaatgttcataaaagaaccgaccaatgcacttttgggctttgcttgacaacaaatcctgattgtcaacttccacagctacattcccctgctccggagaaacacttttgcttgatgaatcttcggtcttccgacgcttacgcgaatcagccatttggaatttcccaactctcttagtcttaggagtagtataaccagatttatcctccataagcatcgttcgaaacgtctctctaagagtaagtgaaacttggtcacagtgagtaacatcagtaccaacagcacccaagtggtgtttaagacgatgaaaggaattcatttctttcccacagtaattgcatttaacccgcgatttcttcttgtccacacaaattccatgctcactaacatcaacgacagtaccagccattttaagagtttcgtttaattcacaaaacacagataatgaatcagacttggaagcatttttcgattctcacaactcagattacctgtaactgcaacccaatatcactattagagaaacaaacaggaatatgcatcaaaatcaaaatattgaatggcgtatatttcgaaacagaattgaccaacttgatatctcagagtaattgaaatcattccaagttcatggagagaagaaaaaaacgaaactttaaacccaacaattgacccaaactcgaccatataaattaaccaaaattaatcatcatctttaagagaaatcgcctccataaagaacaaagcaaacaacttttttacagaagaacaaaactcaaactaaaaacaaaacctattattctttgctgctaaccccttgtttctcctgaataaaggaaatacctgaataaacaaagtcggtcggaaaacaggacacagctaaccccttgtttctccttcttccacccaaaagagagggaatgtggaagaacttgttttgactccctctttctcattattctaatatttgggctattgggccatcatctcgttttggcccaaaataaaagatgaccaataaaacaaaaataggctgctaatggagagttctggcccaaaataaaagatcacaaaataacaaggaataaataatgatgtgcatagctgctctgtttcaccaagcattgattctaaaggtgtgagctttgatgaatatacaaactaaaatgggtcagtccttataaacatcaatctcttcacttaatttggctttgtagctttgtagatgaagattgtattgaacgaataccaactcatccagatgctctctctcacgattgctcattccttcactgagcaacaacttctctgctaagcttctcttcagcttgtactttgaagcaccttcacatgtctggctcagaattttaatggccaagctctgcagttctgggtactggctcgccttatgagcccaccattcagctgcaaatagatttaaaaccacagaaccttttgatcactggttcaacttcaaccacacaagtgtctgcaaacgaaacagctatatcgaaattcaagaagttcactcacctggagagattccagtgatctgatcagcttgactcgcctcgttaaagcaatctttaccgagtctgtacatatcaatctgtgtggaaattttgaattgaacgtgacaatcttctaccatatgaatcagagaggagataagaccagtgacaacttctatatcaagatggaaatttgttgagtagaaagcagtcgggttcagaaagtaaccagcagcatgaagaggattgtgaagatgcttgttccaaacatcatctatcacatcccataacggcttgtaaaattgtggcttgtgattgaattctctcgcgatactctcctttatgctgtccatagtgtcataaacatatccaagatgctgattgttggcagttgaaaacaagagcagaccgtgaatcagaggagatgtacatttcagaacactttcaactgtttcccaaaaagaggagtcactcaccaaatttgatattgctatgcactgttcgttattccaattagatgaggcaaacatggctgtcaagtttttcttcgccttgaaaatactctctagaattagatatggcgtcacaaactcaaactcagaggaggagactgttatgtctattccatgacactgatctctgaaaatgttcagaactgagggattgttgttgatgaacaaccagatgttattgactttgtcaaatatgtctccaaatgaacgtattttgctaatcttcaccagcataagctcgaaacaatgggatacactcacagaccagaaaacttccctgtcatgacccgcaaatagctcacccaattcaccaacccaaccagaggttgaacatgcaataatttgagtcacattacgcactccaacttcctcaacaagcccatttactagcgatagtaaggcagtgacatcgtctttaaaatctgaaacatcaaatgatatcagatacactaaacccgctggacaatctgcaacaaaagtaacaagatcacggcctttctggtcaacccaagcatccaacaagatgctgcatcctgtgatcgcccacgattctttaatcttctccacacgatcttgtacttcctctaatgcatcttgaagcctccatccgtttaaatcatgacaatcagagctctcaagccccatctgaccaccatctacagtcatcatttctttgaaacatggggcatccacagctgaaagattgacacattttccaaagacccacttcttttgggctttgtttgacaacatatcctgtttatcagtctccacacctatactaacattgttgctggatgaatcttcgcttcttccacgcttatgaccattacccatttggacatccccaactctgttagcagtatgacaagatctttcttccatcaccatcttaggaaacgtctctctaacagtaagtggaacttgaatcacagggaattatgtacaacatgattactacttgagttataatacaccgcatgattgatgagtgaatgtctagagatagagagagagagtgataggctcaccttcatcttctttagatcattgtttcttgctcctttgttcacgcatacttgcaaattcctgattcaagcatttttcgcttctcaatcagctgttacaaaaatcaggaacaagcatcaaaatcgaattttgaatggcctttaatgtgacagagaattcactaacttgatctcagagattgaaatcattaatgccgatggagaaagagaggaaaaaacgaaactttaatctctactatgacgaaaaaccagctatatagtaatgctcaaacaactagcaaacgaaatggtagacccatataaattattatcgaaactattcatcatcattcagagaaattttctccattgtaacacagaagatcaaagcaaacaacttttttacagaaaaccccaccaagcgagtccaagccagtcaaagcgacgacgaaacccttgattttgactttccaagagagagagagagtgatgactgatgagagtgaa

SEQ ID NO: 29311 - DNA, 1783 bp, Arabidopsis thaliana landsberg
tctatgtatagcttccaagaacttgtggattgtcttcgcatcaatacacaggagtcatacgcctgtctcccaatcagacctcccctgttgaatcagagcttcgtcagcaaagtgcacgtacttgtggaagtgtttcaaatatgttgtcctctgagctagaagtggtcgactggaatgaaatattttttttcagaatcgactccctggtattctctctcttccatgatatctaacatcatttttttgacctacaactaagttgtatcccctgaatactgctggattattttatttttccaaatggctatgttcttcttctctgtggattttcatgtccatcgccattttaattgtatttctactattaatctcatagattgattaatcacacagcttcatatatccaagcaaatcagaaacaggtttaaatgctgcagtgcttatagcttggaaaatcttagttagtacatgtaccttcgtacaattttagaataaaatgtattatgaataatattttctggttattctttgttgtcttcaagatcaaggttgctgcagtggctcttttgatattttattgttctttcattttcccaggatgactttgtcttggaattaatagtgacagacgtcggaaaaggtttgtgtccttagttcttatagcttatatattacgtggtaatgtatccgagttaaagggtttctttcatttgtggtatattaatcgatgttgttttcacgatttaggtgcccctgttgggagtttttcagctcctctaaaacagatagcacaatatatgaaggacaacgtataccagcacaattatgctaatgaccttgtctggttagacttatctacaactgaaaccatggtaaaaatcgtgaacttaacatgccccccttcctgtcaggatgtagccattgttgtgtagaaaatgatatcaataatgtattatcaatacatgcatgttaagggattttcgactttctgggttcacagattgcgataaaatgaaatgattggcttcctgttttcctgcagagcatgaaccaaggggatcaaagaaagaactgcggaaaaataagatgtgctgtactgttgccagctaagtcgaaagtggaccaaagcaaatccttcagagaaaaaaaatctggatttcttcaagtaagtcctagcattgagggtccttggacgacagttaggctgaattatgctgctcctgctgcttgctggaggttgggaaatgatgtggttgcaagtgaagttagtatgcaggatggaaacagatacgtaaatgtcaggtctctagtttcggtggagaacaatactgactttctacttgacctctgcctgcagtctaaagtaaattcaattccagatattccaattgggttactgaaacctggtgatacgttaccggttcccttatcaggattgacacagtcggcatcttatgttctgaaactgaagtgtgtatttcctgatgggtcggatgagtattcttggagttctgtggtttcgaggcctgggggagcagaggtttcttgtgaatcagagcctgaaatatgtatatcggctctaactgaatccgagcacttgctattttgtactcagataaacagtacttcttccggagataatcaaaagttgtggttctgtttgaagacccaagcaacagaaattgcaaaggatatacgttcggaccctattcaagactggacccttgtggtcaaatcaccgttttctatagcggggtgtcttccatttgtaatccatcttctt

SEQ ID NO: 29312 - DNA, 1802 bp, Arabidopsis thaliana landsberg
ctcaattcttcttcttcttcttctacttcgcccccacgacaagaaattctccttttatttctatctcatgctttctctctctctctctataaaatcttcaacttctgggtttattctttcacaatccctcgagttataataactctctgcaaagagttttactttgattcttctgtggaggatcttacacaattttcatggcttcttgaatcatgtaatcttttccttctcgccatttttcatctctacccggatccgtaaccagctctcagaccagacccgggttataccattactcctccttaaaagtcacaccgcgttgaccttcttcctctggtctcctctcccattttcttttaaagaacttcacaaagtttcaatcttttactttggttcctctctctctctctgtttattagggttctgggttctgttgatgatgattctctaactaatgaggtagagttataacccaaaaataacaaaagtagagttaagtctttgaaatttggtaccaacaatggcgagccagacgggtcagaaaattcggttggtgaggtgtcccaagtgcttgaagattctacaggaagacgaagatgttcctgtttatcagtgcggtggttgttccgccattcttcaaggtaactttctttccatttcgattttgcctctgattataatgtgaactctgtccctgaatctggctttgttctactcctggttgtccatctgtttggatgtctgagctcaaaccagttgtgttttgtggcatgatctctttcattattaaatttggttgttgcttctttgattcagcgaaaaggcggaacattgctccaagcagtacaccaagtgcaggagagacagagagggctcaagccaatgagccgcaaagcgtacctgaaaccaacaatgtgtccagcagctcggggcaggacacggttctgccgtcatctccaggtcgttccgtggaccaagagtatgagaaaggtaggaatgcatccatggagtctacggagaaggagcttgatgacttagagttatctaatggagatgggacaaatgaaattcaagagcaggaatgttcacttggtgattctgagaagaatgaaagagaagacaactccagattggagtctcatatgatgaacaccgtagcagaagctgcaggatctggatctagctctggaagcttgagcgttgatcatgtggtggctgcaagagcgagtaatccatccggtaactctgagatttcaccggatgcttcccccgtagaagagaagcaaagccaacttgacattcttgcaaacaagactccttctgcttatgatgtggtggctgcaagagcgagtaattcatctggcaatgctgagatctcacctgatgcttcccctgttgaagagaagcaaagccaacttgattatcctgcaaacaagacttcttctgcttatgatgggagtgagtcttcctctgacgaaagggaaggccaacttctcgatgatgacgaacaatggaatgctcttcagaaaataagatcaggcaaatttgagatgcatagataccctgggtataaggagcaaggcgctagttcctcctcccctttctctgagaataggcgcaatgggattaccacatacaacgagcggcatcagaacaggtctctacagctagagggaccaggagggcgccttggcagacaagggaggagacatgtgacagaacaacttcggcctgacatgcctttctatccgagagaatcatacacacgtggaagcccttccatccgtcacatgatgagtttg

SEQ ID NO: 29313 - DNA, 1231 bp, Arabidopsis thaliana landsberg
taatgttctttaaaacgaaatgcttacaagaaaccaaaaaaaaaaattgtttgcaataaatttctatcatgcaaattataatacataaatcatagtaaaatattaggactataaaatttaaatgaaagcatgtaagactttaactttgtatgtgtttacagcccatctcatgacacgtggatgtcacatctatcttctatgagaaacctcaaaccttcctgggccagcagcatccagaaactactccaactagtaaacaagagagagtgtagtgcatgcagttgttagatgaacattgaatgtatgccacgaaatgacatgtacatttacttagagatagtacgaaatatcattaaccatacatttttgaacttagctaatatattgttaattgatatcacgttatacattcgttagccatgctaaacctgcaattgttttatggtccctttgaagggtcgtcggtggttggtctatccagcccaaaatccagcaatccgctatgtaaaaaggtaatctcttatttaagtgaacagtttatattactatgttcgtacgtattaaattctaaagaatgaaagcgtagaaactgtaaaatgcgaataaaaacccgttgcctgttgggatatgcctttgtttgcctaacccatcgggccaaaagtcgtcatgatcattagtaaccaagaagtggtatatcctccggttctacttttccccattattacgtgtctttttataatatgtacttacattcgagatttatttaattattttattcatattaacaatataaataacttaagcttctcttcgaatattcggagcccaactcctctctcttcacgcatttctcgttgtcaaagacaaagttctctccttttataaacacccatctccacctcctctctcttattcaaacttctttgagaaaattcgagttaagtgtttttataatatatacattctctgatatgggtttctctagagcaaaacgtgtcactgatccacttgcagaagaggttagggctcgtctcgttggatgcagctttagcagcggcagcgaacataccggcgacggaattgaagactacgaagacgacgactcgccttgtctctctgatctagtacaagggttcttggaagatgaagttgatacagttgatgatgagtcatgctggtgtgatcaagattctggttccgactcggattctgactcggaacttggcgagct

SEQ ID NO: 29314 - DNA, 5020 bp, Arabidopsis thaliana landsberg
  unsure (1)..(5020): unsure at all n locations
aagtgttctcacgggaattaatggaaatccgcttggggttttagcgaggcaacttggtttgcctcttcataaggttagagatatttgtccattgtatcttcccaatggagagcttgctgatgctggtgttgattctaagattgaggcatcgtttaataagttgttggatagagtttgtaagcttagacagtcgatgatagaggagaataaatcagtagnnnnnnnnnnnnnnnnnnnnnnnnnnnnatttcgattggtttatggggttgctgaggatcagcaagagagaatgctcttagattggcatttagcaaacttggaatatgcaaatgctacattgttggggaatctgtcaatggcgtattgggatcaagatgatccgtatgagatgggtggtgatcattgttttatcccaggtgggaacgaaatatttgtacatgcgttagcggaaaatcttccgattttctatgggaataccgttgagagcatcagatatggaagtaacggggttctggtttacacaggtaacaaagagttccactgcgatatggctctttgcacggttccattaggtgttctgaagaaaggtgcgatcgagttttatcccgaacttcctcagaagaagaaagaagcgattcagagacttggattcggattgttgaacaaagtggcgatgttgtttccgtgtaacttctggggcgaagagattgatacttttgggcgattaaccgaagatccgtccactagaggagaattcttcttgttctacagctattcttctgtttccggtggtccattacttgtagcacttgtagctggagacgccgcggaaagattcgagacattgtcgcctactgattccgttaaacgggtcttgcagatactacgcggaatatatcacccgaaaggaatcgttgttcctgatccggttcaagcactctgttccagatggggacaagacaagttttcatacggttcttactcatatgttgcggtcggatcatcaggagatgattacgatattttagccgagagtgtcggtgacggaagagtgttctttgcaggtgaagctactaacagacaatatccagctacaatgcacggagccttcttaagtggaatgagagaagcagcaaacatacttagagttgctagaagaagagcgtcatcatcggctttaaatcctaaccagacctgcatcgacaaagaagaagaggtagacgaagaagaggtagacgaagaagaagaccgctgtttggatctgttattcgagacacccgatttaacattcaggaatttctcagtattgtttactccaaattcggatgaacccgaatcaatgtcattgttgagagttaggatccaaatggagaaacccgaatcgagtctttggctttacggtttagtgacaaggaagcaagctagtgagcttggtgaaatcgatggagatgagttgagaaatgaatacttgcgtgagaagttagggcttgtacttgtcgaaaggaagagtctttctcaagaagcggaatcgatgatctcttcactcaaagctgcaagattaaatcgacagatctttgattagtagtaaaatagttttagattgaattgtattcaactgcgtctacgttgtaaattgctgttctaatcttttttgtacttaacgcaaaacattttggaaaacaaattgttatttgacgtgaagtgaagtttacttttgttttatcttattaaaattgaaagattaatcttcacatgggcttcctaagcccatataattggaccattgatctttaagcactataaaacgacgacgtattgtcgtttctctctttctccctctctccaaattaacaaaaaaaaaacgctacacagtcgtcgtcaagaacaaagaggatttgattgaattctccacaagagatccgacccgaattcgaaaacccgaaagaaccgaatcgaagatgagcaaggatggtttgagcaacgaccaagtctcatcaatgaaggaagcatttatgctcttcgacacagacggcgacggcaaaatcgcaccgtcggagctcggaatcttaatgcgttcactcggcggcaatccaacagaatcacaactcaaatcaatcatcgcgacggagaatctctcgtctccgttcgatttcaatcgattcctagatctaatggcgaaacatctgaaaacagagccgttcgatcgccagcttcgtgatgcgttcaaagtgcttgacaaggaaggtactggattcgttgctgtggcagatctgagacatattcttacgagtatcggtgagaaattgcagccgagtgagtttgatgagtggatcaaagaggttgatgttggatctgatggtaagatccggtatgaggattttatttctagaatggttgctaagtaagatctaaatctttgagatttgaattctttggattagaacaaatcttaggatttgttcagaaagtgtttaattgttaatgtaattgggaatttggtcttaattaagctgtgttattcgaaaagatgcttcctttatgatgttgtgtatgttcattggtgcttgaacttgttcttcatgttaaagaagggaggtgctttgaggaaacgacaccattttttgttttgatgtttaagacacatggaacttagtatgatagttttgttggttaggaactttggatctttggaatggtattagtgatcttgtgtttgatcgtgagctttgtgcctttgtttgttcaaatatctttggaatgaatggtctagttatgtgtgttgggtgtccggtcaacttattctctatatatatttctttaatatgatgcacaactaatttccggtcagatggctttcccaaacaccaatgacaaaagattttacaaatgaagttaccttatttcacaaacaaacttttgttagagaaccggttctttgttggagaatgtttgtatatgtattacaagtaaatgtctatacaatttctgtagattagtttaaatgtatcataaagtctaaagtagagtaatgataattcattcatatatgctaattaagacaacaaaacaaaaaaggtttgcagatatgaattgtgattgtcaaaatgtcaatggaacgttcttccatgtactactattactttattaagggtcctgtctctttgtttttatcaacggcactctagctagtgactgatttctgttcttagtttatcacagccactgaatttagtttatcacagccactgaatttagtttattaagggtcctgtctctttgtttttatcaatggcattgttgatttctgttcttagtttatcacagccactgaatttagtttatcttgttattggctgtgtttatagttctgtgctaatgatattgtttatgtagtgtttatactaaattcattggctgtgtaacctgtgtttatagttatatgctaatgatattatttatcttggtattgtttcagatgggtaatgatactctaaacctcgacgatgagtacatgaccggggatgaaatggaagcctatgaagagaatcaagagaatcaagatgaagagattcaagagaatcaggatcaagagaatcaggattcacttgctagcacagctgagaagagtacacggcgtaagcgttcaaagtgttggaaagcactctgaagtagtttctgtagtagtttgaataatttctgaagtagtttctgtagtagtttgaatagtttctgtaatgatggttttcttgactttcataatgcaggggttttatgcgttcatttctcaaacagctggggctaatggaaagtctgaattagacaagtatttagatgagccggttttggacataatagcattcaagagcatggatattttggcatattggagagataatgctaatcggtttaaggagttgtctactatggcgtgtgatgtcttaagcatccccattacaactgtagcttcagagtcttcattcagcataggaagccgagttttgaacaagtatcggagttgtcttcttccttctacagttcaagctttgatatgcgcgaggaattggctacgcaactttgaagagattggtatgcttctgacttctttgcttttatcaactttgaacaagtatcaatttgaatcttaatgcatattgagttcttcttttctgttgtacttaggtgataatatcgagttccttaatgaagacaaagatggcgagggagaagaagaagaagaagtttaaatttgctgttaatttgtttttggatttgatactttgttgaatacttgaattgtgtttaaatttgcttttggatttgatatttaaatcatttaatactttgttatttaaatttgcttttggttttgataatttgattgaaatatgaagcaaatactttagtgttaaaatttggttctgttatgcccattggacagcccatttggacatgggcattaatggacatggacgttaatggacatgggccttagtggacatggacactatttgtccaatatcgaaatggacattattggattgggctagtggacacggacagcccgctttgacagctctacgctcaaccgcccgtctcgcgctgtgtccacggcggaagttggaggggtaatggtgggttgaaacctgtagacattccattttccagtatcaagcttttctggaagcacaacactgtagctatcctctagagaaaacaatccaaagcttttaaaactcaagaaacagagaaattttcaaattatggagagactaactttcaggtgctttacctttaaagaaaggtgaagcagaagaagcggtggcgttgaggaatagagatgatgattgatcgttggtcggagaagtatcgatgtgagatcgaatggtttcgaacgacgttgttccggcgaagcaaattccatcttttcttctttcttcagaaaaaatgtcttcaggaatatacgaaataaaccgattaattaccattttataaaaattcaaacttaaaaacatgacgtcac

SEQ ID NO: 29315 - DNA, 1871 bp, Arabidopsis thaliana landsberg
tcgcgaaaacgagacaactttctaaaaatacagaagaaaaaaacactcttttttttctactgtgtcaatgccggtatctatttcaagcttctcgtctctctttcttctactcatcatcttcttcctccttttactctcaccatcgctttcttatgccgaatctgaagttcatgttttggatcgcgagctgttagagatccagacaaatccaaagccgggcaagactaataggaaactcaagtgctgcgagatgcggagcagatctcagtgttcggctttccctagatgcaggtggtgtcgtagtgaagctcttgatgacttgtgcttcagtaaagctgaagccttgcgacttccaagccaagtcttcctttgtgaattatgatttaacaggttggatcttatatagcttgttgtagttcttgcagagtttcggtggagatagagagaaaattgttaactttccagaattttgacttgtattgattcgcttgttctgttttgtaatgtctgtttgttgttgttgttgttgttgttgtaattgtttttgagtgttacaagttttgaattgtactggatctttttgctcatatctattgaaaggtgcttcattttgtgtttctttcttgttatgttttgattttgagctattcacttttgctaccatgctctcaaatgaatcgatcatactgtatgattcttgacttgtaacattgttagagaaatggaaataagtgttgttgatatcgagaattttcaattgagctgaatatatcaagtactttacttctctaatttttgtgtgaatagaagactaaagtaatgttggtgttttcatatagatgtaaacacagtgtttttagattgtaaacgacaacagaaccgcaaagaaaccatcaagccttcagtggagtcaatagtatttgtgtttaaaatgcagctttttagtatcaagtggttcactgattggtaccttggtatgtgttcgtgttagaaaggttatggcttgtttgttttagtggatttatatcgcgttttagaattgttctacgcgtcactgccgattttggaagttagtagctgctacggccagaatgagcaaagatctacttaaaggcgtcttttaatgtaagtactgctttaataaatttcctaatggctgaagaaatgcttgagctcaggaacagaagccaatgtatctgcaatagtagcttcttcttttaggttttttcgcatatcatttcgtgcaaatatcataaggcaatagggaagtttcttactatacaactaaactaagttttattccacatatatatgctttacaaaagtgacgtttttcttgttttcaggaaaagcttatgatctaggtatatgcaacattgaagaaggatgcatcccttttcaacgcaaaaaacggaatactatatgtataatcatctttcccttatccccctaaaaacgtcgaagaaaaggaaaaacaaatctggaaataaagacatatgcacattaaaccagctagtttgcgagcaaatccgtgactgcatctctcatatcctcatatgcgtaacagctttcgaggaactccacaagattcaacagttcttgatctttcaggtcatccacaaaagcctttataggcactccattctctggctgtaatgagtaagaaaatggattgtcatcgacaatcaaagcacttctgaggtctttccccactaccaaagataagtcctttacatatttcccattcacctccgtgcatgagtctcgatatagccgctgtgagatcacaccgttcttgtctagcttgtacaaaacctgtgaagcatattcttccagaccagctgtaaaactccacttgagtttcaccagtc

SEQ ID NO: 29316 - DNA, 1908 bp, Arabidopsis thaliana landsberg
gcattctgcacaagaagaagaaaagaaaacatttgagagatttgatacacgagcaatgctgaattctgaaaaacttctagcaaaaataacttacaattcctgctggaagttgtctaaagtgaagatgctccatagctcttgtagtaaccaaaggcttttgtggataatagagaacataagctaacgtatcctggttgacagaacaataataatttctttaaaatattgagtgatgtaacaagagctgacaagaaagaccacaaattaagagcctagaacataccatgcgaaattggtagttggtgacataaattcccattgcttgcttccccatggcagattgatatgtattacgaggtgactaatacatcaaaaagtaaaagggttagttagcatgaaactgaatttacataatgaaatcgcttctgatagaaaagtcatttagacagaggtacctgattatggtcaggaaatggtatgattgaagcacagacccccaatatcagagatgggtgaatctcacaatgtgtgtagttttcagtataagcctcttctgggcggagtctagcttgaaccagatcctacaacaaacataagagtaagatttctgcagaaattagtgcaccacaaactcatttaatcacatcttcatttcattactcacactgatagtcatggaaatcatggtcgtttcctcttcttctgtgtctatgtattctataaagcccttagcaaccagatgatgccaaccatcttcttctgcactttcctgggttatgaaaacaaatattggtacaatggaatttataacaaaagatactttgataacaggtaaaaattagaattttaccctttgttgcagagcatagatatctctcttctttattaagagcttctgattatctacaataaacaacggacggctacaacgtccataatcagtgtatatccggagctctttaagacggatatctctaactacaccaacttcagtgttgacatcaacctgcaagaggaaaaagtaatatgtcacttctgcataaagttgcaatattttcactagcatatatggaaacgtgaaagaaactgcatgcttacccttcgtctcaaacgtctcaacgttttcaccaacatgtcaggatctctatgaactccaacccacattccattgacaaagatttttgtggcttggggtataacagatggagatatttcctatattcaagttaagaccttcaggaaaccacaagaaccgaggaggcagatgttgggtaagaaattgaatgtgaaatgctacagacctcaaaattctcagtaccccattcttccaaaaattccaatataggataagcagctgacccaactgttatgtagaccatgagagccaagtttttcactagaccacaagcctggtacagcaaagccacaatgagcaatggaactataaaatccgaaacacccttattttataaatataacaattttacctgtccttcaggtgtttcagcagggcacatcattccccactgtgagttgtgcagttgtcttggttttgccaattttcctggcatatcagacttgattagattcaagtgggataaacaaaagtacaagccaatctaaattgcaaggatgtggataataaagagaaccatgactaaaatacaccaactgtacgaacagttacacagagacaaaatagaagtgcaggaaaagaacgaggctttaccttcacgtcctattggagaattgagacgcctcagatgtgacaaagtcgaagcatatgtcaaccggttaagaacctgttgttagttaagtctttagagccacataaatcatgcaatgaattataataggccaaaacaataaacccgataacatacatcaagaaattattggaactcaaaa

SEQ ID NO: 29317 - DNA, 1281 bp, Arabidopsis thaliana landsberg
taaagatcactctgcgaaagaccacagtttaatgatatctctctctctctttaggtggttgaatgtggttctaggatggatcatgaagatgttcccaggaggaccgtcgaaaagaaggacaagcaagcttctctaatgcatggatggcacgctcagtcgtgacccttgttgccattctgtatatcccgggcacagccatggattgcttcttttcctttagttttggaagaattcatttggttcttttgatccaaaattttggatttcattggattgagcaaaaatggtatagtgagaaacaccatgaacttgaagagttccaaatggatagaggagactcggaagcttaaacagagagaaaggtagttgttatatgagtgcgtttttgtctgaattttgtaagtgttgattatatagccaagttaaagtgttcctcctagcaaatataatttaccaagaaaaaatcttgtatggtttcggatatattttatcttctcgttttaaattgaagacttgaacaaactatgaaatacaagtgttaacactattcggtaggtcaaatacctgtcatttcagtccgaagtacaatagggtgattacacacacgcaatttgatctaagagtatatgagccatccaacaagaggaactatctggtatctaatgataatctaatctaatctaaaaattaaagcatttagaagccattgtggattacgctttatcttcaataaccaatcataattgggttaaaacaaacgagtggttgatataaaaagatgtatattagagactttgagttaccataatcctattttgttattctataaatatgtgtactcttttgtttaacctcatagtttcgataagataacctagtttgttcgttgccgccgcccaccgtaaaaatcttcatttgtcatggttttttctcctttctaacgaaatcaggtaagagatctagtattttctctcttgctaccattatttagaccatcacgacaaacttaaattcaactcttctcaataaatatttgattactaacaagcgatcgattttgttgtccgcacggaaaaatcttgtatattatattatcgatatatttacatatagattcaattaattagtttttcattttttgaagtcatgaatcacttttttttaatgaggtttgattattatatttaaacattttatcttatttggtttttaagaaaaacaaatctaatttgtaatttgagtattgcatttcatttcattggttatgtgttttttttcttt

SEQ ID NO: 29318 - DNA, 1505 bp, Arabidopsis thaliana landsberg
ctatgaaagtgtttctcatctggcgatctgaaaaaaaaaccgctacctcagagcaatgaagttatctatgagaatttcagcgtagcatcgagctcagaacccagagtccaattcatcatcagatcaaacctgatcaattggtctttggatcaggcattgggaacaaaccaccagcaccagcagctcctctaggtggagagaaacccaagaacttctgcagattagtccttatactaatagaacaaagcagataaagaaaagccatggaacaatcagtggaatcatcgcctttcaatcctctatgactcatcttcctcacaatcgtaatcggatgaaacggaagcttcgctaccactttcccttcgaaaagcgaattcaacaatccaaacacgacaaagagaaccaaagccacaacggcaccagatttaaacttgaagagtgatagatctctgctcgattcctttaagctggattcaacgcgatctatcttcttcgtcttcgatttcttgtttgttagcttcgaggaaggattatctgtcttcatcgtctcgagcttcttagaggctttgtcaatggaagatttcaacgatttgtacgagcttgtgcgatagattaagatccacgagattgcttcgcagaccaacgccgtgcagaaagagattccgacgacggtgagactatcggcgtacttgaaagaggcgaagagaggtatcgcggtggccattgttgctcagctgatctcttcttctctatcagagtatatctgaaagctcagagatttgattgagaatttatcatacaaaagaaagtcaaatatcaacaaaaagggtcaaactttaataaaagcccacaaggccacaaaatgaacatagtttaaaccaatgtaagagaaataaaagggccccatgattaaaaaagcccactcgtaatggtaatactgagttaattaataaacggcataacatgtgtgtttgacgtcgttttgacatccattttaaattcccttttaaacaaatgatttttctcaaaatttctagggtttgagatttgtcgattttgagatatttttttgaggtttggaataaaattgtagatcaagattttgtgtttttttgtaaggtcggttatagattacgtttatttatttatttttggttatgaacttcattttctggcttaattatattgttgtattttctttcattttggttcaaggcttaattttattaggaatgtttttagaggcggaattgttgtttacatttcgtttcagtggttgagcctttattgtagtggttcgtgttagtgttgttgatgcatcatccacacatgtttgacaaaccaaacaaaacaaatgttaaacaagacaaaacattcatttttctcattaaattaatagaatgatcagatgtcctgaaaagacaaaatagagaaattttcgtccttatatcaaacttacaactacataataattttctcgttatacatatagtacatgggggatc

SEQ ID NO: 29319 - DNA, 1680 bp, Arabidopsis thaliana landsberg
attacaatattttaagtaaaccaaaaaacattggcagtccaacattcgaatgtgatagtttgtttaatgttttactaataatcattatgtgtatattaaactataattagcaagtaatcttttgcacctttatggactttatataaagaaactttgattagcttcttatagaacatgatcatgttcttaataatattaatatttttttgtagaagttagttagatacacaatccaatgaagatagaagaatgatccgtggtacttggtcaaaatcatggttgtctcttctttacccacagttatttttttatcaacacttttatagtacttagaaaacttaaatatattattgacaaaataataataataacagtatattatgactaaactatgtcaccttttacaaaatcagccgtttgtatacatctccaatgctatctatgtatggtttttgattacttatttttgtataacattttggattgcattgtcactgttatttaccacaataggcaagttcattcatggttgaaatttataaatccattatcaggtagttttaactgatgaaccagtcctaatattctatactccaagctcttttttctagaggggcacaatttcctccaacctatatgcaaatattatactactatgcgacagaaataaagtaatgattgttaatcagtactaattgttttgtgatgaacattaatttcggctactttactttagattattgcgtgtgtgacagcttagcatcaaatgggttgggcaattaagggcatgattggaaattaattggtcaaattaatttaatttcttaattagcactccacttgcactttcctttgttttttaccgctattactttaatcttcttcttttttgtcgtttactacatttccagtcatttaatgatttatttctataacatgttggtgacctcaaaatttgaataagagaacatttattcatccatgtgttttgaaaaaaaaaactaacaagcactattacagaagaaattgtggaagttttaatttgctagaagctttatatgtgggcaaatttgatgacaataaccaaattaaacaattcttatgagctagtcaattaacccaatagaagaaagaaaccatgcagtaagagggtcaatacatgaacaatatcgttttttttcttaaatcataatttcataaaattcggagaaaaacaaaaaagtggaaaaaacaattaaagtttcttaaattgctaaaacggagccctaccggcgccggcgtgattcccctgccaactttcaactccaatctgaggcatgctcataggcaaattaaagaaaggcaaccctccgccaccgccagtggcttccgagtacatattccctccacctccgccgccgccactttgcaagtgctcctcatcttcctctaaaggcaacctttcgtacgccgcattgctaaaagacgcagccatgacaacgacaggaccagcacataacaacggaccaactacgcttcctccaaccacctgtccttgtcctccagcgaggtaaacactcaatccggtggctgtaggaggagccggaggagggagaaaagatcctgagagagatagaatctcgaaccttccgtgaagactaactaccgagccaggagaaggatgagatccaggctgacgta

SEQ ID NO: 29320 - DNA, 616 bp, Arabidopsis thaliana landsberg
cctgttcagttattttcgtcaaaacggtcaattgcaagaagggttggtacggttcttggctcctttcttcttctcagctttctcatcaagcggatactttgctttatcatgctccggcaacagtagaagatcctctatgtttatgtttccatactcatcaagcggtttatgtttccatgtttttaatctttttaccatggattcatatgcatatgtttcaaattctatgtttgtaacctaaactatttttcattaactatgaaatatttacaatttagaaaaaacaatctaataagatacacgttgcattaagtgattcgtgataaatgtttttttctaacattgggctttggaaaattttattaataaatattaggggagagttaacttcactcattgcatttttttttttcttttgggaaaagtcttcactcactgcataagatatatgtattggaagaaagagagcgagagttgaattgtacaaaatgtttttcgttttttggccgtaatgtgtaaaataaattgtcatcagttaaataaagaaaacaagaacaataaatgatccaaattttatcattgtttctacaaataaatgacaaacataaggccattt

SEQ ID NO: 29321 - DNA, 2570 bp, Arabidopsis thaliana landsberg
  unsure (1)..(2570): unsure at all n locations
cagctattggatctataactgaaggtgaggcaacacaaaactttcttttttctttctgctttgatctattcttgtgcatgtttttgaaagattctaaattaccaactatgattggtttgatatgtagaggatatatatagagatgatgagttcttcttctccaacacaacttgcatctttaagagacatgggaatctatgagccatttcaacaaattgtcggttggggaaatgttttcaaatctgatatcaatgatcatagtcccaatactgctacttcctctattattcaggttgatcctagaattgatgatcacaacaacaacatcaaggttaactagttttcttctttcaagattcattgatttttgaaagttgttgttacttgtttttttactaatgggtttttaaatcacgtgcagataaattatgattcttctcataaccagatcgaagcagaacaaccttctagtaatgataatcaagatgatgatggcaggattcatgataaggtttagatcaaaacaaagctaattatgttttcttttttatacatgcataatagaaaatggtggtttttgtgatattgattgatattcttttgtcatatgccaatagatgaaacggcgtttagcgcagaaccgagaagcggctcgcaaaagtcgtttgagaaagaaggtagaagcaagtccctttattgaatctcatatagtttagttagttgctactaagtcctctttttttttgtatctttaggcttatgttcagcagttagaggaaagccggttaaagttatcgcagttagagcaagaactcgaaaaggttaagcagcaggtgagctaggtcaaaagatatgtttaaaatgttctgttttgagtctctatcaagaaaatcagttttggtttcgtaattgactcagtactaaatgttttctttcaagggccatttaggaccatctgggagtattaacacagggattgcatcatttgagatggaatattcacactggctacaagaacaaagcagaagagttagcgaactacaaacagagcttcaatctcatataagcgacatagaactcaaaatgctactatagagttgcttgaaccattacgctaatcttttccaaatgaaatccgatgcatcaaaagccgatgttttctacttgatatcgggaatgtggccaacttcaaccgaaagattcttccaatggattggagggtttcgtccatccgaacttttaaacggaaaaatacccaaaatggtacaatctctaacatacacatttccaaaatgtaacatttcctccttcccttttcttgaaggatgagatgccttatcttcaaccattaacggatcatcaactctcggaagtgagaaaccttcaacaatcatgacaacaagcacaggatgctctgcctcaagggaatgatatacttcaacagaatttacctgacagccttgggattgatgccggtatcgagttcacgcattatcccactcacatggctgcagctatagagaatcttcaagcattagaaggatntgtgaatcaagtaagtagtaaacattaactcaaaccaaattaagtaaagtntgtgtcattctatttcaaacatctctatcctgattataacaggcagatcatctgaggcaacaaactttgcaacaaatggcgaagatcttaacgacaagacaatcggctcgaggtttactagctttaggagagtatcttcatagacttcgtgctcttagttctctttgggcagctcgtccacaagaaccaacttaaaagaggaacttattaaaactttaaaaacaagaaacagcagaatcaaaagtcttgaagaagcatactcatcacaaagcttggaaggatgttttaaaaaagatctttgttaattaagtagagtgagattctcttgattagaactttatggtttttgctttatgaagtatctctccagagaagattgtaaatttgggttgaaactttgtaatatatttagatacaacaaataagtttgaaatctgagcaatttgataatatgtgtactgaatgtatatttaatgtattattaagggactaatgtgaaactcaataaatcaaagggtactattgtaattttcccatcgttgcgcttcagtcgtccacaaaaaaacttccgttggaattttctgaggaaaatgagaaaattcaattgaagaaaagagtaaagaagaagtctcttgttcggttggatttttcaggaatttcattttcgtgagcttacttgttcgttcatataaagaggtggaatttgatttatatgaattttgatttctgggtttacgaaattgatcggtttctgggttggaacttgaagttatgagcaatcttcgagctatctgtagaccatactctgtgttctcttcgattgtgtgttgtagtagacatcaaagtcgatcactttttagggtttcgattaaaaacgtcgcctttagaaaccagagatcgaatacgtcttggtttaggtctaaaaattcgaatctttggtttcgtttgaatcagaggaagactctagttagagc

SEQ ID NO: 29322 - DNA, 1543 bp, Arabidopsis thaliana landsberg
taattatgttgcagttaaattatacgtctgtgtataataactctcttgaagcagaaccgtcgagtaataatgatcaggacgaagaccggatcaatgataaggtaaggctttagcattttaaggctacttataccttttgcttcgaagacttcataaactcctccttctccattttaatctttagaggaagagacacggcgtgatgacatgaattgttgttccttctctatgaacagatgaaacggcgtttggctcagaaccgagaagctgctcgcaaaagtcgtttgagaaagaaggtaaccttggtgggattttttcttgtgttaatgataaaaaggaaagcttatgcaaagttgtgtctgtgcttgtaggcccatgttcaacagttagaagaaagccggttgaagttgtcacagctcgagcaggaacttgtaagagctaggcagcaggttagctcaagcttgtttatttgttgtgtgttcatcaaactttatctgattcattctgactcagtgattcttctggtttgttttagggattatgcgtacgcaattcttcagatactagttatctaggaccagctgggaatatgaactcaggttggtgtttatatcactaaataagcatatgttagcattgctttatctcttaatcctcagtagataaagaagtaattttctcaataataaccattttcaggtattgctgcatttgagatggaatacacacactggctagaagagcaaaacaggagagttagtgagattcgaacagcgctccaagctcatataggtgacattgagctcaaaatgttggtagatagttgcttgaaccactacgcaaatctcttccgcatgaaagctgatgctgcaaagtctgatgtgttcttcttgatgtcgggaatgtggcgaacttcaactgaacgcttcttccaatggattggaggtttccgcccatccgagcttttaaatgtaaacttcttttttacttttacacgtttctctttctactcttgagaaaaaatgctcaaccttttttgttgtctaggttgtgatgccatacgttgagcccttaaccgatcagcaactggtggaggtgcgtaacctgcaacagtcgtctcagcaagcagaggaggctctctctcaaggcttagataaacttcagcagggtttggtcgaaagtatagcaattcagataaaagttgttgagtctgtgaatcacggggctccaatggcttcagccatggagaatcttcaagcattggagagttttgtgaaccaggtaccgctaagtgtatttgctttgtgcttttgcagtctccatgaatccaaagtttattttcatttttgattagaaactttgtgagcatggatttcacaaacaaaatctctgacaatattggaacaggcggatcatctgagacaacagactctgcagcaaatgagtaagatattgacgacaagccaggctgctcgagggttgctcgctctaggagaataaaaccacaggctgcgtgctcttagttctctctgggcagctcgtc

SEQ ID NO: 29323 - DNA, 1611 bp, Arabidopsis thaliana landsberg
  unsure (1)..(1611): unsure at all n locations
gcggtaatggcgactctcgcatgcagcggtggctgattgtctactgtatggagaacgcaactgcttaccttattagatacgatgtgcacgatcgagatccgcatttcggtttgactgtgccccacgcacaaggtgccatagcttctggtttcgtaccttagacgaacacgatgcatagtcgacgggtactcatgctacattgtatgctggcctttgtgcttaacctgaaggaatacatcactatgattgtatttgttatcttgcagaaaaatatatttatgtgaaacatatgaaaaatatctacataaaatagaaatgcggtatacaatagcgaaaaaaacacatgttatgcgagattagatatacgagtaaatgtataaaaactctatttattgaattagatattcacatagaaatatgttacttaagtatgtatttgttttgtattttcagtaaaggtcacgtgggatttattttttgcatatttagtccttgggatttagatctcgtaaacggcgtcgtactaagagtatcctccggcggcatcagttttggagtttcttggatcatcacactcacctgcttcgttactcttcccttggattggattggattggattcgctctttcatggttgaagaatgagatctcaccaagctggccgcaaacttccgcttcttcaacttctcggctgcgtcgctgttttctccgttttcgttttcaccatccaatcttccttcttcgcaggtcatctatcgccgtacctttccctttccattatatatacacttcaattgttcgaatagcaatatgattcttcatctctcgcgcagataataatcgtaaactagatcttcagccggaagatatccagatcttgtcagattttcagtccagcgttcaacagtgcgtggtttgtctcctttcccaatttctttgattctggacttgttacttttctatatggattcttcggatttggatcgatgccacagttttggtttattatggcgcactagttttgattttggataaatcagatgtgtttgggagttacaataatgttgttgcaggctaacagagggcttggactctctgcccatattatcgatcactgtaatcttatcctcaagttccctgaaggcactaacagtacttgggtatgtttacacttgtctggtttctttttgagatttcattggttttattgtgatcaagttttttacacttgcattcttatctttcaatgacagtacaatgcacaatttaaagtttttgaagcattggagttcaagtataatgtttgtgaggcagttctcttatgggagcaggtttgtgcttctttctttctctgattagtttttcttgttttagaacttctcgcaattctaatgttnnnnnnnnnnnnnnnnnnnnnatatgactacagtattgacaagagaatacctcgatgtacgccctgatgggtggttggactacgcagctatgagaattgcacagttgtatgattctaaacgtttttgtctaatggtttgcttgtgttggttgatctttctagttgaaactcttgatcttttgggtttcaggggagcttgatagtgttataatcgta

SEQ ID NO: 29324 - DNA, 1812 bp, Arabidopsis thaliana landsberg
  unsure (1)..(1812): unsure at all n locations
tggtaagaggtggagcaacaatgacatcaacaccaaactcacattcattaccctcgaataggtatccattttgcggttaatgaatgtttcatatggaaaaacttttggcaatccccacaccattttaagtgcatcgaaccgctttatttcaacatctgaaagatatataagatacatccattactgattttaaatgtgaatttatagaaagagaagcatgagatgtatacttcacctttagtaaagtacttgttttgtttcttgttgtagacaaagaagcggagttccgcaaacacttcagttggtggtttgaattccatcaagcttgagctgtctaattccacgtacatcgaaataaatccacttccattgtcctttacgttccctttcggatatatgatcaatctcctgttttttttttaaaacaacatattgcattggctatataagatataatgattaatgctaaaccctgaaaatacaattatccataccagttatatcaccagaggagaaaagacgagattggtatttatgaccagagaaggaagtagttttctcaagttgggagaagttgtgaatcttgagagaataagaagaaggaggatgatctctccagtttttcttgatagtagaagaaactggtgctgagcatgatgcacccatcttattctacccaacacaatgcaagtcttaaaagttaaaactatgattgattaatgtataaataggattcttggggtgtcaagataaactattagggttttataaaaattatcgcttaacaaaaaaaacaaaatacattttatagggggagaggaaaatatagagagatttacgtctaaatacttgtaaacgcatcagattatttggcataagtattttatttcttggagaagattcttaattcgttggtaaagtacatatcttttatagataactttacaccagatttcatcagttgtaaataacccattttttctctaagaagattttcataaattttgtaatattaacctttaatattaaaaaacgtaaaacatgcgagaaaaaaattatgatcatgaataaaaatattactacattattaattatataaaagtttacttcgtagatggcaaataatgcattctgttgccaaatattgtataaaattctcctaatattcatgtccagtttgaaagattaaacagtgtgctacttgagtggcttaactggagaaattataaaagaagagattatttacgtataatcaaaaccaatgttttcacgcccgacccgaaccgcccggtccaaccggttaaaccacgacccgagcacttctccggtttgggtttagtgctaaaacccactatctataaaaccaaaaaaacccataaaaacccgctattaacccacgacccattgaaccggttgaaccgactgggtgtgggttttaaaaactatagttgattttggaacgaatatagggtttttggaacgaatatagggctttttcatagttcataatttcttctcaaacggcgactcaatctctcgtctacactagccaaacaaaccagttagtttttctatctctcgttttaagtttgaaaatcctatttgtctttatttgtgagcatcatgatcattttatattgtatattgatatagngatttctatactctcgtggcctctttgtcttggctccactgaatcaaatataatattcaaagtgtttttgcatcaaaataataattcagcttcatgtttgatgtgcatgtctcacagatatttgnttgtttttttgtgtgaatttaataggtaatgga

SEQ ID NO: 29325 - DNA, 1731 bp, Arabidopsis thaliana landsberg
aatgcaacaaaaacatttcattgttaagtagaatcagtgggtaaatacaaaatagaataaagtttagaaagttggagaatataacaaacacctttaaccaaaaaaaagttggagaatatattgattttataaaaagtgaaaaaaaaatattgtaagaaatgacaaaaaaaataaaggaatagtcagaagattaatttatattaagacaatatattcccttttcttatttgtactccatagtgcaacaaagataacattgtcaagaagtatagcgagtcattggccacaaatgtccaatggtcacctgccaatgccatcgttttcttaatgttttggtctttaattagcatatcatgtgtgaggttcgaatttataatatgaaatagtgcttttaaaatgttattagaccattggacatatattcagttacaccaaaaaaattcaatacacaatatatgatctctttaccaacaagagtttataggttatatacattttttagttatcaacatgcaatatccaagtttaaagtttaaatattatagttgtttatatataagcgtttatcaaacctacttagttcttgttttataggcaaaatatgtaaaatatttaaccataaaatagtttttttttggtgtaataacgaaccgtcaatgaaacaatatgcagttaggcatggctagtgcgctagaaacactatgtggtcaagcctatggagcaaaacaatatcatatgcttgggatctacctccaaagatcatggatcgtcctcacaggctgtaccatttgccttatgcccatctacatctttgcaggccctattctcttggctttaggtcaagaggaacgccttgttcgtgtggctcggatcatagctctatgggtcataggcatcaacatctcctttgtgccttccttcacttgccaaatgttcctccaagctcagagtaagaacaagattatttcttacgtgactgctgtctccttagggctccatgtcttcttctcgtggctcctagtggctcatttcaattttgggatcactggtgcgatgacctctatgctaattgcgttctggttgcctatcattgtgcagctcttgtatgtaacatgtggtggatgtaaggatacatggagaggattctctatgttggccttcaaagatttgtggcccgtcttaaaactatctttgtcttccggtggaatgctttggtaaggtttcctatttttgttttgtgttttgaacacttaattaaggaattagctagtagtggatcaaccaaatgttttcatactgatagctttagttttcattgtcattgttggtcaaaacaagagattggttccacttgatgcatatacttagtccatgtattagttttcaggctgtaaactatataatataattatcaatcttgtaggatttgatccgactgttacatttacgcatatactcctgagaatgttaggagtatattatacacacttttaggagtatattttttttttggtgaattacttttaggagtatattatattcactgataatttaatgatagttctagttacttttttcttttgtttttttttttctttctaatttacttatctttttaaaaattgatgatgattactttgtgctcgttcccttttacagcttggagttatggtacaaaacggaaaatggtattgctcactggaaatttgaaaaacgcagaggtgggtcttt

SEQ ID NO: 29326 - DNA, 1424 bp, Arabidopsis thaliana landsberg
tcatttaatacactgaaaacaattaattatgtgaagaatacaattgagttgtttaattcttctgtgagcctgtgtcaactagttagttttggggaacttctcttatcaatttcagtatttccaactatttagatagaccgcttaaaaatatatatatagagaaccaaatttgaacctaaatcgctttaaggaattaaacccatcagcctaaaacacggttaactcaattaaaatttggttcagtttataatatatgattttggagtatttttcgaatatatgttatttcatgaaactacaatgtaactgtctcaacattggttataactattaatctaatgcagttaggtatggccagtgcactaggaacattatgtggtcaagcctacggagccaaacaataccatatgctcgggattcacctccaaaggtcatggatcgtccttacaggttgtaccatttgcatcatgcccatcttcatcttttcaggcccgatcctcttagccttaggtcaagaggaccacattgttcgtgtggctcgggtcatagccctatggctcatagccatcaacttcaccttcgtacccgccttcacttgccaaatattcctccaatctcagagcaagaacaagatcatcgcctacgtgtctgctgtaaccttagggctccatgttttcttctcgtggctcctagtggttcatttcaatttcgggatcactggtgcaatgacctctacgctagttgcgttctggatgcctaacattgtgcagctcttgtatgtcacatccggtgggtgtaaggatacatggagaggattcactatgttggccttcaaagatttatggcccgtcttcaaactatctttgtcttccggtggaatggtttggtaaggtttcctaaaagcttatggaatctaaaagctctgcaaacaatataaatatcaattagtgatacttttttttgagaatatgatccgaccgttacagatacgcatatatattatacactgaatattttattataatgtcaagttactatgcttttgctatatgtttgattgattcttgtcaatacactttactttttttaatttatgatgattacttggcggtcgttattttttacagctaggagttatggtacaactcgatattagtattgctcactgggaatttgaaaaacgcagaggtggcgattgatgcactatcaatttggtgaataaacaagaattgaccttatatttcttatggtttacatactacacattatctttatactaactcgactcttaagttaaaatatggtatgagtataaatagagtgacatacaacttattacatcttaccaaatcgactaatctttcccatttctttcttgcagcatcaacgtaaatgcactgcacatgatgatagcacttgggttt

SEQ ID NO: 29327 - DNA, 2775 bp, Arabidopsis thaliana landsberg
aaaggaatgactcatgcaatactagaagttgtggcaggtggaattgttcacactgccaaagatattcatcgctattttaggcgtacacttctgaattctacaaagccctttcaagatgtggtcaaatcagctcaggattctcttcggtggctgtgccacaggaaatttcttgagtggaatgaagagacaaagttatacactacaacaccccttggacgtggatcttttggcagttcactctgcccagaggagtcacttgtaatctaatctgactttctatatttgaaattgcattttacatattgttatgtaagcatgcttgacgtcaatgtttgttgttgctgcagatagtgctggatgatcttctacgagcacgtgaaggactagttatggcttctgatttgcatctggtctacttagtcacaccaattaatgttggtgttgagccaaactgggaattgtattatgaacggttcatggaactgtctcctttagagcaggtaattttgtactctctgataatatatggcataactatgtgttgataaacaagaagtatgttgttagttcttcctctaaattgactgttattatggtttaaataaatgtttttcttcgtattaaacttttagtgttctacaaaatagttatgcattctctttctcctttacttccgttgtgggaagctgaattgcaaccttcaagtgttttgcagtgccttttgaataaaactatagaagttaggtcttgatatttggggatgtagttttttctcagaaaatctttatacgctgatgctgttacttttaatctttcgatttcagtctgttggcaatagagttggagtggtcgaacctttcctgatgcgcatggcacatggtgcaacagttcgcactctaaacagaccacaggatgtaaaaaaaaatttgcgtggagaatatgacagtcggcatggttcgacaagcatgaagatgctttcagatgaacaaatgcttcgagtgtgcaaaagattttttgttgctctcatcttgtcaaaattagttcaggttgccccactacactgctttttttttgtttcttgtatattatctttgctaaagcttcttagtttggttcatatatatgtaaacccctagcagcttgcatgatcacctacacttcatgatattttgttaaactgattacttaacttacatgtccgacttgttttggcccttaaagattttggtttgtatcaaaattcctatttcaaaaattgctgacaatgcttgcttttgcatcagaaggcatggtgatgatcgacttctctaatagctgacttgtttctttttgttcttgaactgtgtaatgcaggaagcttctgtgactgaggtctgtgaagcctttaaagtggctagaggtatggttcaagcgctacaggagaacgctggaaggttttcttccatggtttcggtattctgtgagaggcttggatggcatgatttggaaggattagttgccaagttccagaaccgtgtttcatttggtgtcagggctgagattgttgaacttactagcattccatatataaaggtgcttgcagcttccaggaacttatagcgaggatatgaagagtgatgttaataaagatggtttttggtgttgaataaatagggttcaagagctagagcgctgtataaagctggcttgcgtacatctcaggcgatagctgaagcgtccatccctgaaattgtcaaagctcttttagaatcttcagcgtgggctgcagaaggtaaattagttttcttagacagtttaaattgatgtatttgttgccttattgagatctctcaagcttatataaacatcgataagttaaatgtttgtcagaaagaatattgtatcatctttcatctaatgtgctcagagttaatatggtgtatcaggtactggacaaagaaggatacacttgggattagccaagaaaatcaagaatggggctcgcaaaattgttcttgagaaagcagaagaggcgagggctgctgcattttctgcttttaagtcacttggtttggatgttaatgagctttcaaagcccttgccgttggctcctgctagtagtctcaatggacaagaaactactgaaagagacatttccagaggctttgttggtcccgatggattacaacaaagcatagaggggcacatggaatgtgaaaactttgatatggataatcacagagaaaagccaagtgaagtattaggtgatgctaccttaggggtttcatcagaaattaacttgaccagtcgtcttcctaattttagacctataggaactgcagtcggcactaatgggcctagtgctgttagtattctttccagtgatactttccctatccctgtttacgataacagagagataaaacctaaggacaatgttgagcagcatttgactaggaatgaccatattcctctgagtagtaataaggatggtacaggtgaaaagggtccagtaactgcaggaaatattagtggcggatttgattctttcttggaactttggggatctgctggcgaatttttcttcgatcttcactataataaactacaagatttgaattcacgcatctcttatgagatacatggaattgctatctgctggaattgctcccctgtatactatgtcaatcttaataaggatcttcccaacctggaatgtgtagaaaaacaaaagcttatcgaggatgcagttattggcaagagtgaggttctggcttctcacaacatgttggatgt

SEQ ID NO: 29328 - DNA, 2405 bp, Arabidopsis thaliana landsberg
cacaattggcatatatgctgacgctttaaaaaaaattaattctgtaaaattgacttacagcccaaccagatggtgcatttaaaaaaacactatttttttttgctctttgattagtttcaaaatctttaacctccagtataatcgttacgtctctagacatcaaatcttgtctcgcattcgataaataaacataacaataatttatatcaagagtaattcaagtcaataatttatgttgtgaactaagtcaagtatagttcctatcttgtagggagtgtgatcgatctcactacattgcacttatatttctctctctatacattccttataggttttcttagaagcgtcaaaattgagattcgtaggcttttttcatccccaagtgctcgttgtactcggatgcatctcctatgcgtcgccaaaattggacattcgagtggcctgatgttagccatgttagctagttttgtcgtgttcattcttgctggggttttatcttaacaaggaatatggttgaggtgagataccggactacaaagaaccttctaaaagctatggttagtcaatgtcgttctcttaggtttcgttttcttatcaaaccatattgaaaatatgaagctaatgtgtggatacctagttttacaatttttaatgtgttgtgtcattaatttacaagcaaaaaataaagtagttaaaaaaagtgagttacaaaaaattgtgctaaatgtgtgaactgtttattgaaaataatagttaatcctatgcaagaaatttggaatatgtaatatataggatgtataagaaaactagattgactgactttaagtttcaatataggtttgtcactttgtgatttgcatattaatgcgagactatccacgtcaagaggctttcccaatataatgacaacatccgctgacattatgaacacattttttctctaccgaacctaataatggcaatttggcaatagagcatgttatatagtagcgttataaactactaccaaattctctgcctaaatgtaactccaacttgtacttaaaacgcgaattaaatgacaagttcaagaggtgtttgtgttgtggctaccacacaataagtgtactttacataaccgattgaaaaagtaaaaaatatttgaaaaaaatatttaaaacatagttgattatatattatcatacacgtgacacagactaaataatagatcaaataggaccaaaaaaaaagaaataaaataaaatcaatttgttaatactatactcatcttgatccctatttcagaggtataggcctcacttcaataccatcaatcaaaatgccacctttcagttgatatcctttcacctccataagagtcatattgactacatcatcttctccttctcgtgtctcaaactctcctaactcaatctccaaccacccgtcgtctctagctttcggctccctccttttcccgtctccgcctactgcctccacagtcatcgccattcgctcttctcggttcccgtaaaatagccgcttcatttgctgtttcttctcatccaagcaacatagataagttgtgttcttattattttgaccagtcttagatttaaccgatgtctccgccggaactaggtctagtccgtaagcacctttagttactttcatgatgagatatgctccatattttgtgtttggtgataaaactccgcttaagattttaccattgatttctaaacgatcagttgttataagttcagctgactctgaaaatctgaaatttaagaaaactaaatattggtaatagagattaattaaacgtgtaacattatcaatatgtacacaatcataaatagttattttaagaaaagaaagaaaaaaactgacctagaatctgagacattgctccaagagcagtacgatgcatggtcactataagttatggaaatatctcttgctgataaaatgtaggaaatttttccggaaaatttattgatcttgaacagctgaaattgcatcatacacaaaagatatttttagttcaagtaaattaaaacgatatctattttttattcaaatttaactcatagaaatctaacctttcgagcattatcgatgagaagagagccacataaacatcgataaatttcctttttggaagaaaaactccaatgatgatcagtagattgagagatgaggcttttgtaatccgatggtagaaacttttcccatacgaaatcggagtctccggctagccggaaaaccgaagagacttctgacgacgagaatgcatccgccggagatgtaaaggcaaggatgttggctatgcatgcttctggtaacatcatcatcttcttcttcttttgccgagtaaaaacttaatatatctttaactgttagtattatgaaacagaaaggtt

SEQ ID NO: 29329 - DNA, 2212 bp, Arabidopsis thaliana landsberg
atgttgcaatacgactgaaggcaactttagcctgatttgttactccaataacatcagggatcattcggactggatcttggaccagacgcagggttgccacaaaagtgaaaacgttacttgctctcaatggaatgtctaggaaataacaagtggcaaaagttgcagcagagacaaacaccggtgatgaccagaacagaaccgcattataagcctttctcatctgaaccgccttcaaagatttcaactcaatgttcctaagcttttcaataaccttcttgaaatgtgattcccacgcatagagcttcaagaccttcatgttgacaagagactcattgcaggccttcagcctctcgtcctgagaggtcatgagttcgctttgaaacttgttctgaagttttgcgataggagcgttgcataaaacagtaagtattatcacagctagagctgaaaacgtagcaactcccacagaatgaaagagaatcccaagcgcgattagtagctgaaagcttgttgtccaaagctggtgaaaccaatacggaaactccccaattctgtaagcatcaacagtagcgtagttcataatctcgctgccagaatgaatcagtcttgaagagttattcaatctcagctgcttcttgtttatagctgcagttagaagagacctcacgcgtaaaccgacaattctacatctgaaataccattgtctctgtgacaaagactctatcatctttgagaagaacagcaacacagccaacacaagcccttcatatctaaagcttgcattgccttcagcaaccaaaatgaaagcattcagaagcaaaggaccagctgaaacagcaacaatcttcataaaagcaaagaaaccagaggtcaaaagctctctccagacacaaagaacagtaactttcaagatcgaaggttgacaagaactccctaatcttctcttctgctcaatgagattttcctcaaacaaggaataacacgtctctgcacgctcttcctttcgaagctcgggtatatcgtcttcctccaagtctttcacatttcctctctttatcaaagaattcaaccaccagaatgataacgtactgaacaatcctgctttagcaaactggctaacccggttatcaaaatcggctttttcgctaaacccatttgaatcaccagcattaagaggctcgtataaactactctcaccagattcatcaaatctatagcctttataagcacttaagagtaacaaaactgacccaggaagtaacaaaacatcaagaattgtcctaactgctaattcatctccaaacacagcattgttcacagataaacaacttgagaccaaaccataaaagaaggagaagatagataacaatctcaacgaagacttgcggattcttgttcctctaacgcaaatgattaagttaatgaataaccatgtaaacccttgaatcagaatgaccagccagaggattaagggcttactgtgattctctcgtaaaacccaaatccctaaaaccaaatctagagatccgatgattccgttgaatagagcagacactagtcgcagacaaaagaattgatgaatccttttgggaggttccttgtgaaacaagcaaatacagagggttaggaatgagagtgtgataccgaaacatatctgtagaaatcgaacagtgcagtttgatgatgtgtggtgattcccgcagaaggaagtccaataattttctatcattttttttctttctgatttctgagaaaaaaaaaaaaacaaattatcagggaatatttttgtactcacttatcctattttctcgtctaatttttctgggcatgcaaaacaagaaggaagatgggggaaaaatatctaagagcgggaaacgaaaggtcgaatcgagagagaagaagaagaagaaaaagaagaatttggtttggtctctgaaaatgaaaaatacgtaagaaaatcgaagaagtactctcaaacttctctgcttttttatggtttaaaatttattgatttggatactgtagaacgggactcaaaacaaaattatgtatattggggaaatattattttatttggattttcttaacagaattattttattagttgatttgatgttttctataatttttggaggatttatctctttaccctaataatagttccataaataaatagatttcagttactttcacttatcactctgacactcgt

SEQ ID NO: 29330 - DNA, 1995 bp, Arabidopsis thaliana landsberg
tgttgttggtgttgttggtgttgttgttgtggttcggaggagaagctgtgagttgtcttcgttttggaggtcggcctctgcctccagaggctaaagcttcggcctcttcgaagacatcctctaagaggctgcagctactacttcttctatgagcaccggaactgttaaggttatgattctgtctctcgttgtctgtgaagttgttgacgttattgaagccatctatttggggaatttggtttgaagggagctgctcttgtttcatggagtaaactgggttggtatgaaatgaggtggaagaaggagtgtaatgggagtgaagaaagcttggggaagaagttgatgtagggtaagaagaagaagaagggtttaaagagaaggaaggagaggaagagtaagggttattagtattgtggtaagtagcggtttgagcggttggggaagggtaaggcaatgtaagaaaggaagtgtaggagtctcttgaaacaggggaaaatggtgcggttgagacgcggttgatgcaattaagaggagtgttagcattgttgtaacgttttgcgaagagtgatgaaggcggttgaaggagaggtggaggtctagggaaagtgaaatttccgttgttgttgttgttgatttgggaacgcgggagggcaaagaggggaagggtcgggtattggttgttgcgaggggaacataaaggagaggaaagtggtggtggaggcggtgtggaagagagttgagatggtgtgtttggagtgtgagggctaagtggatggaggaggttagcagtcgtggtatgaaaagtgaaggatgatgaggagtttgcgtttgctggtgttggagatggaagaggggaagatgatggtgtgtttcgttgtgaagattgtggttgaaaatacatttgttgatgttgttgttgttgttgatgatgatggttatgttgctgttgttgttgatgatgtggatgtggatggagttgatggttagggataatatctggaggataaagaggaagtccttggcgaagaagtcgtttcaatctcgtgttccaatagttcttaatctcgttgtctgttcttcccggtaactataataaattgcatgaagattagttaacgtgtaacgcaggtaacaccaagtatatatgtataagttgttgttatacctgagcagccatgcgagcccatttgttaccaagctgagcatgaagctgaatgatgagacgttcttcgtcaccggtgaaagagccttttttcagatttggtcggaggtgattggcccatcgaagacggcagcttttgccgcaacgagccaaacctgtgtttttctgaacggcgttccaattcccttcaccgttctctctaacgtacgcagcaagtatctcatcttccgccgccgtccatggacctttcttcaatatcactcctccgtctgataagtgattggtggatccaccgtccttccctgctcctcctcctccgtacatgatcatagcttcttcccttgccgattcaagaagagaaagaaacagagtttgtgtttattaacgtcttgttgtgttttggcttatgattggggggatttgagaaaggtaggacccacaaagtgatattcaccccccaagttcggccatcggaaaataattttttttttttttttttttgtactgtgacaaatgatgacaaagagggaaaaacagagaagaggtaactttggtaatttacggtgtaaaattacaacggaaaaaacaagaaaataaaagagatataaataaaaaaagaggagagagagagaagaaattgacagtgtttgtttctctggacacaacacaagtcttcttaagacaactcacaatatcggttgttttttttaaaatttactaatgtttttaatcttctattttaagtaatgacatttgtaacacgcttattttaatatcacattcaacgtgaactatcttcttttttttttttagataattaaccttttaaagag

SEQ ID NO: 29331 - DNA, 685 bp, Arabidopsis thaliana landsberg
  unsure (1)..(685): unsure at all n locations
cagtagaagtctctttgaaaggtttcagctagcaggttgtccaactttgttgttaactgttcaatataggatgcatcctcaaatacgcgacttcccttcaagatatttctaccaaggacgccttacggacagtgaaagtgtttccactgctcctgatgagatttactacaaagattctgtccttaagccttaccttttctttgatatcagccatggacgggaatcccatcgaggtggatcagtatcttatgagaacattgatgaagctcgcttctgtgttggggtgtacttacatctacagagaactctgaagtctttgggtgggggtaaagtctctgttggggtaattaccccatacaaactgcagttgaaatgcctgaaaattgagtttggaaatgctttgagccaagatgaactgcaagagatttatatcaatactgtagacgcgtttcagggtcaagaacgtgatgtcataatcatgtcatgtgtgcgtgcttctaatcacggggttggcttcgnnnnnnnnnnnnnnnnnnnnnntgttgctctcacccgtgcgaaaagggctttatgggtatgatgtctctcgatgcacatacatattgttttggttaaataggtctggtttcattgttaaagattgtatgttatgtttttcttcaaaaggtgatgggaaatgcatctg

SEQ ID NO: 29332 - DNA, 1317 bp, Arabidopsis thaliana landsberg
ctcttctcaaatgatatcaaattcacatgtgattctaagctaatttgttcacatttattctagtagagcacaatgtgtgtgcgtgtgtgagagagaaatgggagaaagccaagcattctatagaggttgaagcaaacctgggaatcctctctaacacgtaagttttggcctgttggatccagtaaatcatttatcacctgatacaaagacggttatcagataaactgcggatatctgaaacatagaagcacacatgtaaaaccaagaagatcatgaacagtcacccaattctctatatttttaagcattctagttctcaaagataaggcagaagaactagaaaacatatcccaatctaaaaatatctacttttcagggattaccaagtaaatatatcaaggataaaaagttccacttacctcattgtatatttcaagatatgaaacacggagcaggaactcccttcctggagtctgaaatataaaaatgtagccagttagcgagcatgaaatcatataaaaaagtcgtgatgagatgagaaaagacatgaaccccgttaagaccacttacatcctggatgatactgaacacgtcttttattgctagcggtatgatcccaggagattcttgatcaccctatgcatattgcaaaagcaaccaatggcagaacaaaaagaacatcagatttaggttctacttgtttggacgggaactaaagacccaacgtagctacttcactaaagataagcacagccaatctaaatgaagaccttcaaattccattcatacgaggatttccaactcacataaccatcaccaattaatgatggcaagttggtatttgtatggtatcttttgctaccatgtaaatgtttagagtaacccagaataaccagcagataccaaagggggaccaagttgaagaagagatcccaattcatagcacatgtgttttgaagaaaaactagagagaaaggcgtataaggattcttcttttttaaaacccttacatgcattgtatgtgtctttccactgctagtaacaccgtaagcaaaaacggttcctgtcaaaattccaaccctgagtcagaaaatatgttgcaagcaatactacttgcggaccaattggtttagaggatatttctatataaaagatacagattttggtaaagctgaattttgcagcaatgttacttaccgttaacaccttccattgctgccttgactactggtctcgcagctacatcataaacgtcaatagtagttgcctgtggtccaaaaactttatctggcataaaacaaatttgaaaacattcac

SEQ ID NO: 29333 - DNA, 1461 bp, Arabidopsis thaliana landsberg
  unsure (1)..(1461): unsure at all n locations
tactgtacttttaagaaaatctcaacatgggacgattgttttttactcaatttgcactctcacatgcatcgttcaggaatctgtcgaagaatggcgacaaacggaatcaacattgaccacgtgttcagcacatgatccttaattcaacgattttcaacttacaaacaactcacctctacttttttcagattccttttttttttcttaattaagatcaatagtctttatcatcgacggttcgaatcgtgtaactcaatgaatcttaagctcatacaatctttacttgcaagtcttttttcacaacctaactttaggttaagaaaaaattaatcttataacattgatgttcaacaatagttttatttttgccaaatcaaatcacctactatttattaaaaccaaaagaaaaaaaaaaattcacctatatctgtattattgttttactatgccaaatcaaatcacctatattaaaaaccaaacgaatagaaaaagccccacctatatatatacatcttaccaaactagagtttttaagaaatgaaatcacctctaataactaaggtaaatatctaagcattcggttcatacatatcttaacatttatacaatcttggtctactcaagaaatccagtttgcttcaatattgcattccttactttgctcaaatctcttcctttcagttttcttccaactccttccataactgaagacgacgatgatgatcgactgcgccgcaggaaatattcctccggtgacacattctcatcatcaacaactttctttgtcttctttctttgaaccattgaccaatcagggacattgacagggaccgactgttgtctcataggtgccattccttctgtcctctgcctctcaggaatcattctaggttcgcttggaagtaaagtttgggttgagaaagaaggtttagtcgtatggttactactaatcataaacggtgattgatatccatcaagaacatcccacacatcatcttcttgaaaatctccatctccccatagctcatgcttcatgtagctcttctccattgatactcacctgcttctacaaaacataacatgacgaccaagaaagatcttcgattaaacaaaaactctgagctagccagtagtcacaaaatcgcaaaagagacaagaatgtaagagagaatctacgtacgaacgtaccttttgacgtttgattaaaatgaagcttaaaataatattctgagattataaagagtggaatctgtgccaagagaagcaaaatagcttcaaattttgagaagagaaaggaagaaagtgacacaagaggtgtgggattgaagaacgaatacgtagattggttcttattttgtctttatagatatgatccaaagacgtgggaatctatattcattattcgttcgctcatttatatgatcatcagtatntggtgcgttctgcatagtgatgagttta

SEQ ID NO: 29334 - DNA, 652 bp, Arabidopsis thaliana landsberg
tactatatacaaagagttccagcttttcttgctaatcactgtcgcagggagctgtttaggatcaccgaccagtacacatcgcgcagcaccaagagcaaggggaggaagaactccaacctcactagcttgggcagcctcgtcaatgacaaccatatcgaagccatgggtaagacgagaaaacagtttacgaccactgcttgatacagtggtaaaaacaatttcagcctcatttgcaaaacttgcctcaagactcgctcgtgcttcctcaagattaaaattgttaccagcacgaaactttccctccacaataagaaggcgagatatttcaacaagtactttatctctggcttcaaccaccgcagcaaggtgctgtaacaatgcatctcttttctggtctcttgaaataaggacttcaggatcaactccaacagatccctgagaacgtgtagcaaaagctgcagcattaagttcccttttaagtccagctatattttgagaaatctgtgtttcttgtagtctgaggttacgcatgtgtcgtagaatctcgtcgcgggatatagctaatagctgatcacttcttcgctccacagaaactgcttgagcagctcgcgattgagaatcacaccgactcgagcaacatcgggacgatata

SEQ ID NO: 29335 - DNA, 1859 bp, Arabidopsis thaliana landsberg
  unsure (1)..(1859): unsure at all n locations
ttttttcatccatgcaaaatacagcagacagtgtcaaacatcaaacttcgagagtttcaataaatggcaacaagatttgcataatgagactaggaatcattcagatagatattcttgaatcaaaacttcactaaaattatagtctagacagtttcattactaacggggaagataaagagcttcactcacaccattcacaccctttcaaaaggtcatcaactagacaacaacattttcatacaaccaacaagatagtaaaagactcacgtgatgaaaaaacacaatgaaaaagtggaaacaatcaaaagtcagctttttcttttcttggcaaacaaaaactttcatcaaatcttattagcaaagcaaatccaagtagtattgcgtaagtaagatatgaaagatgaaaactttgattcttcagtttgaaaacataccttaagctgcttcggctcctaatactgttgttgctactgctactaccactcctctttgtgctcgattcagacattctattccaccattctttatcctctactttcacagtctcctcagagatcgaaggtctcggtgaaaccttacaagcctcatcctttttcttcttcttcttcttcttagtcgtatccttcatagctcctaaactaaccagaaacataattttgagaagaaacccactattatttcctcctccactcctattcggatcaacccgtttatcactcttcgtcttcctcacaactttactctgcctatttgctctcttaggcaattcatcgaacaccttccgttcattctcttgattcaccttaacttcaacaagatccttcaatgaaagctcgtaacacgactcaggcatcttactaaccatcgacttggatcagagacgacgcgtgatgatgatgatcacaaatcgttcaatcgccctccggagttcacaagagaagagcgaaaaaatgaattgtggaatgaaaaaaaaacacgaggaaaataaaattgttttgtcaaaacgcggagccaatgataaatggccacgtatgcgcaccttaagatcagaaaaaactctaaaactaggtgcgaacctaagcttaatcacaatttaaatttattttttgccaaaattattcaagaatttcacttaagaaactcttaaggtcttcccaatggacctgctcttagattcatttctatattctaaaaaattataaaccggttaggatcaaaacgatgggcttaacatagctccataggcctaatagtaagttgttcccccactgaattgaattagaaccaaataagtgctaaaccgatggtacaattttaaaaaaaaatcatcgtgaatacggaggcggcctaattaatttacaaaacggcgtccgtcttcaatagtaatgggcctgtgaggcctttttatccccttcttaaaaaacgacggcgttacactactctaattccgactaaggacgccgtgtcggagtcgtcagattcgaaaaacatacaaaaccaagtcgaagcttttaaaaccctaaatccccaaatcgggaactgagattccgattcgaagatgtcgtcgtcttctccgagtggaagcggtagtgatttgactgagagaagagggatccctgccgccaaattcatccaagatgtggagacttatctctctcagtctggtctcgatcctaactctgctctcgcctttcaccaagaaaggtttctcctctttctagttctcattttcactctgaaagtctactcattnatctgagtttgttcttcttaagctcaaatcccagatctcctacggatttataatcaatggaatccaaaatcattacttgcgcataatcctttatgggttctctttc

SEQ ID NO: 29336 - DNA, 1287 bp, Arabidopsis thaliana landsberg
  unsure (1)..(1287): unsure at all n locations
tacaaaggtcgtctagagaccacaggacaggtgaagttcgtaaattgaatttaatgtttcataatcaagattcgtcttctaattggatttaatattttgcagatagtagctgttaaacagcttgatcgaaacggtctacaaggaaacagagagtttcttgtagaggttcttatgctgagccttctgcatcatcccaatcttgtgaatttgattggttattgtgctgatggggaccagcgtcttcttgtgtatgagtatatgccactaggatcattggaggatcatctacacggtatgcttagtgatatttccccactcttaacatggaattgcattattttccataagatatgaaaccttagcatttttatttgaaactaccatggaccgaatctgtggcaccgtctactgtattgtagaaggatgctttgttgtatttgatatattgggaaagtcttttttacttttcttaatctgttcttccaaagctatttatggtgaataaatggaaatattagcttgtaatagttctatcaagtgcatgtaacgattaaaactttgattttcagatcttccacctgataaagagcctctagactggagtactagaatgacaatagcggcaggagcagcaaagggnnnnnnnnnnnnnnnnnnnnnnnnnnnnnngcctgtgatctacagagacctgaaatcatccaacattcttctcggtgatggctatcacccaaagttatctgattttgggttagctaagttaggtcccgtgggcgataaaacacatgtgtcaactcgtgtgatgggcacatatggttattgtgcaccggaatatgccatgacagggcaactcacattgaaatccgatgtttatagctttggggttgtgtttctcgagctcatcacgggtcgaaaagctattgataatgctcgagcacccggagagcacaaccttgtcgcatgggtatgttactcaactttttcttatatcaccaaaagggaaaaatcacaattttttttgcgctctcatgtgatatagtcaatgtttgggatctgaaaacgtctttactgacttgaactgttttgggggttctctgtcacttgttggtctttgcttggctatacaggctaggccgttgttcaaagatcgtagaaagtttccgaagatggcggatccatcgctgcaagggcggtatccaatgcgtggtctatatcaagcacttgcagttgcagcaatgtgtttacaggaacaagcagcgacaagaccactgatggcgacgtggtacagct

SEQ ID NO: 29337 - DNA, 4169 bp, Arabidopsis thaliana landsberg
tatgtagctaaaccattcatgtcgttgtgttatttgtaagcatttgtaacgaaattatgaatgaacttgtgttctttatgcatccagggaagcgtgtgttaactgtgtggacttgtgcaagagaaagaacgaggatagaatgtgggtggaccaaatcactgctatgcaagcatttcctaggcctgaattaacgttcatgggtgactctgggatcgtactcgctggtgaagagaatgatttgttgaatgctacaaacgtaaagcatggaaactctatggatgcctcgagccagggtagctttgagactggccaaggtccttattaaaattaattcttatttattcattagatgatgcttgcatttggtttcttttcggttggtaactaaagctgaattaactgtattgtgcagaagggagagctcaaatggcaatgccgtggccaaaccagtttcctcagtacatgcagaactttcaaggacatgggtatccgcctccttatatgtttccggggatgcaaggtcaatcaccatatttccatgggaatatgcaatggcctgtaaacatgggagatgtggagtcaaatgagaagtcttccaagaagaaaaagaagaagaagaagaataagaagaagtcgaagcaagatgaatctgccgaaccaagcaataattccagtactgagaccgaatcagaagacggaaatgaaggaaagaaacaatccaggaaagtggttatccgcaacataaattatataacttcaaagaggaatggagcgaaggagagtgattcagatgagtctggagaagaagaagggtttgtggatggagattctattaagcagcaagtagaagaagccattggctcagtggagagacgtcataaatcgacttcacaccgtcagaggaaacacaaaagtcacaacggtgatgatgattcaagtaacaaggaaactaaggggaatgataattgggatgccttccagaatcttcttttgaaagacaatgattcagagccagaagaattactacgtatatcatcaactgcgttaaatatggcgtctgaagttgtgagaaagagagaaccgccttctgatgattcattcttggttgcaaatggaaatgaggattggggaagagaaaccagcattgagaaattcaatgcaggtgagaatgttcggataataaggaaagggaacaactatgacgaggagatgttgaatccgggtagaagcgatgaatcaagaagctattctcaggcagagatgtcggttcatgatgggaagctcagaaccagaaatgaggcgagaagaagactggttcatacgtaaccaagctggtccagaaacagatccaagtcttgtcaaaacatttgtaggagaccatttccacttaaataagagcagtgagagagatgtcctgaccgatgactctttcatgatccattctcgtgttgagaaccaagtagaagattctcggttaaggacagaaatcatggacttagacgtttacggaaccacccaacaagaaaacagtgccccggagaacactccgcatgaaccagatgacctatacatggttcttggacgggaacaagatgttaaacctacattgttaccatggacccctgaaattgactttgagactaacactttggctcaaagaacaagcagaatcgatttgataactgccacaaaggcctctgcaggtgaacaaaccttagatggtaaagaaaagaagagtcgtggtaactccaaggggaaggatgcaaagtcaagagcatcaagtagacctgacccggcgtcaaaagccaagagacctgcttggggaagtagagctgctgtctccaagtccaaatccgagatggtaagttccgtaaccgcttttcgtctttcttgattagtttccttctctcatctggatttggttttttgataggaggaagagagaaagaagagaatggaggaacttttaattcagaggcaaaagagaattgcggagaagagttccggtggtagtgtatcaagttctttagcgtccaagaaaactcctactgtgaccaagtcagtgaagagctcgataaagaatgagaagactcctgaagccgcgcagtcaaaggctaagccagtactgagaagttccaccattgagcgccttgctgttgctcggaccgctccaaaggagccacagcaaaaaccagtaatcaaaagaacatcaaaaccttcaggatacaagacagagaaagctcaggaaaagaaatcgagtaaaataggtcaatccgatgcgaaaagtgtggaactttctcgtgacccgagtctcgaaatcaaggaaacggtggtggaagattcacattcttacttgtcagagaagcaagttgatgcacttcctgctgttgcttctgttgatgatttcaaagacattaaagaattgcatagcttgccatcagaagaaacggccagagtaaagaacagaccgaatgaaatcatagcagagaaagtacaagatcagacgatgatcgatgatcaggaaacagtgaagaatacatctgtttctgaagataagcaaatcaccacgaagcattactcagaggatgttggagaagtccaggcttcacaggaaaaaccggtgtctccaaagaagtcggtgactttttcagagacaaacatggaggagaagtattatttctcaccagcggtctcagagattgacatctcaacgccacctgctactgaagcagatcattcgaggaagaaatggaacagtgaagagacgtctcccaaggcaacggctaaagtcttcaggaagcttcttatgttcggaaggaaaaagtaaaaccgacgttggaattcttcttctccggcatcatcgaacctttgttttgagacgacgtcatgttgagttcagttaaaaagcctctcttattctttaaatttttccttgtgtgatattaaatactgtttttcattttactgctgtcatcagtctgatttgtctgtttatattacatttgttgatgtgttgtttatagcattgaaagtgggcatttgagtgtgtataaaaaattggtttggtgagttgaataatgtaagaatcttttgtatttttctaattaaactgtttatgatcattaggagaacaatatatggggatgtgttggaatcatgaatcctaggttaaatcctacaagaggaaaagcttcaggagacagagaagatgaagagaagagaagaaaggaagaagaagaagaagtcgtgacaaagaaagtcagctaatagacatatctccgctatttaaagtcgagtctaagcctttatacacttaaaggctgagggttcgaacccttgttatgtctttttgccctaaaagaaaaaaactttctcatgaaattccgtgagatgattcttccattctaagcatttggttctgttagattgataaagaagtctcctacagtaccaaggcaatgtgccatccatctacaatttgtataactatatcttttggtaacatgttcccatcaagtgggaatctaattcccctgttattcttttcacgttctaagcatttttcaagctgtttaccattttgaaacttagtaacgatcaaaaagaataagggatttcgtcacgtaaattaaatagaatctgtatacaggtcatttaaaaaaaatattttagtaagatacgcaggcacagctcaacgtctgatcttggtttgtcataaacagcagagaattctaccacaaggaagctctggtactatctttctcattaagcatccgtgacatcagtattagtctgtttattaaataaacttttccatgatgcaaaagtaccttttattaaacactacgaataaataaataaaggtgaaacacccatttcaaagaaatggtaacgtgtctttttcattaggcgagactagccaatctaagcaaacagagtcgtctttatatctaaacgaacattttgtgaaagaaagagagactaaggtgaatccatggcgtccaagattgtctcagccatagtatttgtgtttaacctcattgcctttggtttagccgttgctgctgaacaaagaagaagcactgtgagtcacatctccacagcgatatctaatttgaacaagatgataattatgtgatctatcctaatattttggagttaaatatttt

SEQ ID NO: 29338 - DNA, 1121 bp, Arabidopsis thaliana landsberg
atgtactttcaagttgcatttgtcagaaattagtgttttttatttagtgtttactaacaaattgaagatgtgatttgtgtgtactgataagcgtaatttgtatcaggctatagtgaacaaggttttggtcgccaacctgataatttccaaccatctgaggcatcgccaatccctggagcatttgtgcctgggttgacacggaacgaggggactatcccaggaataggaatagcaatgccatttgatgcatcctctcaaggggatcataaacagcctcttccaggttccatggcactgggggctcctcctttgccacctggtccccacccatcgcttcttggaagtggccagcagcaagggtatcagcaacaacaacaacaccaaggtcatccccagcaaatgcttccaatgcccaatatgcctcaccatcagctaccaccatcatctcatatgccattgcaccctcatcatcttccccggcctatgcaaatgcctcctcacggtcacatgccacctccctcaatgcctatgtctcatcagatgcctggatcaatggtatggccctcagatctcttgtaattcaaccacaacttaagcctgacttttgtcggtaccccatgtgttggattcctctttgttttattttcttagtgatatcttagagaggtgtagaaagagatattaatcctcacttgttgttggagtagggaatgcaaggtggcatgaatcctcagatgtcgcaaagtcattttatgggtgctccttcaggagtatttcaaggacaaccaaacagtggcggaccccaaatgtatccccaaggacgtggtggtttcaaccgtccacagatgattccaggctacaacaaccctttccaacaggtcccatttaaacactagtcttttgttatttagtatacccgtaaaggtttcacatgtatatatgtgcaaataggcaaaatgtctacacaacaatgcaaaacacctgatacgattgaaccacaatacaactttttcagctagttttaaactcactagctaggtacaatggtatgattagatgttgaaaatgtagagctaaaatagcataatccgttgactaatccgttgtctatacgttagagc

SEQ ID NO: 29339 - DNA, 2587 bp, Arabidopsis thaliana landsberg
  unsure (1)..(2587): unsure at all n locations
aaaaaaatagattttcttcattcttgttggagactcttagtctctatgatcttcatggtcaatgtttttgaatgattcaacaaaaaccctaatttctccaaattccaaaacccagaattccagaaacagtagaaactcaattccatgaaagggaaaaaagtgtatcgtatctttaggtggactcgagtatagacgattacacaagtgggacccaactaatcataagattgacgacgtggcctactaatacgaggtttttatctcttccgtacacgtggcataatatcggacggactaatttagatagacgattaaaaaaaaaaatcaagcaaaacaatcagattttttttttcccgctatgttgttgactctctctcctaaaaccctatcttcttcttccttcttcactgtgcacaaatcgcaaaaccctaaatgtaaatctccagattcatgtcgattcaagagcttgaaatgtagttttgatcgaattttagtgaaatccgaggttcaaattgagaggaatctcgaatttgaaacgggagagacatttttccgccatgaaagcgctagaggacgagacctcggtgttttgtcagcgacgctacacaagagatctaatggaagcttacgggtactcgacgcaatgtgcggatgtggaattaggtcgcttcgttatcttgtggaagctgaagctgatttcgtgatggcgaacgacgcaaatgatgataatcggagagtgattacggataatttgagtaaagtagagagaggtactggagatgagaggagatgggttgtgactcatatgttggctaataaagcgatgattgagagatatatggttgcggatttcttcgatatgattgatattgattcgtttggaagtgattcttcgtttttgagagatgcgtttaatgcattgagattgggtggtttgctttacttgacgtcgactgatggttactcttctggtggtcacagaccttataagtgagtgaaagcaataccattagtctttgtggtattttaggaatcatgatatgatttagggactaggagattgaaagttgaaaaatttcttggtttgttttggtgtagttctttagcagcttatggagcatttattcgaccaatgccgtttgggaatgagattgggctgcggatgcttataggtggagcagtgagagaagctgctctgcttggttatcatgttacgcctcttttctcgtactattcttatcacggacctgtgtttagagtcatgctgagggttcaccgtgggaagctacatgaggacaggttgtttctacatttagaatttgactcgaaaggaattgagttttggttatgttgcgtttctaattggagttgttttgtgtcttttaactgtaggaactatggttttgtcacgcactgtaatctatgtggccattctcatacattgagattcgatgaacttggtttgatgggatgtccctgcagtgatacaaaggcttcttcttcactggttgtgtcaggaccaatgtggctcggaccgcttcatgatgcatcctatgttacggaaatgctggaattggcaaaggaatggggatgggnnnnnnnnnnnnnnnnnnnnnnnnnnnnnnngcttctcagtataatgattgaagaaagtgatcccagactaccacctggatacacaaaaatggatgaggtcctctaaaaccatgattttaatttcattgataagatagacgcatttcattcacattacatgataaaagatttgtttttgtgattagatggcgagccgtgcgaagatgaactcacctccgttgaagaagatgatgagtgcactagttaaggtaaatagtagttagattctcacagctttgatctctgaagaaactgatctgaaggtacaaagttaaaaagctctgctccttggatttttgcaggagggttacgctgctagcagatctcacattattcccaatgctcttaaaacagattgtcccatgtcccattttgttaggattgccaaggaaaatttgcatagttaactttttgttataatcaagtttagagatttttttaagcctgtgattatactttacaaagcaatcatacccaacactcgactatattatttgttgctttatgctaagtagggagatacaagtacttagcatcgcttaagaacgagcgaagcttcggtcattaaaaatttctctgaaaagaaggtatgaagttgcaaaaatcaaaaaagaggaaaaatcttggtcaaatcaactggtaaaatggtctgaaacgtttaaagctccaatatggcgaaatcatctttaacaaaatgtagaaaacatcttcaaaaatttcagacaaaagagagattgaaactagaatataagaagtttcggattgccagcttcttgaagtcttcaggcacgaggagcagcaggagcaccaccggcagggcgaggagcctgaccaggttgtgcaggcttgggtgtatcctcctgagaattaatcatttttgagacaattcagaaaaaaagcttgcaacataacattaaagaagctacattcaccatcaaaacaaaacgtagca

SEQ ID NO: 29340 - DNA, 3452 bp, Arabidopsis thaliana landsberg
  unsure (1)..(3452): unsure at all n locations
aagatggaaaagatgtgcactgtgaaagatgtagcaccgaagaagccagtctcggggactgctttctttacgctctgggatggattcaacagcagcaaatgtggagtcgccgtctttcttcagaactcttctcttcagatttttggtacacagagttttaaattacctgatgagatttgagttaatttccctaatatctgaaaaataaagaaaagaaaaccgatctttgtatcgtccatattttgcttgtgataatcattcgggttccactctgcttttgtacagttataaatgtgtgactacttataacttaatagggtttaaggtttcttctaatttgtttttatttcaactcatattatcctaacctttctcttctcatgctacttcatttgatttctttttaagttaaacccttttttagttaatcagtatgtcaaagttccattccacgaatcttggtcctgataaatgttgggatgcatgaaacagtctagttgtttataaaaccctaaaccctttttattgttttttttgtaaatttacctcaatctttaaaacctgtgtgatgaaatttgatccaatccttgaaagtggtttggtatcctacttttgagtacaagtaaatgaacttcatttgaattcctcagtaacgacatcgttttgacgcttagttattgaaacgacgtcgtttaaaattttaggataatttatttttgaaaataaatctgaaagcagagtgatatgttcgttcttattgccgatgaaatctctaatatgctccctgagtaatacctttgatgcacaaacgcgggaaatgaccttcattgtcccaacaccaaaacccaaatccatcaggaagctgagtgaatcagaaaatggtgtcaaagctttctcttttccgagccaattcacttccttttccagtcatctcttcctactctgctcgttttatccttaaaccctatcccaaacctaaaacccttatcttctgtgtcttctccagtaatctctcctccaccacctttccgtatggcccgtctcttctgaaaggaaagaagcctgtgctagatgatattagattagcttcaattggtcgagacagagatgcccatcgaggcaaaattggagagtttgatgaatcaattgagaaagatgttcttttgaatgaagatgaatttactagggtttttgagatttcggcgattcgagtcccggcgaaggattgtttcgcgctcgagaatcgtctccgtggtcatcttcttaattggcctaggattcggaacattgctagggttcctggagatgagattgaagaagatgtggtgaagctgttgggccgtgagactgatgaagaagaagaagatgaagatagtgttgtggattcggttaaccggagaataagagggaaagcagaaggggatggggagagattgagttcagtgttgcatagagataaactcgccaggacatttaattcaactgggtatctcaaattcagaaacttggccaagatttctcggccaaagaggaagaggaagacagagagaacaagggaggggaaggaaaagtaaatagcaagcagacgcaccgaaatggcggtggtggaagtggtggaaactcgaggaggagaaaaggattttgaggggttattgggagaaggctatggtagtagaggaagatggagaggttcaacaagattgttgcttttggatgagaaatattccggtgaggaagttcaagacttgcctgaggctatcaaggttagaaatcttctctgaatccactcatctggtttgatccagtagtttatgttgtgttgttggagaatctttatggtttctgtttggtaggttctgtttgcagaagctaaannnnnnnnnnnnnnnnnnngtttcgagctagtgaaatgcagactgactttgttctatgactattggccaatgattgaggtaaatgatgagactttcaagctgactttattttctcttgaagatcagatcgagttggtttgcttcaaagtgtgttgttgttgtagatattggaggctgtactacctaagggtatgattgtgccttcggcatttgagatggtggggcatattgcgcatctgaacctaagagatgagcatctaccatacaaaaggctcatagctaaggtaatgtgacagtggacaactggacattgctcaagtctgtaaccaaattttcccagcttcagaaattgaagtctagtgagctgagttgttattttctgtttcttttcaggtagtcctggacaagaatcagccaaagatacaaaccgttgtgaataagattgatcctatccacaatgacttcagaactatgcagctagaggttttagctggaaaccattcgctggtgactctagttgttgaaaatggactgcgctttcatgttgatttagctagagtgtatgtaaattctttctcattgaaatgccaattatagtatgcatgcttttattgagtgctttgatgatgacccaaataccatttaccatttgaaattagcccttaccctacttaattcggtgatgaaagtagctttgtgtaagatgtctgatatcagttttgagttttcagtcagaggagaaatgttgtctacttttgacttagaaaacatgttcttaccaaatctcgtatcatgtgatttagcgatatatctgcttataagttgacgtttttggcattttttgcgtgtgctagatattggaattcgaaacttgggacagaaagacagaggctgctactcgggttcgaccaaaatgacgttgtctgtatgtttgctacttagaactgatacatcatgaaaattattgctatgccctctattgaactccccatttataaattagcaccactgatctcctcattaaaaagtgcattgtccctcctattggtgttgaaatttgctgttctccgttgtataagaagcatatgtagcggccagatagataatacattgattgtattattgttattgctagtctggagttctcttttctgtcttgtttcaagttttgtctatgtcttgttctgtttagttacctacgctgtcgttttgacaggtgatgtttttgctggagttggtcctatcgcacttgctgcagcaagaattgtaaaacgtctatatgccaatgacctgaatcctcatgcagtagaatttatggtacagcatagcgttgtcaataagctcgagaagagaattgaggtaagtacgaattctacacaccttgtttcatacttcaatcgatttgtagaattataaatcttctcatctatgtctagatctttaacatggacggactacgattcataaagcctatgttttcaagcgaataaggtctcgggtacaacctagtagtctttaatttcccaaaagatgctggtgagtctctagccttcgaatatgactccatgacatgtgtct

SEQ ID NO: 29341 - DNA, 1310 bp, Arabidopsis thaliana landsberg
agaaatttactggccagggatctatccaggattcttcaagctctttacgcattgataccttatttcatattttcaccccaagaaggttgtagaagttctgtattctcggccacagatcctcagattccagagtactgggaaacactaaaaaacgatgattggcctgtttgcccattcatctctcaagattgccgccctgcaaatccttccgaagaagcacacaacacagaaactgcacagagagtgtgggaaaagacgttagagctggtgggtcttcctctcgatgcagttgagaagctcatagaaggggaaaatatccaatgccggtatggagcacaacacgaatagtctttcaaaattaccacagcgttaagtgacccattacagatcaaagggtaggtaattgagaaaatatcttttttttttgtttccttgtattaatctacacgatacagtggggaatgaatcccccaggcatgtagtttgcttgagaatgtttgattgttggataaaagtcaagctttagctaccattccattgcttttacttacaagtcttgttcaagtatttggttagtgtgtcttggagttattaagatgttcagtagtagagtatggtagcctgggttggtgggtagtttcttgtttgagtttagggtattttcgtaattttctttattgtttgtggagtcacgttgctcatatatagttatagggatatatatcaattagagtcatcatctctcttactctcatggtgacaaagtcacaaaagtgataaactctcctttccactttctaatgtttcttgcttaaatgagtattccatgtaaaaatgattcactcactcgtatgggtgggttgggttttctcttcatgagatgctcatttgagcaagcaatgtttggaagtgggactatttaatatcatgtatgagttttatcttttgttataagaaaaaaagttgggatttcattttcgtgcccacttcacgtgaatctaatgccttcaagtttgtggtctaccttattttctcttatggatacatgtcaatttacgtgtcgtatgagtcaagcctttaatcatcccaacaccatgcacgtcttctagatttgttttcgaccacgattccaccacaaaatttgacattgttattgaattcattaacttttttacgtgttattgtgaaatatttatttaattttgttgggtaaaggagcaaataagattatggtgcaacacgttgacttctttcccaattagacccatatgtgatctgtcgtcactcgtcgccaagtttttttatgtgtc

SEQ ID NO: 29342 - DNA, 2500 bp, Arabidopsis thaliana landsberg
acgtctgtaagatgtcagattacaacgatgaggctagggttcctctcagcggctcgtctacaacgaacgatgcttctcgaacgagacaaaggtatcaactttcattggttaaccaagccaattatcagcttcatctgatccattttcttgtgaaattgacattgagttttaaccattcgattcgtgcccttctttggattgttacttcaactactttgattttggttttggaatctcttttgtgaataaagcttttggcttttttgatttttgtctctgaatcctcatggttaggctatggtatggtaatctctagcctcttaattaattctgaactgatagagaatcttatgaattgtgaataaagatcggggcttgtttgcttttggctctgaaacctcatgttaaggctctatgctcatctttctagtctcttaatcaattttgcttctttagtttttaactgagaaaattctatgaattatgaataaagattgtggctttgtttggttttggctctgtcccttatgtttaggctatgttcatctctaatttctaacctgtttgcatctgtagttgttaactgatagagaattttataatttgggtggcaggagaaagagaaagtgggatcagccatcggagcaacttgttgcggctggagttgcgtttcctcagttacttcctttaggcaacactatgaatgttccttctatgtcaccattgctccaaacgctttcggtgcctctagcagttccaaaagttaatcaagtaaatgactcttacgctcttgcggtgtttgttatacttattttcgggtctaacctttttctcacttagctattgcattatgtactatggtatagatgatatgtcatgttttcatctagtttggtgtcttgatgtatgttcttagtgaattgtaataccttcttaaaattgttgcatcacttgaatcatgttgtcccatgattagtagttttaccatgtattggtccagttccctctggtcatgtatgagactccacaagcacccgaaatatactgtgtttgtgactttaacattattgcctttatactgaacgagctgtttttcgtggatacgtcttttgtctccttttatcctgtaattcaaacatggtgattcgttgtaatttttcttgcatgtggtatctagcctaaaatccaggatgaggtgatcatagctcgagaaattgttatcaacgatgctgaggcttctcttaggcacaggcttaccaaacgctcaactcaagaagatgtatgtgtaactttgctatgcgtattagttacacttttcctatctctagtttaacttctattcgtcgtgcagattcagaggtctaccggtgctgtggtgattactaggtttgtacaacatccaactcatggagaagaaagtcttacaataatctttctagattcaattgtttaacttcttttgtaggggcaagtatcgtcctccaaatgcacctcctgatggtgaaaagccattatatcttcacatatctgccgctgcccaggtttgttatcctttttggcctaaaggatagactctataatatggcagaaagtaaaacgtttgtggcttaaagaaattcccatattcatatttgagaagctttatttgaccgcctagctttgagatgttggcctggtttttacgtatgttattgcagttaaaagagactacagaacgtatcttagcagttgatcgtgcagcagctatgattgaggagatgatgaaacagaaatcaatttcacagatcggatcagttggtttacagacggtcaaggtatatactgcgtgacacttcttttttgtagttatgaaattggaacagtaagaaattaaaccatatttccagatgctgagcacatgcgtatatttgggtttcgaagctgacccatcatctaatgttgctgctcgtattcgtgggcataatgtgagtcttccttcaatatctcccccctgctttctttctaatttacaccaaaagaattgaatctacagtctaatatcaatcaagagaagggttagccatttggtgttaggttttcatctttgattaatagttgcacttttttttatttgtctcaatccatgaattcgagagattctaatgttgaagctctctctgacatctccgtgcaatcgggagagaactttttttgtgttggtggtggttggctttcgtacatgcaggatcagtatataaatcacattatgaatgaaacaggagcaactgttgtattaagagggcgtggttcagcaagccttgagaatcaacatggagatggtaatatttccttcgtttgtgtttttatttgcctacttatgaaggtgttatttacctcaaggcggatgtatctgaatgatattgttaatgtaaatccctttaacgcattatggtagaagcacagctaccgctgcatatattattatccggcagcaacccaaagagcatcgacgatgcagaac

SEQ ID NO: 29343 - DNA, 1434 bp, Arabidopsis thaliana landsberg
gaaatgtatgcattcaacgagctacagcaggaagggctggaacagccacattacggcaagccttgatcacttccgttggctccttaaattccaacgggcaagctgttacacaaatgtacagtcagaataatttccaagactatccaagggagattgatgcgagagataatatgatacagctaagtacctttgttaactttgcaggacgataaaattctaaatgcagtgtttgctttgtctgcgggaagcttcctggaaagatatgaaaacaccacatttttgcagtcgttaattgcgttgacgttatttgatcctgctaaagggatcttatcaccaactgtcatttggtgtcccgaaataattagcgcagcttccataattgcaggttggcaaattggcctacaacactccttcagaggatcaactgtgcgacaggcatccagtaatttgctactgttaacaactttctggaacgttgtgacatctgttactggacaggaacctccagttagatttgacgatgttacagagcaaagtgcaggtattgttatgtttgctcttctgctgaccaggatgcgtagacgatgtctgaaaaacaatctgtagcaactgcatcaggcagaaccaacttattcgacttcacgtcgtgctgtccttggaatatatgaagtaagctaacaaactgcggacaacatatcacgttcccaacaagtgcagcgaatgggtgggaacaatcagaagctgcggtatcgataacacttgaaattgcttgaaagtctgtaggacatttgccagttaacttgggctcatatgtatcaggaaaagtagggtacattggtggtgtccaaggtagagcaggggatgcatatttggggattacggacggtgatacttgaatgggaccagatactccaataccaggtggatttgccaattcagaggttgtggatctgctactatgctcattaagcttatcatgcgcagctacatcttggaagcttgataaccagataataaataacaagaagcgataaaccaagcagcctgataagagaagaaagtaacacatcaacaaacagctttatatattttcgtattccaggaaatcatttatgaaaccacgttattgcgatcacagagttggaatttagttagaagaatgtctctccaagaaacaagaacttttcttatgagcgaaacctgaaatgtgtaatgctgttgcttggggaaaacattgctaacataaaactattaaactcattccaacaagtctataaacataattcatcattgcagtgaactatggaaacccaaaaacagagcgtgaaactactctcatgattctcgttagccgcaaataaacataggcttcaactcatttgtatccaccatacaaattagaattcaaactcaacatgcaagaaactaaactta

SEQ ID NO: 29344 - DNA, 2993 bp, Arabidopsis thaliana landsberg
  unsure (1)..(2993): unsure at all n locations
cctgtcatgaatcgaataagatgggttttggaccaacaaaaatgaaagcttcgtagctgaattatttttagtacaaagtttactttacctatagacatagtttaccataatgcctccactttgacgaatacctttctctgatcgatccgccatccaatttattctttcaaccatctatgtaacgtatcaaaacatgaaagcttatcaatctcaatcactctattaactaaaacctatcgtcattcactggacttaccgctccattttgcaagtggaagttagcaacagagtctaaagcttttcctctcttcttctcttgcaagaggtacctatcaaaatcaagaaagaccattgaaagttatgcctatatgattcatatataaccattacatctcctccaagaatgaacatacctagcacataaccgcataagaataggttctaaaactggtaataggcgaggcgaagtagcccaatcgcagttctttactgatagcaaattcaatagaacttccataccgttgctaccggatgaagattcactgcataaaaagatcactgagttgatgacttgaacttgattttctatataacagataagaacataagggcatgaagaaaatcttactctgatagagtcatgagggcatgttcctcttctggtagtaatactttctcgctaaacgtagatgaaggcgaattgctctgtgtaccacgctcatcttcagcaaatcttgactgagatgataacttcgagaggagccattgcatgaatccaggaatggggctaagtgttgcatatgtctgcaacaaaaagaannnnnnnnnnnnnnnnnnnnacacaaacttttagacctgtaacaagatttgcatacaaattagtcaaagtactcacagaaacatgtggcatgtcttttttcaccaacgtaatcactcgtttgatcagaaattttccgaggtttatcccagctaagccaggctgcaaatacataagacagaagtcataaagccatagctttcatcagaaccacgaaatgaatagaaaatgtgaaaatcaacgagaacaaatgtaagaactacagatatgaaggaagagtgtgcacatacctgagttgaagaaatagagtaaaataaagcgcatgttgcttggttctctggtatgggaggattgtcccacaaaacttcctgcaacgccaatgaattttttagacacatagctatagaatctaaactataccgaatagtatcaagattagtttgacctgaattgtctgagcaacagtctccataagagcaacttctataaaaataagtggctcacctgagagtaacgacatagaatgatcaaagaatgtggtcaacttacaatcaaagagacatgagtccagagaaagtaactaaccaggaacagatggatgaaaatatccaaagcatcgacggtctattcccaatcttcttttaagatccaagaggttgctgattggatgcaccgccttataaataatgcgtcattagacaaaacttctaacattctgaaatagctgagattactataatggagactagtactgcatacctcatatgcaacaattttctcaagcaatgaagcaggatcatcccaagtaatttgatgaagctctaaagtggcaggactaagccacataccgagtttctccttcagaaaagaatctaatgttcgcaaagacggcgtgttctcttttctgtacattagaaacaaccatcagtgtcagatacaaccggaaatgttttaccaactgattcgaaactatcttcaaatatttgagtttccagtcacataacaagaggacaagaaacattacgagagtatcgacagaagatcagctcggaggatggacaaaaatctcaaccctccaggatgtgtattcaacctctcaaataaaacttcatatgttggcctaagagcatgcctcagattcctctcaatgcgatagaaaacagaagataaagcccccttatcatcatcacctaaagaaaagtactcgcccatcaatggagaatgtaacgaagaatcacacaagaaaaaacaagaatggcacaagaatgactctcactagctggagtttcaagtccaagatattgcttaacaagttctcggacttgctctcggttaacatcatactccttggctaaaacaagcagtaacttctcgcggtcttcaagcgaaaggctaaagtaaccctataagcatttttaaccatatatgtaatcagattgaaaaggttaaacacatcaaagatcagaatcaagaaacaacaatgtgaagatagttttacctcttgaaaatcattaagagtaatgtctaatacaccagttttactagctgagatagctgagtgcattgtctctcgaacaacatcataaaccctaaaacaaaaaccaaactcactactgcaaagatcaatggtgctaaatcaatatctacaatgagaaattaccttccagtggtaccaaaatcattagaattttgcacaatgtgatctctagaatgattctcttgaggattagattgaatttccttctgacaacaaagtcaacaaaccattattatagagtcaaattagccttattatattcttatcttcttaaaaacattcaagctccgattaaagccatagccaatttctcactctctctctctctctttttcatcaaaagatgtaaacttttcattgcccatgattacaaattgtgtgaatttggacagaatcgcaaaattatccaaaaaattcaaacagagaaaaagaaaagcttacaggaaattgagagagggaaaatttggagggattgttggatctcattctagcacgcaacagaatcgctagatttttcttgctcatatctgtttcattatgatcatcatcatcacggttaaaatttcataagagaaaaaaaggaactcaggaagaagaaaaaagcgatttcgcaatcagacatgacaggaaccttaaaat

SEQ ID NO: 29345 - DNA, 2248 bp, Arabidopsis thaliana landsberg
  unsure (1)..(2248): unsure at all n locations
gaggaccagacacaggttgctggggaccccaatttccacctccttgaccagccatattcaccacatgatcttgaggtgttcccttgtaataaccaccattacctacactatgcaacatctcctttagcttataaatctaatccttttgccatatggagctagcagaaaccattagactatgatcgttctgaaacctaatcaaacaccattaggctacaaattaaattccagttatactaaactgtaattacctgagggtgctcctccataaggattgttattgtagtagtgcatgtggttgacctgaggagatttcttcttcttcttcctgttgcaacagatgcaaatacacactgcaagtagaagcaaaagccctgctcctacaaggactccaataatcaatccaatgttggcttgtggatgattacccgatgatgagtctgaatctccactattctgaggagggcttatcgaccgaggtggtgaaggtgagccaccgtcaccggaagttctgttccctgacgacggtggtgatggtgtggagccgtctctgttgttgtttccgccattggttctgtttcggtcatcattggcaccaggagaaggaggagttggtctttccggtgattggttcgacggtgtttgtggtggtgcaggtggcgttacaggagttgagccttcaggtgcaggtggagaaggattctctggagtctgcggtgacggattagctacaacaggcggcgatgaggacggagatgtaggaggtgacgtttcttgcgttggtggtgcaggcggcggtgaaaaagaagcggagatatctggcggaggagcagatattgatgatggtggtggtgaagaaggtggtgttggcggcgatgactcattagacggcgatgttccgtttgacggtggtgtcccatttgaggtttcaggggcaggagatgaatccaccggtgagtccgccattttgaatgttgttattnnnnnnnnnnnnnnnnnnnnnnnnnnnnctccccggtgatccacgacgcaactgccttgtttcccaagcaaaaccaatacttgtgaagaagcaaatcgtatgcaatggaaacccagaatttggagagattgatgagtacctgatgaagaagattagaaagaaaatgaaagggagagagaaattgtagaaacagcgtggagaaatagcttcttcctaaggaaagaggaggagatttcttctgacaaaaatgtaaactttcatttagctataattaggacaaagcgtgtctcttctctaccatttatcatctatatttgctctctcaagaaaccgtagtagtctctctaatttggcttactactacttttgcatctgtgccgtttgaagtttgtgacgttgggaccatatcggtttagaaaataatccaaccatgatactgtggctaagtagcgggaaaaggcaggagtaatcaaaaaacataagagaaagaatgtttggctcataacgttggttacataaggaaaagtcacagccagaagtgattggggttggagtttgatataccgttgcaactgtgacacaagcaaatcttgtccaagaaacaagaacctaaaacttattatcggacacgcattacatgtacgcgtttgtgtataacaacaatccataaagaaaaaaataagacattcccaccttttgcggaatcatatatctctcgtcaacgttacaattcattaaagttgaaagaaccataaaaacacattcacagatctccgaaagtttcatttgacagttacattaaacattaatcgatgggtctaaaacccctaactaacttccccatatcaccgtctcctacataattccgataaatcttcagaaaagaaaccaagctcaaaggttgaagccgcaaaaggtgggataatgtaccttggcttataaatagagaacatcacgaagagctaccctgcaaatcttaacactataatgtgggaccactaaaccgaagaaacattgtctgaacctggagatggatctgaacttccggtcattgttgtagcagctacaaaagaaccaggaacagggaaacctgggggccttggcattggtgggcgtggaaaggccatgcccattggaggcctttgagctacattagcaaaatttgcagcgattctgtttgttggtaacgatgcttttgaggacattgaaggtgggacacctagtccagcaggtgtgatctgagcccttacatgatatagccgttgc

SEQ ID NO: 29346 - DNA, 2931 bp, Arabidopsis thaliana landsberg
  unsure (1)..(2931): unsure at all n locations
tgatgatgagccttgctttgagtgtggtatttaagtgttttccaggaggagaagcatagagcagaagctaaatatatgcttgataaatgtatcaaagaaaagttgattgatttctgtgatgtgcttgatataccagtaaacaaaagtactgtgaaaaaggtaagtgatatgaatctttggtctatctatatatctatttgtgtctttctcgattatttattcatacatctgtatccttcaagaagaactggctgtaagagtgcttgaatttttggtatgtcccaaagcaacaagggatattctacttgctgatagtgaaaaggtactctaacttagcagctgaatcttgtgactgttcttcattgttttttattcagtatggggtattaaattgctatctcctttctttgaatacatgatgtaggaaactaaaaagcgcaagaagagcacatcgaagaacgtgacctctggagaatcatcacatgtcccagctaaggtttgtaattgttaacctttctcttctttatagtttgtagtcattgacctgatttgtttattctagactcgggggtggtaaaattagctccgtttctagttttgtaatcaagtttgttgttatgaaccattaggtctctatggtatgaatatctttgtctgcgctcccttatcagttactgcaactcacattatgaatgaatttcgagattgcatcaatgnnntataaactggtgttttcttatttcataattttttagttgtacttacagctgccatttggtatgcagtaattattaagcaatgtataataccataatgagaaaatttgggaatagtaggaaatctaagataagttccatggcttggtcacttttaattggctggtttttagtcaacaagggtattattaggccgctcagtgaaagtattttggatagtcttagcactagcttagtacgttatttactcaatggcattcccatgtcttgttatttggtgatcccccatttagctccttgtgtgatatggctttgaaccttctctaaaccgtaagattctgcgagaaaacaaaacatgtggagattctagcaaaagtctctgtctctgcgtggcttgattttatgtgaagaaagttgcataaacaattactgactgtgtctgttattctgtttgatatatacagaggagaaggcaggcgaagaaacaagaacagccaactgagactgaaggaaatggtgagtctgatgttggttccgaaggaacaaatgactctaatggagaagatgatgtagctccagaggaagaaaacaacaaaagtgaagatactgaaactgaagatgagaaagataaagccaaggagaagactaagtcaaccgataagaaacgcttgtcaaaaaggactaagaaggagaaaccagcagctgaagaggagaaatctattaaaggttctgcaaaatctagtcgaaagtccttcagacaagtcgataaatcaactacatcatcaagcaagaagcaaaaggttgataaagacgattcctctaaagagaaaggcaagacacagacaagtaaaccacaggcaaaaggatccaaagatcaaggtttgtttcgaaagcttaaatatcacacattttcatagtgtattgaatctctctatttctttgattgtggccggcacaggacaatcccgaaagaaaggtaaaaaagaacccacaagaaaagaactgcatgtagtggtgaccaaaattctgaaggaagtagacttcaatacggtgagacttcaaaagtttgagaatttacagattataaagcgtataaaaaacctttgaactcaaagacattttgaattttgtttccaaacaggcaactctatctgatattctacggaagcttggtatgtttctgtaaagcttttctcttattctcaatccataatagttatcgtcttccaaatcttcaggaaacgtttatcattgaaacattcttttcctgcttgtgataatactagggagccattttggaattgatcttatgcatagaaaagcagaggtgaaggatatcattacagatgccattaacgaaatgagtgatgatgatgatgagaaagaggaagacacagaggatgaaggtgagaaagagggaaaggactagttttgtctttcttctctttcctacaataagaaaaagaaaacataaccgaagagacggtttaacttaaccttccatgtgtgaatcataggattgtttgtatgtttggtgtaatgtgtaatctgttaggctcatgtagtatcaggtaatgtggttggatactttctggattagaattaatttgagatgtatttgtaaggacttgcaatctttcttcactttagcagcacaccagtgacatggataaatattgttgtgtttcaaaagaggaaaagaagggtcgtccaagagatcagctccaagtcgatcagagagccaataattcctctcaagacacgcccacgaatgaattcacaagtaatctctcgtgttatgggatctattgcacttatttttgattttaagagtcatgttaacttttgtgtcatgtttattttaccaccctataattagcatgttcgtttcgtcaccactggcggttgcggcagcacaccattgacggttcagcaaaacgtttatcataaacattttatttagctcctcaagaagttaaaacgtttatcatgaacatttcagtccctgatcttcttctccatctccaacccatgtttggaaaccatgtgtgcggttctctcaagcttagttctgcactcttctcacgcatttaaaaagttaaaacttcttgaggagctaaataacacaataaaaccacacaatcgacggttcagcagcacatacaaatagttgaagcgtatgtgacaacaaatatgcttcatatagtgtgcatgg

SEQ ID NO: 29347 - DNA, 9828 bp, Arabidopsis thaliana landsberg
  unsure (1)..(9828): unsure at all n locations
aaatgacataatataagaacttattgataaaattttaaaaagacaatcttgttctgtattgttattactcacatcatcatcatatacgccatctagaagatcatatgttgaataaccaacaatctctgtggaagctccatcaaacagaatacattgaatatctcctgtatgattcatgactccaacatgcaacttgaacctttaaccaaaagtttggatatttagtttcttaatcaccgtaaattgtatgaataagagcaaaatgtcctaaacaagaatgagaccacgaaccttggaatcacttatgttacgttaaggttgcatttaggacaccagaagggaggctttttttagtttaacagcaatggtggtatcgttattcttgttcatctcaagtttcttgctgcatttcttgcatccaacataaaaccaacccatatcaccatctattttaaagattgtgcacattatcttgcatttctgagcctgaatacatgcaaaagtattagaaaatcatctgatagaatcttaattccagagtaactttaaacacactataatagttaatttatctacctcagtgaaatcaagtaagcaggtaatagattttttaggatagtgctcgaagtaatcttcacttcaaacagacaattcaagctttggtttagtctcggcaattgtgagttcaagaccatcctttggcaaactgtatacaacaagaccatgaaatcaccaacttaagtatacttagatgtggatatcatttttataaggaaaacacatagtataggcttagtgattacatgtttttaaagacttccacctctaaatactctggattaatgacgacaactgaagcatcaaaagcatttgtaatctggttctcccttgttacatatgaaacaaatatgtaaaacatggtaaaggtaaatttttcttcataaatattattaaatcgatttaagatagttgtttagctattacctctgaaagtactgattttggcaaacctaattaggcaaacaacaatttcaccacttgaaccaaatccatgcactaaacatttctactcgaatcctgaccaccatgtaattccccgctagcccacacaacatcctagattccatacctaagttccacaactatatccactaggctttatttttttttgatttattttacccgtttaaacgacattgtccccagtagcattcaaatccgagaaagcgggtaaaataaatcaaaaaaaaaaaaaaaaaaaaaaaatcaaaccagtgggttgcctcccactaagcgcttgttttgagtcaatagcttgacttggcggatttcaggatgtaggtggagtggtgaaggattgctgctgcctcttatccttccaaggcggtgtgtaaactgatctggatggggcagctgcaggttgtcgatcgacactcagtggtgtgtcgatcgacactcttctcgtcacctgcaagaacaacaggaaaaacaagctttcgaagaactataggtttgttatcgaatgaagcagacctcgaagaatttaaagaattaatcgaaggtaaagcaggagaaaagatagaggaaaacttatcgcatagggccgcaagaggtgtgggctaaaggcaatgtgcagaatcctttnnnnnnnnnnnnnnnnnnnnnnnnnnnnnnnnnnggatggtatggatcgacatcgttgctctgcaactctcattggcgagctgagctggtgggagcgttatgtgtggctctgtctggggattctaaggggtctgaggaggtgtgtctatgctagaggcaatactactaatagtctaagtaaactctgaaccatccatgccaaactctgtctccatataacaaactttgagagagatcctacctctcttcacatcaatcctagcaccagctgtagctaggaatgctctttcaaggataagaggatccttgggttcctactcgtagttcaggaccacaaatgagcagggattagggagttaccaaccttatgaggaacatcctcaagaattacttcagggatttgtttggaaaattccgcgaagaggagagtgattctagtctccctttagttagtcatgcctagtctctcagcaacaaacttaggcatgaggttgatacatgatcccatatcacacaaagtgcggctaaacctgcttgtggagatgtactcagcaatatccactctctgtgctttctctttcctgaccttaggcagcataattgcactgatgtccaatgtcagcagtttagcgtcatctgagctaataccattgtcaacaagtcgcttgacatacctgttgagtggtgcataagaggtctcataagcatcattaggaagagaactgaggatcttttccatgatggttgtgcacttagcatcgtgaatctcctgcttagaacgacacttcctacgataagggacaagaggagtgtaagcagattcgaggtgcattgggattcgcacctcatatggtgcagtccagacccaatgtcgatcgacaatagagttgtgtcgatcgacaccatcgaatggaatcgtcttagagaagagtgttccataaggtgtcgatcgacactagaaggtgtcggtcgacaccatctctgcaactgcgagctcgaactcgtcttcagtgtccaattcttcccacacatcatctccttctctgatcaagatggcattacagctcttccttgggttagcataaggattacaggaagaaagccctctagtctcttaatggattgtgtagtttgagctacctgaacatctagcttcttcaagtgagagctcggattgtcgatcttcccattaagatatatgtagacagcatcaaacttgccattaaactccacaacgagctttgtttggctatcaagaatctgctcaagcatggattctattctggtctctgaggagggtggaagggggggcttggtaagctgaattaccataggtcttctggaagttgctctaaggaaatgtcttctggaaagtaggctttggagtgtagtttgaggaactctggttccctgtaaacctgctgccactgaagttcccctgtggatgtccaaacttcatgtagctctgaccatctatgtagaagactccttcctctgactcaggctcaggctcaatagtctcatcctcagctgcaaagtggacatgtttcttccttataagcaagttgtgaaccaaatcaagcttagcattcacctctgccatttgattaactgaaatacctcccgcaatcttcttcctctcaaaatcagcattcttggtactgttgctgcaagcgaggttctctatcatggctgtagcatcagttgggtaacgtgtattgaagtcaccattgttcaatccgtctagagccatcaggtatctccaatcgactcctctgaagaaggtacctagatgtgggcagtctcgttggtactccttgaaaggaacccaagcagccttgaaagcttcagctgaaccttgtgtgaaggtggacagcttgtttctcaactccacagacttagcatcatcgtagaaatttttcaaaaatgctatcttgatgcttctccaagtcttgaggaaacctgctttaagttgtttcagccaagaagctgcttccccagcaagtgaataagggaagagcttgcacagtaggtagtcctctgagactctattagccttgatgcttagaacaagtcctcaaagcgctcgatatggtccattggctgctcatgagataagccatggaaaggatgtggccaactaaagcaaagtagccaggctttagctcatagtcgttcctctgtaatggtgggggtacaatcgctgattgattagcatagaacaggtctggccttttgaaatccccaagagtacgacgtggtcccgcagctggaggaatagatgcaggaatctggtgttggtgtcgatcgacacctctgttgtgtcgttcgataccgattcatccgcatgctgctcccgatggtgtcgctcgacaccgagccctgctgcgtctctagcagctaattgcgcattgaggcgcgcctgatcctcattggcatcctcaggtatgatgagtccatgatcatccaatctctgaccagcctcattgtaggcttgcccatcctcatctctcaaaactccttttacatcagctctgatgactctgtcagccattgctaatttctgagtttttcggttggtgggttcaagttttcccaagtccaaaacagacaagttgataagctccttctgttttgtgctccttgtttacctaggcatacacctgaaacacagaaaagaagaaaacaaaaaacgcgtgagtaacaaaatagaagtaaaaactagacgaaatctctaaacaaaactcaatgatgattcccaagaactccgacaacgacgccaaatttgatatggttcaaattacctagaactactctctcaaataagagatcaattgtagtattttaggatcgaattcacggagttcttttgctcaaacaatgagttaaatatcgagattaagctagcagggtagtagtaaaaatgaaagagaacaaagtaaaaaaacagcagattgattgtgttgtaaacgatttaataaagagctaggaacagggtattctcaggaaactattggttagtagatctaatgaaggctaggttgttatcaaaccattcttaaactcaaactctaattatggaataaccagtgggcgtgccgccaaactccctatatctatagctaatagtgaccggagaagccgagagactatcaacctaaatatgcatttttaacgagttcaattgttcatcttagtaaataggccgattcttattacacacatataaaccagactcatcaaataatagatcgaactatagatacctatgacaggcatatttattgtctggatttatgatctagtgaattactctagatctagcattaagaacaatcaaagatgaagaattctatagataacctagcaaagggggcaatctactaaaccatatgaatccttaatgagaaaccctattacttacaagcaaattactcagacatattggatgaagcaaacaacatatttgagtgtgaaagcataaacacagtaaatagagaagggggaagaagggatctcttcactgtatatagatttgaatgaaactctgagaaaacaatcgatgaatagcttatgtctctcacaatagggtttgcaaagaacttgataaaagaaacttaggtctaaaaacaatatatatagaccctaaaacgtccagggactaataatgcaaatagaaagtcttctcaggcaaatttgatcttctgtaaacttgaaagcatctagggtttttgccaggccgaaactggtgtcgatcgacaccaagagtgtgtcgatcgacactcctcgctgattcctgaaccaaaatcgtccttagcttccttttccttagcttttgctccaaaatgtctccttatctccattgttgtcctattgcatagaatacatgaaaagacactaaaaagactcaagaaataacataaagactaaaaatcttatacctaaaatatagataaaatcagtgaaaatcgggttatatcaactcccccagacttagcttttgcttgccctcaagcaaaatacaaaagccgacactacaagaaaacaggtaaacgacgactacaatcagcgacaacaaacgtagtcgtaacattatacgactatttggcgacggatttacgactcgcatgcgacaacacgaaaaattatagttacatagtcgttgttttacgactatcttttgcagtcggcaaagagtcggcaagtaacgactatttgacgattatattattgaagggatattgttgtcgttgcttagtcgctaattaacgactattctaccgtctattttatttagtcgctaatttggcgagtacaggacgactagacgtcttagtcggcctgtagtcgtagaaacgtcgcaccgtagtcgtataaagtagatggaaaacatgtttcgcattggtaagtaggtacacctaattatttagttgtagtcgtaaattagtcacaaaaattggcctatataataaacgttcacgcaactcttctttcaccaacaaatcaaaacaacaacaacatcaaagagaaaaaaaaaatattagttattttattgtataatggcgggaaactacaattatggcggtactggcggtttctatcgagattggatgtacaagagatttgatgaagtgacggggaatttgtcagccgaatacgttgcaggagttgagcaattcatgacattcgctaataatcagccaatagtacagagtagtcgaggtaaatttcattgtccttgtagtgtatgcaagaatgaaaaacacatcatctcgggtagaagagttagtagtcatttgtttagtcatggatttatgcctgattattatgtttggtataagcatggagaagaaatgaatatggatataggaacgagttacacgaataggacgtattttagtgagaatcatgaagaagtgggtaatattgtagaagatccatatgtggatatggtgaccgatgcatttaattttaacgtggggtatgatgataactatcgtcatgatgatagttatcagaatgtggaagaaccggtccgtaaccattcaaataagttctacgacttgttagaaggtgcaaataatcctttgtacgatggttgtcgtgaagggcagtcgcaattatccttagcatctcgactcatgcacaacaaggcggagtataatatgagtgaaaagttggtggactccgtttgcgaaatgtttacagattttttaccagaaggaaaccaggcaaccacttcacattaccagaccgagaagttaatgcgcaatttaggacttccatatcatacaattgatgtttgtcagaacaattgtatgctattttggaaagaagacgaaaaagaagatcaatgtcgattttgtggcgcgaaaagatggaagcctaaggacgaccgtcgaagaaccaaagtaccatatagtcgtatgtggtatctacctattggggaccggttgaagagaatctatcagagccataagacagctgcggcaatgcgatggcatgctgagcaccaatcaaaggagggagaaatgaatcatccttcagatgcagcagagtggagatatttccaagggttacatcccgagtttgccgaagaaccccgtaacgtttatctcgggttgtgtactgatgggttcaatccatttggcatgtctcgtaatcattcgttgtggcctgtgatcctaactccttataatttaccccctggtatgtgcatgaataccgagtacttatttcttaccattctgaattctggtccaaatcatcctcgagctagtcttgatgtcttcctccaacctcttattgaggagttaaaagagttgtggtctactggagtcgatgcgtacgatgtttcattgagtcagaattttaatctaaaagcagtactactgtggacgattagcgactttccggcgtatagcatgttatcaggatggactactcatggtaaattatcttgtcctgtttgcatggaaagtacaaagtctttttatctacccaatggacggaagacatgttggtttgattgtcaccgtagatttcttcctcatggtcatccatctcgtaggaacagaaaagactttatgaagggaagagatgcttctagcgagtatccacccgagtctttgacaggggagcaagtttattacgagcggttggctagtgtaaatctaccaaaaatgaaggacgttggtgggaacggtcatgaaaagaagatgtcaggctatggaaaggaacataactggcacaaagaaagcatcttgtgggagttgtcttactggaaggacctcaatctttgacataatattgatgtgatgcatacagagaagaattttcttgacaacatcatgaacactctcatgagtgttaagggtaaatcaaaagataatatcatgtcaagattggatactgaaaatttttgttctcggtgagacttacatattgatagtcagggtaaagctccatttccagcgtatgcattaaccgaagaagtcaaaaagagtttattgtcatgtgtgaaactcgaggttaaattccccgatggttattcttcagatttggctacttgtgtagacatggagaatggaaagttttcaggcatgaagaatcatgattgacatatttttatggagcgactactgccatttatctttgctgaactccttgaccggaatgtccaccttgcattatcatgtacaatatatgttgtctaagttgccacacttttttaaacctctgatttaacttaaatatatatatatatatatattttagggattggagcatttttccgggacttatgttcgaaaactttacagaaaagtcaggttcaaattctcaaacagaacatagttttaataatctgtaacttggaaaagatctttccaccatcattttttgatgttatggaacacctacctatccatctcccatttgaagctgaattgggtggccctgtccaatatcggtggatgtacccatttgagaggtttttcaaaaagtttaaaggaaaagcaaagaataaaggatatgcggcaggatcaattgttgagtcatatatcaatgacgagattgcgtatttttcagagtactactttgccgatcatattcaaacaaaatcaaggtaaatatatttaattattttacgatgcgcaagctattcttcgatattaattcacttacatggatcaggttaacaagattcaatgaaggtaaaattcctgtatatcatgtccctggagtacctaatatatttatgcacgtcggccgtccaagtggggaaaatgcatgtagattggctttcagagaaagactaccaaagcgcaaatgcatatgttttaagaaattgtgactattttaaaccatttgagaggtatttttaatcacttgttgtttttaattttttactaagatcactttgataaatatttcttcgtttgtaaatgtaatatgttcgaggattatctttctgcaaaatatccatgcttgcccgaaaaagaactctacgcgagaagagcggaagaatatcatctatgggttaaagaatatgtaagtctacatcaattttggttcattcgaaaggtgatcatttaatatatactaattgatattgtttatctattctgtaggtaacatattgaacactacttctccatttcatacttgggttcaagagattgtgcaaggacctttgaaaaaggttaaaacttggccaatgtatttcacaagaggatatttgtttcatacgcaaaatcacggcgctggacaaaagacatgtaactatgggatatgtgttaaaggtgaaaattatgctgattcatctgatgaagcgaatttctacggtaccttaactgatatcatagaactcgagtatgagggcatcgtcaatttgaggatcacactgtttaaatgtaagtggtatgacccaaatatcgggagaggcactcgacgaagccatggtggggttgtagacgttctatctacgagaaaatacaataaatacgagccatttattcttggtatgtaattttgaagtccaaaatacggttctttgttaattattaataatcttgtttgatatatgtatatagcatctcaagcagatcaagtttgttatattccgtatccatatacgaagaaaccaaagaacatttggctcaatgttttaaaaggctctagagt

SEQ ID NO: 29348 - DNA, 1399 bp, Arabidopsis thaliana landsberg
tccctctatcaccggcaggaccctgtccgtctctgccaaaaattgtagaaccagaacctgaacctgaactacttggaaaaggaaaacgcaagaaaacacaacctatgaggcttgcggattatgccactacattacttcaccaaccacacccgtcagtgactccatacccactggacaactatgtatcaagctctcaattctctgctgcttatcaagcttatgtttttgccatatctttgggtattgaaccaaagagctacaaggaagcgattcttgatgagaattggcgttgtgcagtgtctgatgagattgtctctcttgaaaatcttggtacatggacagtagaagacctacctcctggtaagaaagcattgggctgcaaatgggtgtttagactaaaatacaaatcggatggtacgcttgaaagacataaagcacgtttggtggttctcggtaataaacaaaccgaaggcattgactactccgaaacgttcgctcctgtcgcaaaaatggtcaccgttcgtgcttttcttcaacaagtagcatcattagactgggaagttcaccaaatggacgttcacaacgcatttctacacggtgatcttgatgaagaagtttacatcaattttcctccgggttttggtagtgatgataatcgtaaagtgtgtcgcctgcgcaaagctttgtatggattaaaacaagctcctcgatgttggttcgccaaacttactactgctttgaatgattacgggttcatacaagacatctctgattattcgttatttaccatggagagaaacggcatccgtttacatgttcttgtctatgttgatgacttgatcatcacaggctcttctctcgatgtcatcactaagtttaaagggtatttaagctcatgtttctacttgaaggatcttggtattttgcgatacttcttgggaatcgtggttgctaggagtcccgccgggatttacttgtgtcagcgtaagtacgccattgatattatcacagaaacgggtttgcttggagtccggcctgcatcacatcctttggaacagaaccataagcttgctttagcttctggtgacacgatctcagatccttctcggtatcgtcgtcttgttggcagacttatatacctcggcaccacacgtcctgagttgtcttatgcaattcacatgctttcccaattcatgagtgatcctaaagccgatcatatggaagctgctctcagggtcgttcgttatctaaaatcaagtccaggtcaaggtattcttttacgctccaatacacctttggtactcactggttggtgtgactcaggttttgattcttgtccgattacacaaaggtctctaacgggttggtttattcaactgggaggctctccgatctcttg

SEQ ID NO: 29349 - DNA, 2658 bp, Arabidopsis thaliana landsberg
gaagaaaactaagatgtaaacatgattcatgaaagtttttgattttaaagagaataagtttcagctgatgggagaacgagtacctctactatgaatgaattaatgagtttaaccgatttacactgaatgtcaaaatgaaaaggagaatatgggtcgtacactgacaaaataaaagagggaaaagatatggtcgtacactgatactgatagtatcggatcatacgtcaataagggataagatattattaggttcccacacttggacatcatctctttatttgtttcgttgaaaaaaattatgttctaattttatcggatctcctcaacaaaatatcactccaattccaccacctctctgtcccctgtcctcttttttttctttttgcctattgaaaaagtcaccttaatttttcttgtggcataatttttcttggaccatagagatattcataaaagaaagaaaagaaaagattgttcacaatgccacctttctgtatataattcactacgaagaaacaacatttggcatttgacaaaccatcaagcagcaactatggattctctagagaatctcgcatgcaaatatcaatgtgtcccctagattttattttcttcttcttttttttttttctttttttttttgtatagtttggtcaaattcgaacatgtgacatgtttagtaatttatgatccgatgttgtcttgaatttacgaaatccctacgtgtgtgtgtcttaagtcgaaatttacatgttagtaagaagctcctagttttgactccaaatatctccaagttccaacgacacgaagaaactttttataactgagtttggctaaaagctaatatgttactatgttagcaccaattaaccatcgacgtgttagattctattcagacaaaattttagtcacttttttttgtatcgtcaactggaatctatgtcttttttaatttcgtagtaatgtttgcgttgactgtttagctaagaaagtaagagcgcatagttttctattttctcatgtaaatttgttggtttctgattagttctcagtagagtaaagtgtcttcaagaaaatgaaagtgttgatgattgctagagaacaaaaatgtctctctattcaacgataatggttataagacggatcaacaaaatggctacagaaacaagcatttaaaattaataaggtgcactgtatttgggacacgtattgaattgagcatgatgagaaactcatgttgattctgtgactagaaactataaagtgtctaattagattctttgtctttgtaaagcagattccattctttttattggtctatctcctcttcaaatttggaatatttacaaaccaattcctaagccaatcatcacagtaagtggttttgatttttttaaaccaaaacgggcttaatctttttcccagattgcagattaataatggtctctagagacatggttggaagacaatatattaatctaacatggcatggtttcctcaaaagaagaggtaactacatttatggaatctggaggagttaaaaggtacaagttgaaatgtgaaataccttgtccatcttgccttgtcctctatcaacctccctagcttgcttcttttctcttcaacaaaacgtcggcaaatttgctccacattttggaaatacaccctaacaagttctctcctataaccgcaatcaaggcagcgaaaaggtcggtctaccctctctctgcaaggaccaattatatggccgaggaaatgaaaaaatataacatatgaacatgtggagatgtaacttgtaagtatatggtagcatggaaaaatggaccgtgcatgtggtaatattttgctcatagagtcggtcttgcattacctgatcacctgaactttagtttcaattgtaagacagccagaatcatctatgaagccatcccgtaacttcggtaactccataaactttttccatccccaatcatgttctttcttccaaaaccggtgcagcgtatctacaagatcatgaattcagttgtctggatatcgaaatggaagcaagcaattaaagattcgaaaaatcacctgaaaacttagacttctttggatctttatgcatcacagatatagtaaactgagccaactgactccagcctggtgtccaagatagcaaaagaatatatatcactaagtatccagagaaagaaaacaaggaccaagcagaccagtggaaaaaaatacaaacctggaagaagttcatcatggtttgcaacacagagaaataatgagagatgattgctaacatcacatccttctggatacattaaaatatgcctgacacattgaagataaaagtaacaacacaaagccttcaaaaccatttccagagtttttttgagacaaaaattaaagatgagaaagatatgcatgccatgtaccaactgtagcctccaatttcaaaaacactgctagcgaactcccttttgctgatttgtgaaaatttcttaatcttccatgtattttttccatataactcagagggtttaagacctgagaaaaataagaaatttcacattaaattagctgaaaaagagaagtatattactaaaacacaaaaacaaaccaacgggtatagtatctattaacatatcttgaaaaccttaatcattt

SEQ ID NO: 29350 - DNA, 1522 bp, Arabidopsis thaliana landsberg
  unsure (1)..(1522): unsure at all n locations
ccgtcttagcttgaaattgcccatcacttgctctgtatcattattttttatcttgaaataatcttttgctggtgggggaatacttaaggttgctcggattctttacacaaattctggcgttggcgttttggctcttggatcaaatggtgttcaaagactatggaagtggatccgcaatgagcaaaatccaactgggaaggtgactcgatgtacctttcaaattttacactcatgtggcttgatgatatatgtgagttgttgagtcactcgaatcgaagctcttttgcttcagtgtctgaaattttcgcctttaattgtgaaggcaactgctactgtaacttcacagcattgacacccaaacagccatctccttatggcaaatgatgttctcgagaatcctgaagggagtgttccgtgtatagcacttgccaagaatgactcatacgtaatgtcagcttgtggtggaaaggtttcgttattcaatatgatgactttcaaagtaagcagcttaatccaactttttctgttctcgggagcatctcctaaatacnnnnnnnnnnnnnnnnnnnnnnnnnnnnnnnnnnnnnngcgaagctaaatgcatttttccctttcgtgcaggtaatgacaactttcatgccaccgccaccagctttaactttcttggcatttcatcctcaagataataatattattgcaatcgggatggaggactcgagtatacatatttacaacgtcagggtagatgaggcatagtacatttgttctattctgcgggctactggtttttactggtgtaactgctgattcatctcttaaatgaatttgtaatgtaatctcttttaatctataggtgaaaacaaagttgaaaggtcaccagaagcacataactggtctagcattctctaccgcgctcaatattcttgtctcttctggtgccgatgctcaggtaagacaaaattcatgtttcttagatgctattggagcttttcgtgtccatgttggcttgtaacttaacagactcgttaactctctttattacagctcttcttctggaccgctgactcgtgggagaaaaagaaatcttcagcgatacagctaccacctggcaaagcaccagtaggcgacacacgagtccaattccacaacgaccaaatccagttattggtttcacatgagacacagctcgccatttacgatgcttcgaagatggaatgcattcataaggtatcgtaaaaaatctttgtatttacttggagatcttgaatgattataagaaaccttaaattctcattccttgtgcagtgggtgccccaagaagctctctcttcgcccataacctctgcatcttactcatgcaacagccaactggtttacgcgtcattcgctgatggaaacattgcagtctttgatgctgaatccttgagactcagatgccgcattgccccatcagcctacatgcctcaacctacaccaaacaggtaccgtattttacaaacttcatataaagtttatatcatcc

SEQ ID NO: 29351 - DNA, 1290 bp, Arabidopsis thaliana landsberg
aaattcaaaaatatccgcattttctatattttccgcttgagtaatataatatttacaaagtgtataaaaattatccaaaatttcttcatatacttcataaaaactattttttcaaaatttcaaaaaaacaaaaaattccgtcttgccgtagagttttacctctctcgaaatcgatcctcacccaaattagtgagagtttgagaattgaatttagctacccgaatttcacattctctatacattacccaaaatatttgtcccgtattttatcaaaaaaagtttttatcatgtttttcaattattacctgaactattttccgttctaataccctaaataaacatgtctattcattatatctcttctaatgatctaatcccacaataactttttccttaaactgtaattttaagtcatatatttcattaccattcattctattaataaaaatattgtaacattttatggttgcataaattaaatccggcaatggaatgtctaaaagtagtataatcggtcttgttcccacttttgtttcctagttgaacagatttgaatctcagatctgatataaaaaatgcactactcgacaatattttactacaaaatttaatagaaagtcaaaatatgattgttacacttcaattaacttaaaaaaagttgaaaaaatggttaccgacatatttcatagtttggccgcgtacgattagtgagacactccattaatagcttataattgaaaaattgaatgaaactgtgagattcaagtgtaaagtgctctctccccaatggctaatcaccaccgacttttacgcggcggcggatctccggccataatcggtggcagaatcacactcacagctttcgcttccactatcgcactcttcctcttcactctctccttcttcttcgcttcagattctaacgattctcctgatctccttcttcccgtaagttctcttaccagatctctccgaacaaatcatatccaacgctggatttgaaactgaatcgtagtattgaaatctggcgaagatttgtgtttaatttttttcgaatttttgtggaattttagggtgttgagtactctaatggagtcggatctagaagatccatgttggatatcaaatcggatccgcttaagccacggttgattcagatccggaaacaagctgatgatcatcggtcattagcattagcttatgcttcttacgcgagaaagcttaagctcgagaattcgaactcgtcaggatcttcgctgatctttcgaggaatacacggatctgattaac

SEQ ID NO: 29352 - DNA, 845 bp, Arabidopsis thaliana landsberg
acctattcactatctttcatgaaataagtgaaagtatccatcgtcgctactttaatctgctctgcttctgaccgtataaattttattatgttcggaagataatatcatggaagttacttttccatcctccaatgactttatattattttaaattaaatttgctgtcactgtatttcggtgacggagtatccctttccgccattccgcttgggtaatcgacccggtcaatcaatcaatcttatcataaataacacaagagcaaacacaaggtaaagaaattggcatcaaaaaacaaaataatatggtaaagatgtttcaattgaaatatagttacatataaattgaaatactacgaaatacatgcaaggcaaaacagcgaaaactgttaaaaagtttatttgtctagaggtcacaaccatgtgttgtaaacgaaatattactatgcagctcgatgtgatttgttctgacctaaccagacaaacagacaaatattttcaatcccccaaaatttctcctttttcaatacttctataagagaagttcccttcacccacgtcacatgcatgcacaatacatactcggtataatagacccatctttgtatccttttttttttaattatgcttttgtgactgcgtcaatttcaagatgctgtaatgtggaattacgaataaggattgaaaaaaaagttttatttagggttctgactctctcttataattaggtgctgagaagctacagacgacgcagtgatgggaagctgtaataagagaatattaaagcaaaagaagcaatgcctacgaattgtcactcctccttctcttaccccatcaaaccaaaaccaa

SEQ ID NO: 29353 - DNA, 2441 bp, Arabidopsis thaliana landsberg
tatctatctaagttaaaaagaacggaaattcagattagcatagctcctagaactgccaacttttctttataagatgcttgttatactttacttttggcgaaacttatgtaagacatttcacttttatcttgtgtttcgcagatatgacaaaggtgcttactctgttcttgacgtcctatataatgaaaactcatggagccaagcaacaaagagaggcacttaagagcgcacctaaaggacaactacaaccagtctttgaggtagaagattaatgtttcttcacgtgcgttatgtgggaatcagttacagttttaatttctgtaaatatattatggacatttttaggccctggatacgcttggaagtactaaatggagagtaaataagcgagtcttaacggttgtagataggatatggagcagtggcggatgtgttgctgatatggtggatcggagtgatgtgagttactccatgtgttactttgatcttataatggctactgtttttcatctgtacaacagtttgacattagttattgttggcgcagacatattttctatcccttgtgcatcacgaggcctctttaattctttaatttcaaactgcaggttcctttaccagaaaagccggatactgaagatgagggcattcttaagaaatggaagtgggaagtcaaatctgctaaaaaggtgaacagcgagagacattctcagcgatgtgacacagaactcaagctttcggtgagctttatccgccttgttattaaagtaatgtgccagtttgagagttctgttcataactgtttaaatgtgagcaggtagcacggaaaatgaaagatgaggaagctttttactatccccacaatatggacttccggggtcgtgcatatcccatgcccccacacttaaatcatcttggctctgatttgtgtcggggtgttttggagtttgctgagggaaggcctatgggaatttcaggcttacgctggctgaagatacacttagcaaacttgtatgctggtggtgtagataagttatcacttgatggacggctagctttcactgaaaatcacttggatgacatatttgattcggcagacagaccacttgaaggaagcagatggtggctgcaggctgaagacccatttcagtgcttggctgtctgcataagtctgactgaagctctgagaagcccatccccagagacagttctgtcacatattcctatacatcaggtactttctggtagaagttgccactttggcatcttctcctgaaggcttcaatttttttttgactttacgttgtagtttctcgttcaatctgtgtgtttcttcaaatgaacttcccttccttcactttggttctggccaggatggttcctgcaatggtttacagcattatgccgctcttgggagagacacagtaattctcttgtttttaatcttctatggttctttttgttggctgcttgtcatctttctttactgattatggttttataagatgattatcagttaggagcagaagctgttaatctagttgcaggtgagaagccggcagatgtttattcaggaatagctaccaggtaagctctgcatctactgcttaaagctaacttaagtttaatcgagtaaataaatgtccattcaaaatttcatatgcatatacctgcagggttcttgatattatgcgccgagatgcagacagagatcctgaagtttttccagaggcattgcgtgcaagaaaattacttaaccaggtccgtatgaaattcttttcattctttttccattgtcctaaccttgtgtttctcggtttccgcttccgtgcttgcatagtggagtagaaatctcatacattacatcctgaaaaaacattgttaaatcaccaataaattttaatgaaccgttctaatgtatatgtagtagtattggcatgtgagcaagttgcctgatatctgttttgtttgggtacattgtttactcattcacataactggtcagctgatacaacttgttgacggttgttcaaaatctgtaggtggatcgtaagcctgtaaagcagacggttttgtcatcagtctatggtgtcacatacattggcgctcgggatcaaatatagagaaggttgaaggaccgaagtgattttggtgatgaaaaagaagtttttggggctgcttgctatgcagcaaaggtatattagcaacagataaagcactggcactagaaaatcttaatttggcaatttccttcatctaatcttcaaagaacgcgtgtgctttaacaaatgattaattactactttctagttctcagcacgagaaaacttctcttagctaggaatgctataaaaaaaccctcgcctgttttgatatgtttggggcaggtcacattagctgcccggtccgatgcctcatacccagcagtctgcattggcgca

SEQ ID NO: 29354 - DNA, 1623 bp, Arabidopsis thaliana landsberg
aaacttgtattttgggttgacaaggcccaacaaaagcccataaatgaatttcggatggatatatagaagagaaaggacatttcgcctgcatgggtaaaaaactcaacaaatcctgaaaacaacaaattccgaatcacacagcgaggaggaagagaatatggatatgagtgtgattatgaggtatggggatgataaaaccgagaagttatgccttgaagtggaggattactgggctcgagtggatgaatccgatgtatgtaattctttcattttcttaattgttaatttagaggattcttacctttggggttgttcaagatgacgactgttgttgcatgttgcttacatttgtcacaaagattaactgtaaccctgaccctagatctgcttaatctatgattgttctgtttttttgaacgaaaatttctcttcttgcaaagtgatttattattaattttttcgtaattagggtttcgatgtcgagggaatccaagtaccaccagggggcactccattgatacactacgactgtcatctgcccaatagtaggcatcctgatcctgtattggtcaagctttatgctagtgcggggcttcatcgctacaatatgtggcaggtaaaaaaaactccatcgtggtaacagaatgcttgtgtacatacatgacatttaattgctctctttttctcaggggacgaacttcaagctcgttgatgtaatgaaattcaacaagttaatgatgcatttgtcccctttctacataactttacttgcccaagatccagttagccgttcgcagcaaacctttcaggttcaagttgatgaacactgtcttagcactatggatttgacggttctaattgctagacctaaaggtaagtaaacattgttgttgttgttgttgttcttcttcttctatatatatacaagtagactataaaagtaggtagtctcatcacttgctgataaatcatgcatgttgcatatatagctgtgtccaccaatgagtccgtcttagctccgcagagtttttcagtggaagaatcgcctgagtggccgtcagatttcaatgatggaaaacgattctaccgggtaagacacagcatcatcagttttgttttgttcatgatcgattataagcaggactactgatatgtttttttattatttttattattgcttttgcatttaggtgaaggaatctgagttgcgtaacaatgattggatttctctatatttgcaacttgtactcgtatcacatgataggatgagaatctcagatgtaagtcttgactttttctttaattgtatcttttttgcatatcaatgacacaccatgagttggtgacaatcaataacttttggttttgtttctcaactgttgttggtgcagagcgatctgtccaagctgaagattgtggaagcggtgatagaaaccaaggacgatatgctgccgccgaatgagagactactcaatgccaaaactgcaattgtgtacataacttttaagggcttcaccaagtgtcggattggtgatgagcatactgaacgcaacactatagttagaagaatattcgatgaggatacaggacacctttctatcaagggtgagttgattggagagt

SEQ ID NO: 29355 - DNA, 2125 bp, Arabidopsis thaliana landsberg
  unsure (1)..(2125): unsure at all n locations
cccaggccaagacagcaaccgacggagcataataaaccaccgccaaaccaccgccacagggggaggcgccacgcaaacagccgggggcacggcagagcaaaccaaaagccccaacccgagcaacgaaaacaccggagcgaaaaacgcgccacggggccccccaaccagccaaaccccgacaaaaaggcagccgagagtgggtaatcaccaccgatacctaaaccaagaaagaaccggaaaaaaccgaggctaaccataacacaagaccgacgagtggtgcacacggaaaagccacaaccaaaggagctaaggatcataataatcaaacaaagtccgtagactcggcgacgaccgactcggtcaccgaggtaaccgaagactagctgacccgtggctgtgccgagtaaagcgatggcgtaagaagttgaaagaacggctgtgttgattgagtcaccgttgtaataaacatgactaatcattttcatgaccggtgctatgcagaaaagatcgtatgcgtcggtgaatagacccattcccgctactatgatcgctttgaaatggtaccattgtgttcgagctacatcaagcgacgacaatacctttatcggcatcgttggtttttttatctgagattccgaatccagagctttttttttttttttttgcttctttccttttggtttgttatatcgaaatttcgaattcatgatgagtgaaacagaacaaggatctttataacgattaataagtctctttgtcattttcattactttattggtatgagcatggaatatgcttatgattttgactccgaggaagacttagtcagtttgtttgtaagagcttctttttatctatgttgtcacattaaggcacaacatcataattgtttgaatttttctagccaaattaaaccgtcggttcagtactgttttagtttcggtttgatcacttattgagaaatgagaacagtaactactaacaagtaacagcaacactgccaacacagaaacaatattaacggattctcagtttgatgaaatcattgtgaaaacggatatttagcaaaatcatgcaaaatctacagagtcacgtcctaaaagtaaaagatttatccttgcatgctgtttgattcgctttccttctatgtccagtcacataaagataaaagatctacatagatcctaagttctaaacttgtataggaacctccggtttaattaagagtttttgtgtcggatgatgactccctcgaagataccatctgatcggaagttaggagagaatagccgcggatcaactggtcccgggaggttaaagcacagcttgaaaggtccaggcggacacagcttccggatattcatctcgaacacccgagaatgtctcttgatatttttttcgcctgttgtagttgatccctccagtataacctttccatctgattcaatctcacagttgaattcacctgcacacaaaaggaccaaaccaattcatgtgttagcacttagacccgatgtggcgtgtatggaagtagttagatgtgcaacaaagtgtaataataccgtaatctttgcggacaccgggcaaagcaacctgaaaaaagtaagcaaccttgttgacaccaatgtcaacaacaccaacagatgatcctagagtttctttactggctgttccagtagttacaaccgacggttctgcatcgctttccttcatctccgaagaaaaaggtataggcttatctgttttttctctttccataagagtttcaccattcttgtttgttgccttttttgatgagttcttgaaccgtcttctcttgtatgtctcacgaaatctttcaggggttttactcgttccactaacagcatgaccagtaactgcttcttcttccttgttctttcgcttgcatgtttctggaagctttacaaatgaatagtagtcttggtcagagacaattccactgaatgcagattctccgtttcttgaacagtcctgcttcattccctggctttctggtatgtctcccgaaagtctttctggttcactgattacgcaactagcaaccgcgtcttccccttcctttctcttgcacgtttcttgaagctcaccagatgaatngtagtcc

SEQ ID NO: 29356 - DNA, 1228 bp, Arabidopsis thaliana landsberg
ctttagatatcatcaattgagctcttattaatcacatccaaatatgtgaaatggtatttaattacttttgctctccaattaaagtttttcgctatttttgtatttttctgtatccaaataaatccactaaaacaaatttgtaaaactttaaaactaaaatcatcatacttaaattatacttcctccgtttcaattaattatcgttttataaattttttttttttaaattagttgttgttttatgtttttaatgcatgtttttaaacagatttttcaattttatccttattattttagctgattaattgatgatatcaaattaaataatacattaattagagataaaacagaaaattatatattttcttaatttatgtaaaaacattaaacatcaactaatctaaaacagagagaatacaacatttattttagtaattatagtataatctaacatttatattcaattttaaattaccattaatagagtactataattaggtggagccgagagtaaagagaaggtctctattgactgacccatgtgaaactgaatctcccctaatttaatttgccgacaacgtaaacgcttcagtttgagtatctcgaacacatccatgtgtcactctaactctctcactcttcttctccccaatttcatggtcacactaatcttcctttaacttctcaacaaacaaatcttcccctttttttattttttgatccttctctctcctttttttgatgcgacccaagaattattctcagatggagaaacccatctccatcacgacggggaagtttcggaccaacaacaacaacaatcataacaatgtctggttcgttgttccactcttctttatcctctgcatcgggctcctgtggttcaactactctgctctcttcaccgagacagacaaaacacgctttctcaatttccgacgtttcccagaaatcaacatcctctcaattcaccaaagatgacggcttttctcgatttccctacgacccatctcctgattcttgctgctccggccggcatatttacgttcatgaacttccgtatagattcaatggtgatctgcttgataattgctttaagattactcgaggaaccggggaagacatttggccttacatcgaaaactatggtttaggccctgtgtttaacatttacgagaatgtgttgttggaacgctagtggtttaccaccaatcagtttctgctcgcg

SEQ ID NO: 29357 - DNA, 2856 bp, Arabidopsis thaliana landsberg
  unsure (1)..(2856): unsure at all n locations
gtcctgggccgctattggtcgggtccgaacttgagagaataagaactacctgaatttactgagacactaaagaagtagtagacttgagaaaatcaagcctagctttggtcaactttatcttctcttctaattcttctacttgctcctttacacctctcaccacttcttctggagctttctccacaaactacatatttcagcgttaaaaatgttgtaaaacaagcagagtctaaaactaatgcaccatgtttaataagcttatcgaaaacaatttctagcaagggtttaagagactcttttgatggttatggtatacctttggtgaactgagacgagttatgagggcgtcatattcagtttgcatcttggagagacgtttagaaatgcgttggacttcagatgatatatcaaccatggctgcaagaggtagatatgcctcgagtccttcactggctacaaggtggactgatagatttgcatcacctgaaggaccaaccatgtgaagttttgttgtgaccatgatgattcaagggaatcatcgaaaatgtaaatattgagataagatgcaaacaatgaaaagaaaagagaaaaaaaggattaaagataattataccaggaggggcattggaaaaatggacgttgtttaagtcaagcctggatagaagagctaatacctccttctctttctgcaccgccacaagaacacagtttttaataaggaaacacaaggcaaactgatgaaccttattcgtaagataatttaactgttaggaagccacaagttactgaccgaaatatattcaatgacctctgcacttccaacaactgaggcagatatacgctttactggttccactgaatactctgctcgtgcatttcgaattgctctagtctgtgatttaacaggcaaggtgtcaacatgctctgaacttttaatagtataaatattaattcctttaagtatggttctgtttgaggtttacagaatatattaaggtaaaaattcatactgaccagagcttgtaaattctcaaatctttttattgattcaacattccttggaagtgaattttgtggccatggagacacaatgagcgcttctttcctgtagggaagtgcctgcaattataaatgcattcataattacagttttatgaagctgaaatcattttttggtagcagtaccaatgtatcaaccatatataactaagttttcggtcctttttatttcatcctcaaaagaggctaaactaccaaaaaaaaactcaaagataacagcttaagcatgctttggtaaaaaaacggccactacaaaaactctaaggtataaggaaaatcatgcccagtgcagttggcctaagtaaatggttaagggccaatttaagtaaaaatgaaatacacagatagcaaaactgagagcatgttacctgccatagatcctcggttacaaacggcataaacggatgcaacagcttaagtatattctcaaagacatataacaaaaccgcctgagaagctagagaaactgaattgcctccagatccatacagtcgagatttgctggcttcaatatacctttagagtatactagtcagtcaattaagtccaagaaacatgtgtattggttattaagagttgacgtggtgataccaatcagcaaagtcactccaaaagaaatcatatgtttctcttcctacatccccaaagaacaacttctcatagcttgctgtgacagaatcaatgagaatatggagttttgacacctgaaataatacaaaaggaatataaggtgnnnnnnnnnnnnnnnnnnnnnnnnnnnncagggtaaaaatattataccgcccaacactcaggcaagggtaaactaagcagggtttcctctttgtccaactgtcaaaaaaaaaaggaagcacaatgttagaaaaaatccttattgtaaagtgtcacaacaaatcgatagtaagagagcagcctaaggtagcttatcacttgtgatgcgactctgcagctgttttaagtaatggcaaaaggtatgcaggtggagatactcctggaaagaggtctgaccaatctcctatatttaaagctacctcgtttttttgtgagacttttatggttcatgatcccaaacacaaagatagtctaaacatattatcaatgactttcgactttataccatacttagtctgtcactgaaaggacaaatataccacaattccctaatactttctagtggagatggaaaaacaagcaaaccttgaggtccagcaaattctcccaagcagatgtatcacttagactaggcagactatgaagcacaaactttccagcattccagagtttgttggtgaatgctttatttgcagttaacctctcagtagataagttcagatcctaacaaaaaggtaatggggaaaacaaggaatatagacataaatatgacattttaatataaacctacccaaaaaagcatggttcagctgcctcaacacagtagagatcaaacctgaccagcagttcctagtgcaatcgtaaatctcagagcatcagtgccaaaatctttaattgtgtcaagcggatcaatcacattcccaagagattttgacatttttctcccctgataattccaaataatctgattaactacttggagatatacagaacgagaatccttaaatagaaatcctagaagttacctaacgtttaatagcatatcgggaaaagtgagaaataatgatatgaaaagcctcaatgatcaaggtttgagtggctacctcgtcttgaaaagaaaagaaaaaaaacatttactagaacaaagcaaaagcctaacacttacttgtgagtcccttataagtc

SEQ ID NO: 29358 - DNA, 1880 bp, Arabidopsis thaliana landsberg
taataaaaagggtaacacttatgagaaaaaaacaaccgtagacgtctgctgtagaaaaaaaaaagaaataaaaggaaaaaacaccacaaagctggtcactccgctaccgaccactcacatcacaagtcacaacctccgctttgagatgagagccgccgccgccgccaccgccaccgtgagtcttcgacatttccgcagcttccctactattgtcccatctcttctcttctcctcctcctcctccataccttttcactccccccgtctctgcgtcttcctccgccctcgccaactcttccttaaccgtccactcgccgcaagtttcagttcctcttcatcaggttacaatctcatcatctccaatttttacccgaacttatccaacatttgcttagacgactaatattaatctgtaggtgctacctctgattcgacctacgacgttattgttgttggtgccggacacgctggatgcgaagcggctttagcctctgctcgattaggagctagtactctgcttctcacattaaacctcgatcgaatagcttggcaggtttgactttagtcataattggttacatacttgttagaattgtggtatatgagtgtgacatattgttacgtgaagccgtgtaatccagcagtaggtggaccagctaaatcacaattagtacatgaagttgatgcacttggtggtgatattggcaaagttgctgacaggtaattgtatacaagtttcttatctcaatgaaacctcttggcttatgcattgaggtttggggtttagcttttgagaattgttttcatcaaacgaatttgtttgacttgtacctatgatagcatgagtaataagagttatgagaaggagatcaatttgagtgatcatatagcttgcctcaaatctaatgagcttcaaacgcttaccgctgatgtaatatcttaacagtgcagatgctatttacagaagcgtattttgaatgtctcaaggggtcctgctgtaagatcgttacgtgctcagactgacaaaagagaatatgctacggagatgaaaaagatagtggacaggtcagctgaagtttacttcttgcttacatgtatttttgggccatataattttcaagctggtgtaagatgctaaaaaattccaatttacttattacgagtaatggcaagaatacaaacttgaattacaaggtgtatatgtttcttgtaaacaattgtttttgatttcttctattctggctataactgtaatgtttccttggtatgacagcaccgaaaatctctgtattagagaggcaatggtaacagatatcatagttgggaagaatgacaacgtgaaaggcgtggccacatttttcgggatgaacttttatgcaccttctgttattcttaccactggaacctttatgagtgggaagatttgggtcggtaaaaagtctatgccagcaggaagagctggcgagtcagcttcacaaggactgacagagaatttgcagaaacttggatttgaaactgatcgcttaaagactggtactccagcgcgtgtggatcgccggactatagacttttccaatttggaggctcaacatggagacgaagaggtatcactctacaattattaaagtaggcttttcatgatcaatattgtatggttacatgggttaaagcatctcagtcggcgagttaccagaaaagtttcatatactttcttgacgagatcagtttgaccacatttattggcgctttatatattgtatttgaagatgctgaacattagttttttttccccaggtcagctggtttagtttcgacccagattttcacattgagagagagcaaatgtgctgctacctaactcgcacaacaaagattacaca

SEQ ID NO: 29359 - DNA, 2816 bp, Arabidopsis thaliana landsberg
ggtggcgatggttctggttaatgaaatgctaacccggcttcactaatgtctgtagctggagttagagattcctccctggcagcatcgtcatgctccgattcatcagaaagatgcccagtctccatgtcattgtcactgaccccagtgggaaactcactagtcatcagatgactccagccctcgtactcccacaacccatcatcaccatctgcagaggactcattaaaaccgtcggtataactatcttcatctgcatcctcatcactctgaaatagcttacgcttccctttgcactgacgttttgattgctctgccctctcaatctcttctacctctcttaacatcctcatatcctccgcctcagtctcagattccacatatgcattagagactgaatcctcacaattatcggctaaattgtttgataatgatggagttgctgcatctgcaagattaatgataccatttgcattggtactcagccacggctctgtgctactctccctcagttgtggcacaacacaatcagttgaatcgtcaccggctgtgcagtttgcagctgtggcaatattcactccaacagtttcatttgcatctgttgcagcagcaatcacagttgacgcatgtggtctgaaactactcatcatattcgaacattcagctccattactaccattcagaatccccaatgctgattggaaatatgttatctccttagaacattgtcccctttcttcatcagctttctcaccatctatagcttttcctttccctgagcactttaacaactccaccctcacaccatcaactagataaggtagagattctagagaaagcaaaagattaagctgaggctcactctcccttaccctaaggaagttcctcacagccatgtcgctaccaacaactacaggaggccttgggtttacagagaacatagacagttggcccgacaaccaataactcaactgcggcttccagttttctgcattaagttcaaactcctcacatacattgttattcagcgtttgaaatgtcattgccacattcatacatacggtccgagcgtaacaatctttagcaacaacaaatttccacactcccttctctgaacagtcccaacctccagctataacacagaccgctacgtctcccccctgttcaattgtttcacaaactgtaaatcagatcacttgtaccaaagtacaagtcacaaactatactacaagccacaaactatactagaagcaccaaattacatgccacacactatactaccagccacaaactatactacaagccacaaattacaagtcacaaactagtcagtaaggcacaaactataaggcacaaactataatagaagccataaattacatgtcacacactatactacaatgacaaatctgattccaaattacttacatgtgggctcatagcagcagcgtttggtcgtcggaatctttactattcgtcgtctactgacttcttctgtgcaatcaccttctgccgtcgacgatttctctagggtttggaaaaatcatcacaataatgtacacgcacaaaacaacccttaaatatatccagcaatataaggcccttaatcgtcgttcacaagttgggttgccctcgtgcatcttcggcgtccacatagccacgaacagtgcggaatagtaccgccggtcaagtcagcgggcagacatttcgaaacataacttatcccgccaaacaatttcgccatccaactcaagggtacgctcgtcatttcccggccttataagtacctactctcacaagcccaccgaaatgtgccttaccattagtttttgggctgaattgtaccctcccgtacaaaagcccctataattcaagttttttgaggactttgtgatatgttttctcctgtcacaatatttaaaatataagcaaaaatacattaaaataaaataataaacttactaaaaaaagattaaataacatgattcagaaacactttcataaatttagttatagatgaaactactgcgtgatatttttaaaaaaataaatgcctccataaaattactaaaaacatactctaaatactttatttcatgtatcaaaggaaaataattagagcaatataactctacaattgttttcttcccatatgttaggtttatacatttgtgatatacatgaatgtctagcaaatcattagacgtaaagtgtaaacactagtaaatcaatatttagaaaatataagaatctactaaaataaataccataattttatgaaaaaacggattcgagttctactctgtattgtaaaattatcacatctaggctccgaatgatgacgtgcaattcaactacggataaagtgcggtgtggttttaatagtaacaaaaatatatacatatacatacatggctggtcccgactatttggagaccaaagcaacaagttatatattttgggattattataaaatattttaaactttggaggccttttttttagaactaaatatttttggaggcctatttgcaaataagttttggtgtaaatttttgaaagaaaaatggggtcatattcaaatgtttcatgtggctcccttaaagactagtcttgtatgtatatatgtagatattttcgttactattagaactatacgatattgtgtggtctgttctctattcggaaccctagtctgaccctttgttcaaaaaatcggccgcctagccgggcgcctaggcgctaatcagatgggatccgcaacaatttttttcaaatcgtgaagaataatcgttgatccgatttttgtccgtatagac

SEQ ID NO: 29360 - DNA, 1880 bp, Arabidopsis thaliana landsberg
ttgtttgatgaggtactgaagatggggaagaagctactgataattaaacaatctggggatgatgcagtgcctgaggatgatgatgttgtggttttgggatctattgctttgtctatggagtttgcaaagaggttttatgagttgggttcttctccggagtgtcatcaagggtaataggaaattgatatttgctctttacaaggagtttttgcagttggagaaggatatgtcgagttctagtatcgaagtatctatcgtagaagcttctcgtcctggcaacgatgaagttcctgaatcggttcctgtgtctgagtctgaatcaaatgttgtttctaagtctaagaagattgttgctaatgggtcttcttcaaagaagaagggtttgaagaaatgttcaaagactaaaaaagacagtgtcaagaagggtgctgttatggatagtgttgtcgatcttggtaacaaagatgaatcctttgatgagactatgatatcagatcttcgacaggagtttgagaagattgcctctgaaatgagtccgtcaaaaagtgaggttgcaagtgtctgtgacgtggcagagcctgtgtccgtatctaaaaagaccaagaagaggaaaagagagaacaaaggggaagagcaagttagtactgttaacagagatgcagcagagacaagcttagctggcccgagcagtgagaagagctcaaagagagtaagattcgcaatgaagaacaatttggtgtggaagcctcattgccctctacctccacaagatttgaggtgtcctccgtctgctacaccaagaggaagtgctctgaagcaaggaatcccggccggtccagtgagggagttggcaagtaggaagacgaagaagaaagtgaaacccgctgctcgtagaggagtgaagtctatcaagaatttgaagaagaaattgtcgccatgaaaatggagtgtcaagtcgtttgttgctttgctgctagcttttctctaaattttcccttaaattttgttgtagtttcaattttcaatacgtatttgagattttgtttactgatttgacaattatgagaaaaattgtatgccattaaaaaaccctgaaaatttcatcctgattccgtttgttcacacctctacatgaaagtaacaaaaaactacttatcagctccaagggcaataaattacacaaaatttgacatcactactacaacagtgaagactggactggtcatttgtttctgctcttctctttctatctaattttgttgatgtatgagctcaactttaagaatgtggttgaaggagcaaagatgcgtagataagatggttccaaacatcgggaactcccggcaggcaccagtggctgcaatcctgtcgccttgtcgacactttcttaccatccgtgttggtcttaccgtagattgatggatgtccgtctttgcggaaattagtcagctttgtcacgtttagaagaatcacaggaacttgcatctcctttatggcttcctggactatcttcattttcaaaggataggaatcgatgattgaacccttcttcacaggttctacctccccgttgcatgaccctcccgagtcccactcacctcccctgttcaagtcaggacacagaatacacggaagaacttaactcttctgtaagaaaaccgcagcaaaagtaaatactatgggggtggcgtataaaaaaaacaaatttaatctgaacctaagtgctgaaaccgaaatgaactcactttcgggtggtaactaaaagatcagggtttaccgaaaatgggcagaggagtatccgcgataaaatacaccctgctctttgggattcacattctgatcgatcatttttgcccaagtcttcagcgaccttctgtatg

SEQ ID NO: 29361 - DNA, 2088 bp, Arabidopsis thaliana landsberg
tcatctagagtatgcgtaaaatattaatattacttttcttctaatctctaataaattgattaataaaatataattttccaacttatcaattttgacacaatctttcaaatgttaagctatgtcaaaaaatgtttttctttttcttgatattatacttgcgcctcaagatgttggcctttaaggtgtttcaaagggcattacaaagcaaatctgatcggatctatgaatgtgtgaggttgctactggtccaacgtttccaaaattttaagcgaaatgtaaattttaatctttaaaataaacaaatcacaaaataatattacagaaacaatagaaaaaataatgtcaaaacttcataaaatcaatctcttaatagaaacactctgattcttataaaaaaagtggcgggaaaacattttgtggatggaaagtagtctgataattgagtggtatcatgaaaagtatttgaagttgggtacttttaaatttagactctcatacatgggcttatctctcacctatgatatgggccggtccgggccaggtgaacctagttgacacatacctgcatgatcactttttgaccaagcaacaaagacaaatctattagatgaccgacgaagagaaccacgtttttcctacgttctcctccactataacttgcgcattagatacatgtcatacatcattattaatgcatctaattcgatcaagctatgacgaataaccaacagtaactaccaaatttaacatttgtcgtttgtactcttggggcatatacctcagaaaattataaaccgttggcccacttcacgaattcgaagttgttaatgttttcgaccaatcaatcttgcttcttgttaaagctaatcaccctcacgcgatatttcgtattagatccttacctatatcattagtccaaatctctagacatgtgcatagaatatattaaaatcggccaaacctgaagtagtagtatatttgctcggaaaagacataaagaaaacagggaatcagattcacgcccatctttcatgtggactacaacctcataacatgtagtattatataaagatacctacgatagttttcaaaaatatccctaacaaaacaacactccgatccaaacaagaaagagctagtttaagaatggtacttggaaactcctccagtcacaaatctcatcaccatcaacatcataatcatcatcaccgggactcgatgaaggagttccgagctgtctttgcagccgaagaaccaatccagggcttcgagtatgcagatatgaggaggtcaaagagcgagaatatgggcactagagaggttgcaaaagcagaggatgttgacaaagaagctgagcaattcatcaagtttgagcatacgaagttcagtaagtggatgactaagagcgcctagtctatgtggacgaagaataaaaagtaataaatgacaaaccataatatatagattgtattgtatgatttgtgtttcttcttctggtttttatttttgttatgtaacaaaatgggtgctgtttcctttgtctagaaaggtgcatggaaataaagactacaaattagtatatttcatgaactcttggatcttctagttccacataattgttttttccgataacatgcaaaatctggtttgaattggaattgtactaattatgctacaagttatggtcttagtttcacatttaaatgcaagactgtcacactaatcatgaatacatgagataaaatgcaagatataagaactcaattcgttctaaaaggttaaaatacaagagagcttaaagagttgaaaatatgcaatttcctttattagagaagaaaaacgcccccctttttcaactcaagaaaaatggggaaaacgttcacgcacatcaattgtatagtcctttattatgaaagaaccccttctccatgccaagaaaaaagaagggtaaaacacataatctccaaaaagggtaagacagaggatagagaatgtggtattttcctatagcaaagcaaaacccaaggaaagtgtaaaacaagattcaaccactaaagaatggacctgcaaagagggcatgtggtgtgg

SEQ ID NO: 29362 - DNA, 2414 bp, Arabidopsis thaliana landsberg
  unsure (1)..(2414): unsure at all n locations
aagcaattatctgtaaaattgacaagtcaaaaagaaaacactagtaagtctctatttactaaacgtagaagagcagagttaataaacatgctacaagaccacacctttgcacaatcaccaagccaactcataatggcacgtgccgcttcaaatatctctccaagggcagctagcgtcacctgaggagaaatgtttcaagtataacattagtacataactaaaaacaaaataacatttatccgcgtgaatgccactattcttcttacttttgcagaatagcaagcagcagcaaataacattctctcgtcagtgataacacctttctcttctaatcttctttttatttgttcacgagcccctacataggtgacaccatatactgacgtcattaccgtctgctttaccagcttcctgtcgacctgaaattagaagaaaacattgcatcactgggaagaacttttgctgtggcataatgttcaatcaaaaaccgttgatactcacttgagtgataaggatctttgccagtgcggcggttgggtttgactcaggatccttactgctgtccttcttcattatttcatgaactctatctcagcacaagcaaagaagagaggagtgagaaagagagacagagagaaaaaccataagaagctacacttgacatgattccaactcgaataaatgaaattgacagctactccattcaaaattgatatgatacctccgtgaaatttcagagtagacatcagctggtttttctcctgcaactagattaactgccgcagcttcaaactgagagaagccagtttacaagaagagaactatatgagattgaaaattactaagagaaaaaagcatattataaatgttcacaagagagcctacactatctcttcctaaagctgcataatgctgtagaccattgcacgacccatcctgcacatagaaatgattcaaggaaaaagtgttgtttaagaattcaaagattctttgaaaagagtatagcacagttgattcagatcccaatggaaagaccatatctggtgaaaccaattaaaaacttaacaaaagggaaaagcaaacagtctactgaattccccaacctagaatcttctacagaaagcaagtgtcaagtaacaaaaaagagtaggataactttggatataagtttacggtgcttacctgatgaataggcaagtgggaaattactgaataaggtgaagggcttttcaaggcttgtgtcagaataacacatgcagctaaacactgaaacggatcttcagcctttaaccaccatcgttttccatgtataggattttcagctgaatccattatatcatccaaatggttttccacgaaagccagacgggcatcatgtgagagcttttcaacaccacctgcatagaggtttgctaaatgtattttcagccaatgcaagcctgactttccaagtggtcgtccttcagcaaactccagggttccacggcaaagatcagaactcagatgattcagatgaggatgcattgggtatgcgcggcctctaaagtcaagattgtgagggtagtagaatccttcttcgtccttcatttttctagccacctgcaatgataacctttagtctatatcttttcctagttaagtgaagacggaacgaaaagtcttaagcagtaagaatgtatttcttacagaaagtttgagctcaacatcacatcttagagaatgcctctctctgttaatcttgttggcctttcgagcactccatttccaggactggagttcttcaggatcctcagaggatggtttttcgggtatgggaacctaaacaaaaaaaaaataggaaagagaacaaaaatacgtcagacacataccattaaaacctataactatgcagattaattaactcttgaaatgaaacaatgaaaggtaaaagttcagaaatctcataacatttctagtgacttacatcttcacgattaactaagcctgcaatgttgcctccatcagcccagagcctttctaccacatcaagtatattcctattcaccctccacttggtattcccaagtgtatccaatgcctattcaagttcaatttcggaatattaatannnnnnnnnnnnnnnnnnnaacaacaaaatatatattacaagagcgaaaataccaatgtacctcaaatactctatgagcagtcttgtgactaatatctttcagtgcatcttgctgctttttggatccatgagtacgcatgatataggaaggtaaaagcaagtaaccacccttgtcatatctgaagaaaatgtcacagcatttgcatacgtaagaacgaccaccccatcgctaaaaataatgtgtggttctaaataataaagcatgattcataaggggatcaaacctagagcaaaacaagaaggagtt

SEQ ID NO: 29363 - DNA, 2139 bp, Arabidopsis thaliana landsberg
agcttgcctgcgtcgggtcttgaactgattgttggtttcaattagtttggcaaaggcttctcccgcttgggatcaggcgacccatcttctgatgacgcagtcgacaaaggttgctttggttttctaccgagagattttgctctgcttaggttttggttgtccggttttgcttttgtcgtgcttgacgtcgttgccataaccacaagaaatatacatcaaagagaagaaagaacaaacaaacaaaaatcttttttttttttttgaaggaaaggaaaaatagaaacgtgtatatcaaggaaacgaaactctttggaagaaaattagggctttctataaaatgagaatcgattacttatgtgattgtaaaacggagcttaaatctcgcaattgcttgggtggtaatggtggtggaggccatcaatctcctaacaaatttaaaatcaaaaactaaattaacattataaaacgattccggtcgttatggacaaccgtggacttttttgtttgagccgtttctatttatatacaaaagacaccaattggtttgtttcttaactttgtctctctttttggttttggaccgtgtcattgtgtcaatgtcagtaataagataattgtccccacgtcattagcatgattaaataattaacaccacgtaattgcgacttacgagttaaactaaatcaacataaacagaaaactaaactaatttaattagacgaagattataaaaaaattagaaatgggcttgctcaactctgatggagcccattgttgaactgttccaccattattctacatgccatccactccgaccaattccttgctcattcactctctccttttcaatcatttttttcttgtcgacatataccttttcaatcacttagattgtagaaaagtaaagttattagcagtataattttatgttaaatctcatgccacatggcgatagttgattgtgtttaatgatgaaatatctaattatctgtaacaaaacaacatcaccaaaaattctggtggctatttgtgacactataaccacgaatggccacaatttttattttttgtcgtagcttttagctaagaaaaaatatgtagctattaacattttttgtttgtttttggtagtcgaaaggttttaatttgtggcagggtggtgtgaattatgataaggttcgtaccacctcttccattgttcccttgtgcatttttcttcttcttttgggtcccaattcctttatactattacaattttaatatttgaatcgtagtgatgtctagacttcatcttttaatatatttaagtaatgggccaaattgaaaataaaggctaattgagtctaagatcaacacaattttggtgatgattaaagttcattaaaaacccatttgaattgtagacttgtagatgtgtagactttatcttcctactctgatggtaaagtactatgtcatagacagcacatcatagtacttgtacccatcaatctcgtgcaatcaccaatcataacattctttcttccatgaaaatggtgcgagaagttaaaagattactaaatttgaggttatacttccacaaaggcctgcttccacatagcatgatttgagttagcggtaacttaggttgcataaaatggtttgtagttctgcaagtgtttgatccgtttcattaaatgaattattgaagctcttgcattttcaggaatgcacaaacttgtacacgccaagttattattagttgtaggagtgattttaatttgttgatatagtgatatgtctataatttgcatgatttaggcattcattcttcaccattttgtcattgtttcatccacattttatctcattaggagtcgttttagtgtgttttacatacttaggacgattttgcattatgattgcatgtgcatggcatatttggttgttttcaggtactttggatgcttttggagttcaaacagaggaaaaacagaacatgaagtcagaatgcccaatgacgccttcagcaaaagtactctatcgcagcctcggagccctgccagggcaaatcactctatcgcaacctcggagaagcaagcagctcagtttcactcaatcgcgaagccggaggaatcaccccatcggaaccagtcgact

SEQ ID NO: 29364 - DNA, 1567 bp, Arabidopsis thaliana landsberg
taacgaagtgtaattgttatttcttaccaatgacatagtaacaaaatggtctatcgcgtgaatatattatgtttggcattaacaccaatttcataaatataaccgtaaattaattaagacacaaagaaaagtatgagtaatatggtagtgtaattgaacatgatctctcagaatatggtaatataaatttcaattttctcttttgtcaacaacactctacgggaacttagttgctgccaaccacacattacgttcgatttcatgatttgttgcattgcctaacaaaaagaaaagtaaagacatttacataaataaaaaatgaaacattttataatggttaatagattcttgaaaactaattctccacaatttgtctcaaacaaattaaataaagattttaaccatgactttatatttttgctaaatgatattaaccatgacttctctcacttggttttgtaccacatatatcttcatggcattgagcttccctcttgttatcgaagcccacaaatacagaaaataaataagtttgaaagctctttgattctaccacaccacacaccatgtacgtccaaagctcttttacataattcactggattgatactttcaatccaaactccatctatttcacccgccatgatcgtgtctgtcacctggaaagttcctccctggacatcagtgtgttcaatccagcaacaaaaacccacaaacggttcccggtttctccaacttaaagctcaaggatgctcgatagtttctcccgtctcagatttattttctttctacaatatggtattcttagagatttccagattcagttcctatttctacaaaacaatttcctttttctactgtttaatcgacaatctatatctctgttttccttgatgaatttaaaacatcattgccaatttaatcaacgaaaccacaaaatgaacaaaaccataaaagcaacaaaatgaacgaaatgagtgtgatatattacaaatgcagtagtatatgatacagaagtcttggggttaaaatcaaatacctaaacaatatacaaggtaaccaaaccaacccaacacatttaccaaagagttaatgaagaaagatgaggaacctaaaaaaccattttaaagagtccaaagaatttcactaccctcgtgagcctatttgcatttatcattctgcaactgtcatatatatgtacttttttgcaatggtattcccatgttacctccattcattctctgatgggcttgactgcggacatcaagcttcaaatctccaaactgatgtattagcgcaccagctgcatcccccgttacaggccatgctagaggattgaccccggtaatgttcgtacccgaaagatcaaaccccgtcatgtattggatataaccaagactgtcggcggtaggaggtgtacagagatatggccactcaaaagtagcaaggggcactccttttatactgaaccggccatggatgagacaacaatattgcaacagattgcccacgggtcccctcaggacaccaacatgtgctgagaagcttttggatcatttcaaacactc

SEQ ID NO: 29365 - DNA, 1151 bp, Arabidopsis thaliana landsberg
atgaattttcttatttataatatactcatccaaattatgaaaaacctcaagctaatctttacaaaatataaatatttaaacaaaatgtaaatattctctcttccaacgaggataacattttttaaaccaaaaaaaaaaaaacacgaggataacattaaacagaacatcaacaaacaatacgataagatttgggcttacaatctttatcacaaaggcttttttaaagcccattaattacattcatcattatctctcgacattaaaaaaaacaaaaagttaaactgaagaagctaaaaagagtttttaacttttaactctcttcgtcttctccctcgtgccgggtcaaatcaatctactgttctctctcctatctggtaaacttttcctcttcgccatgaaacttttttcttgctagggttttagtttctacagttctcttcccaaaaattaggggttttgtcacaatttctcaatttcttgttccatttttcttcttttctccataatcattgcttaatttagaatccccaattttacaaattagggtttttgtttaattttaggggtttttgattttcaactgttaatagtgttctcgatgtcataattctgattttttttattatctattccgaaattagggcaaaaatctcagacaaacctgcaaaattagggtatttgaggatatggattatgatcggtacaagttatttgttggtggtattgcgaaagagacaagtgaagaagctctgaagcagtattttagcagatatggagctgtgttggaagctgttgtagctaaagagaaagtcactggaaaacctataggttttgggtttgttcgctttgctaatgattgtgatgttgttaaagctcttatagacactcacttcattctcggtaaacccgtaagtgttaccgcctttttatgcttgtgtcaattgggttttgtcgtatactctgtggattgattatgtgtgtgtttgtattaggttgatgtgagaaaggcgattaggaaacatgaaatataccaacagtcgtttagcatgcagtttttggagagaaaaatgccacagatgaatggtggcttgcgtgagatgtctaatcatggtgtgaccagttggtctaagaagatatttgttgggggtttg

SEQ ID NO: 29366 - DNA, 1426 bp, Arabidopsis thaliana landsberg
  unsure (1)..(1426): unsure at all n locations
ggtcacataaaccagagatcagcaatcatcgaaaaaactaaccggagagatgagccggatccttgactttcttagctagaccaccaccggatgcggcggaggaagcgtcggcgacaatttccttgaccaaaaagacgaatgcgaaacctccttcgccgagctgcctcacgatcctgaatcgattctcattgatccatacgtcgcctccaccgttgacggcgtcgtaaagtgcgttcaatcctgaaaacgaacagcccatgctcacgaatcacacgcacaatctcctcttgannnnnnnnnnnnnnnnnnnnnnnnnnnnnnnnnnnnnnggaattcgtaaagatccttcagattcgcattattcgagatctcgattttcttcgtctctctgtgttttaattatatggaagtgtagagatttggagttgaagcattcatgtcagctatacgatacaatacatacaggcacacaattccgtgtcacttaattaattaattcattaaatttatttgcgttttagctaattggttcgggtaaataaacataacactaatatatccaacaaaatcattaacgagaaaaagtcgtaccaacaaaagacaatcagtttataatccacaatttagtagtcatcatgtaatatggaactaatataacaactaacaatgaaatacttcaaaagtagagatttgaatggccaaattaagaaaaaaaaatgaaaattctactaaaaaaatacaaatgtaaattaattattcaaacttgcataattaacagaacaaaaatctaattgttatgccataatgcaagcaaagtttgatcggaatgatgacccaataatatatttcttagtcaacgaaccataaaatacaggatccaattaatgaacggctctcgttcgtcctcacgcttcaaatctgtattttaaaatatcaacggccaggattcataaatccctcggtggcgcgtagagacagtcagtggccattttcggcgacggaagtaggctccgccggctgctgctgcgttatacaatgaatgtttcctccagcaagaacgatctctcttgcattctcgattcccacaaccttcaaaaaaaattcagaagaagaagaagaaaaatcaaaatctgtttttgtttttgatccatgaaatgaaacagagatggttttaataccgagtgatgaggaaatgtatccgagaggacacgaatcgcttctttatcacgtattggatcaccgaattgtggagcgattattcctccattggcgatgtaaaaattcacatacgatgctgcgagtcttgtccctgcaagtcttggtatagcttcaccatcctgcaacaatgaaatcgatgaaatatttgtttcaaaacaacttcaaaagattgagttttatctagtcagtattcattacctgagtgatt

SEQ ID NO: 29367 - DNA, 1172 bp, Arabidopsis thaliana landsberg
atagtagtgagattattactcattcctgaaatgcttgctaagtcctattgctattctcctaggattcaaacacacttcatgttcttgttctacatatttgacaagaaaagaagtgccagagaagtacagtcaaattaccagtagaagcatcttttaatggctctttgctattctcccggaacttatgatgcatccagccccaaaactgccagaaaatgagcttttgtaagtgttagctatgagatatttaattttggtttttagatatagaccataccttcattttcgtgcttcagttgctacagaatactagaggagaaagtgacttttatagagaacaatgattggtaaagtcttactgtggcagtgaattggttgcaactgtatctcaagtcttttaggttgatgacagtggagaccaacaccaagaaagctacaaaattttggttggccattctctttcaagatcacatcaagaacaagttggagggccattacatacttgagcccctactgttgtggttacatgacgcctcaaattcattgatggagtagctatccgtaattacaatcatcgagcatctcaggtattactattttatcttgatttgagtttctacattgtaaaacagtggattttatgtggcgtttacatttacaagtcatttgcagataaagcatgaataaatagtcaatttttgctattgctctgtgttgtaaaaaccttgatatttagactttctttcgtgcaaattgagtgaaatggtctattcttctctagtacagtagaaggagtatgcactctgcttgaaatctagttacataggtacaaactcattctgtgtttgattatagtaacaatgtaaactgtgttttacactgatactgctttgcctagagatttattttattttacttgaaacaacaatcaatgctggctccttgctcacttagagtgattgtggctgcattctattcctagagtgattgaggctgcattatgtggtaataattttcttatataaagagtctgctttgttgatctgtctgtctccgacaagaagaaaatgcaatttggattgatgaccatcctgcagaaaagtaaagaaagagtactttttccaggaggcatatgggagctccgtgacaaaacaacgaaaactttggggcta

SEQ ID NO: 29368 - DNA, 1753 bp, Arabidopsis thaliana landsberg
  unsure (1)..(1753): unsure at all n locations
cctaatggacaataacggaatttgatagttgacaaaaacaaagattaaatgttttgacctggatgaatcctcttcctcaaagtggtcttagatctatctatggtaataatcttaatcgatttagttttaattttaatatgaatcattcattatcttaagtaggtcgacataatgtnnnnnnnnnnnnnnnnnnnnncatctcttatttttatttttgtgtgtcgagtaataattttgaaattatttttttataataaaaaatcaaaaacattattaaaaatagttctaagaaaaacattttgatgatagaaagcccaattgttttttaacccaaaggccaatttgtctttctttaggcggggctggtatccttaaagttctagtttcctcttctacctttataatctctcattcaacgaacgtcggaaaatctctgccaatcactacaacttatgttaataagacttgggctcacttgcaaaaaaaaaaaaaaaaaaaaatcagagataaccttcttaattatatttttttcatcgaaaatagaatatattgagtcttgaacaagtcaaattaaccagcatcccatgtgaacaatcgaacgatgaagcattacctcaaagccaacgcagcctcccgcttaagttacattagatagatgatagatcaggccgcctttcatatgtgaagataagtgttggagaaaccagccatcaagtattgattagtcaacatcatgatatcttctattattagctatttacgatttaatatctactatagattacagtctgtgtttcctacgtggggttgacatgatgacatgtaaaagactaactcttcttcatcagttcactataaatagaggttgatcttatgcttatttcttcacatcccacattcaaacatacaaaagacatacattgcaaagcaaaagtataatagtcatggctaagtctgctaccatcatcaccttccttttcgctgctcttgttctctttgctgcttttggtgagtaaagatcttatataattgtcatatatatgcatggaaaaaaaactttgatttttctttctcttttagattgattgataattaacaaggggtgtatatatatgcagaagcaccaacaatggtggaagcacagaagttgtgcgagaagccaagtgggacatggtcaggcgtttgcggaaacagtaatgcatgcaagaatcagtgcattaaccttgagggagcaaaacatggatcttgcaactatgtcttcccagctcacaaatgtatctgttacgtcccatgttaatctaccaaaaatctttggtgcttgatcgtgtgtgtattttactttaaataagtcggtgtcactctatgagtgactttatgacatgcatatatgtttatgtttttatgtttggtttctccttggtataataatactaaaaaattatgtacgacgttggactgtttcatcatatcccataaaaatacatgattggggtgaaaatcttgaacatattaaaaaaatattaaatcaaaatgataaagatagggatttataaatgtaaaacgggcgtgtcgagaattttatgggcattgggacaagctttatatgcagcatgcatcgccgcatcgatatcccgagggtgcatcgtttctactttcatgtcccaaattgggggtaacttacaatatatatcatgttgcctatgtaaatttataatcataaatctaaaacccaaattttatccttattccaaag

SEQ ID NO: 29369 - DNA, 768 bp, Arabidopsis thaliana landsberg
aatgaaagagaagatgcgtgcatgtttccttgtaaggcggaaaggcacagtttcgttaagctcgatcatcccattggaatggtaagatgggtgaaattctgtctggaacatttttccagaatttttggcgaacaagatcttgtttggggatctcccaccaatttgtagaatgaaggacatgaaattggagacagctagctggacagcaaattgcttcttgaaagcccaaagatgacttccgctcattgatgtcttgtacatgtactgagagaatatagtgtcattgactatgttctttgtgatttcaccataagcctgtagccgaagatctccaattgcttctggtgagatttgccctgtgatagcttgattgagtttctccttgaagtaggtaataggaagatctgactctcgaccattccttccacagtgattctcatacacctcaaggaaagtgttgtacatgagatcatcctcaaccattcggacctgtgacgaaaaatgttagcatgcgatactcctagagagatttacctactcttattatggacagcgaaaaggatagctaagctgaatatgtgaagtttcagggaaatctcgtaaagtgaaccgcacatgaattataattttttcaaggtatacctgagaccagacagggattatgattggagtgtgaagtcctaaatggccccttctccactctttatgcttgtcaaacataagattcaacacgcggaaaagctgcaagattcgttcgtcactcctcgc

SEQ ID NO: 29370 - DNA, 2646 bp, Arabidopsis thaliana landsberg
tgtgaaagagctcgttgagaacagcctctacgccgattcaagttccataagcgtccttgtcaaagacggtggtttgaaactcattcaagtatccgacgacggtcacggtattagagtacggttcttctacacactctctttttgaatttcacaaatttgggaaatttctgattctggatttggttttgtgttcttgttgattcggatttgtagcgtgaagactttccgatactatgcgagagacatacaacatcgaagctgactaagtttgaggatttgttctctctgagttcaatgggatttagaggagaggcattagctagtatgacctatgttgctcatgttacagtgactactattactaaaggccagattcatggttataggtttgtaacattggtttgattaagttatgttttgctctgttcaatgtgtgaagaacagtgttgttgtattgaatctgcaattttttgtttgttcatagtgtcttatagagatggtgtcatggagcatgaaccaaaggcgtgtgctgctgtcaaaggaacacagattatggttatctttcaaatctggttaagcaaagagcgggggaaacgatcttcttcggtaactttccatgtttatgtatgatttaggtggagaatttgttctacaatatgattgctagaaggaagacacttcaaaattctgctgatgattacgggaaaatcgtggatttgctgagccggatggctattcattacaataatgtcagcttttcttgtcgaaaggttggtatacttattaactaaactagtcgtatttagcaatcttttgtgttttggaattgtgaagtgaattttggatgatactgtctcgccagcatggagctgttaaggctgatgttcactcagtcgtgtcaccttcaaggcttgattcaattaggtctgtatatggagtatcagttgcaaagaacttgatgaaagtagaagtttcctcctgtgactcctctggttgtacttttgatatggagggtttcatatccaattctaactatgttgctaagaagactatattggtgcttttcattaatggtgaggatttttttccttagtagaaatgaaaagttagtaatatctgatttatcactagataagcctatgtgacatttaatttattgattacaacagatagattggtggaatgctctgccttaaaaagagccattgaaattgtttatgctgcaacattgccaaaagcatcaaaaccttttgtctacatgtcaatcaatttgccacgggaacatgttgatatcaatattcacccaacaaagaaagaggtaattgctttcctccttttattttacctttaaggcctagtagctgctctatattcatgtatgtgggttcaacagtcaacactttatatgagaaaattgtgcatttgttgcttaacttgcttgaataataaattccttatttatacaacaaaataatagatgctttggtctatcgtgcaggttagccttctaaaccaggaaatcattattgagatgatacagtcagaggttgaagtaaaactgagaaacgcaaatgatactaggacgtttcaagagcaggtatgctcgcaaaagaacctgaagcaacatttttctctggaggttaagaacatttatttactaatcatgttttctttcgaatatttgcatgctacagaaagtggaatacattcaatctacgttaacatctcagaaaagtgattctccagtttctcagaagccttctggtattgtaccattttctgggttgaatgcctttcatagtctaaaacttttcctgttgcaaactcttctgtacttttcgcttcatagaaaagcttgtgctcttctcatttactaggacaaaagacacagaaagttcctgtgaacaaaatggtgagaacagattcatcagatccagctggaaggttacatgcctttttgcaacccaagccacaaagtctccctgacaaggtttctagtttgagtgtagtaaggtaagaccccacctgatacaagacgtgtagttacatataaacaacattggatcccatgtcattactgtattcaaaactctcatcttatttaccagtagatgttcactcctttaatttccgtgaaaattgtttcctgcaggtgtttctttggcatgattctttattggttagatgtgttgcgcaactgcagtatattcacttgatcttattacggaattgcaggtcttctgtaaggcaaagaagaaacccaaaggaaactgctgatctttctagtgtccaggaacttattgctggagttgacagctgctgccatccaggtagtttactctgcatggttattcttccgaacaaaactttaaatcaatcctcataactgcttttctcaacattattctctgttaggtctgctggagactgtaaggaattgcacatatgttggaatggcagatgatgtttttgctttagttcagtataacacccatctatatctagcaaatgtggtgaatctcaggtatattcttaatatttaatgtttgatgggttttagctgtacgtaacaaaacatctcattccgcataccatcttattgggttttgcagcaaagagctatctttagagctcattgaacgagca

SEQ ID NO: 29371 - DNA, 825 bp, Arabidopsis thaliana landsberg
gatatatttatacatatctttcggatgtatctttctatcgaatcttttagtttatacgttttcgattattccttacaatcgcatattttcagtccacgttcgtgtctgtatagttggatctaatcatttaaagttacgtctcttcattatattttattgcatttactcgtcacaatttctcgtatgagtagttgtctatctaaatgtttgtgacttttgaactttatatatttgtcactttctaagtgaatcccaaatttttgttctttcacacaaatttgttttattataaatccaaactaattaatctgtaaagtggctccaagttctttactctctaaactatttttaaacatacattatttcaatattaaagaaattcctctaatttttgatctaaaaaaaaataaaaaaattgacatcttcgttagaatttttatacttttttaaagttgattgaaaattcttcatttctatgatcattccaaaatttgatttagaatatataatttttaatgaactttaaattttagattgcaatgtattttgatttattgttaaaaaaactttttttaaaaaaattatcttaatttatgacttttcgtttcatatttgtttattacaaacttttttgaaataattttctccgggatgtcgccggggtctgcgtcctagttattagtacaatggaatcaaactaatgtaaaactgtgaacttgacggaaaaaaaaaaaaaaatactgtgaacagcaaagggaaaaaaaaaagaaaaaaaaatgtcagaacaaatccttctcccccattgagacagtgtacttctgcttc

SEQ ID NO: 29372 - DNA, 1324 bp, Arabidopsis thaliana landsberg
ttaaaacttttatatcttctctaatagaccagtagttcaagaacttttttcactatctattgacatcattcaatctctttccaatgatgacgcatcttggtccatgtggtttgctaattccactgggcataaatttctcataccctggcttcttgtttctaaaatccctaggttgcttgtgatgttttgaaacaagtaaataaaaaataattttgttttcttgctggcagcttggaaagagattaagcgataatctctcccggtaaatctgatcttgtcggatcattgttacctttttatctccttaatggagcagtttctcttcccaatattccctcatatatggactggattggatgttcaaggtttgtcggtattggaaagatcttcctcccggcctatacactttgctgcctttgttgcagtggccttaacccctcgggttactttggatacttgtaacacccctattttacaattagaccatgaggcccaagtccagcccgctaatgatttgaacccaagtgaaaacctaatgatcccacgtgattataaaaggagaacgcaaactccaaaccaagtcacaaaaaccctaagccggcaacctcgcaccactcagaccaccggagatcgttgttgtgttgagccggagtcaccgcgtgaatcatcctcaccggagaggtaacgcacgagaatcgattctggttttgatctcttagtttctttaggattgtttttctttaggattgttgaaccaatctaactagtgaatggaaccatcgtagatctgtgccactccgccgttccaaccgccaagcaaactgtaagggagactcgtcgagaaaagccaccgagaaaggtaatcgggaatcttctcgtgttgttatgtgattgtgttatttggttattaaaccatgatctaaattaaaccaattaaaaccaatgaatcgtgtgtttagttagaggttacgtgaaattgtgtcgtgaggacgaagaatatgacttcattcattgatttagttgttagagtgccggttaattgccaaaccggaagctatcattcacgtgaatgcatgaatccaattgtggacgtagtgttacttgtagtgaatgaatcaatatttaattattagatttggttggattaatttattaaattaagtctagttaatttattgaaggatatatagtttgggttgattatgaaattaattatagattattaatggaaatcatctttgatcgattatttaacccgtcgcagattgagatcgttattggaccttttcccgttgctgttattcatagatcgtgtttccaaccg

SEQ ID NO: 29373 - DNA, 2384 bp, Arabidopsis thaliana landsberg
  unsure (1)..(2384): unsure at all n locations
tttgttgggattaaggtgaaccggatcttggttagcgattgatctctggttctcgttcttttttttctttgtcatgaacttttgttgtttcgtttaataatccaaagttgtataatctaagtttgggattaccaccctattgagtattgagtgataaaaaaaaagttgcgtgaattatcgccctattgagtgatacatcatagtattacatatttatatcctcagaaaatggaccgagaatttttatcaagagatgaatattgttgtcggtaggatttaattatcagtttgtatatacgcagacatatgcaactcgtatgtattgtgatatgcagatattactgatatctataacaagtttgtgaaccttttttattgacgaggtatgtcatcatgtttgataatcgttagcgttattaacagcggtgagagaagcagacttgagatttgctttttcaagaaactatgggcccatgtcgcgctgatccgaaactttaatcccaatagctattatgcacacaagtcaccgtcgttcacgttagcactccaaacccttggcacgtaaacctcccgacacttgctctctttctctcatctccacgatcttctcactctcttggtgagctttttctttcccggtcaaaatttcgactatagaagtttcgtccgtcggtctttctaactgaatcaaattttcacaagtaatctttcgcgcggctcgttttatagaaacacgattcagaatgggaattcattttgttgacaaggcagatctatggaagagtgcactgttgttcaatcttaaacttcgtgatcgatttcgaatcgccgtcgatgatcaccgtggtcgagctacggttttctcaccggatggttgcttctcttccactatccaccgctgggtgactcgattccggaactttcgccgggagtctctcccttctccaccggctttttatcgcagacgaggtttgaatgaatcattaccttttattaactctaatagtggatctgtgtaattgagctttgtgatttgaacttcagctgtttctctgagagatggtttgagtcgtaatattggcgtagattagctcgatggtgttatttgttttgtatcacctgaaggatttgtttttagcactttttggcaatagttttagctgtcattccaagctgctccaatgattctgtttgttattatgtctactatcttgatttgtgggaatttgaattgacaaaactccttgttcttgtagtttctaaggacttaacggcagaagaagagtctgctcttttccggatgctannnnnnnnnnnnnnnnnncttattggaaatgcttgtcatgttttcatgaatggttttaaccgtgttcaggtttgagacatcttagatttctgcttcacaaatttcattcttatctttagtcctgttatcagttcttattttgtttatctttttaggtatatggtttagagaaattgcatgatgctttactcaacagaccaaagaacaagcctcttgtaacggtatgagttgacttatgttctgaaatgttgtgtgtttgtggttggggttttagatgaacctgcttgttttcttacccatgaacttcttaataatcttcaggtgagcaatcatgttgcatctgtggatgatccatttgtcattgcttcattacttccacctaaatttctacttgatgcccgtaatttgaggtggacgctctgtgctacagatagatgctttaaaaaccctgtaacttcagctttctctcgatctgtcaaagttttgccaatttctcgtggtgaaggaatttatcagcaggtaacacaggctgtttttgtagctagcttttcttgattgttacctgctattttatctatattcaaatttactgatgaaaacaagtgtcacatcttctgcagggaatggacattgcgatttcgaaattgaacaacggagggtgggttcacatctttccagaaggcagtcgctcccgggatggtggaaagactatgggctcagcgaagaggggtatcggaaggtgagtcatgtgtgatttgggttcacttcccttatataaagcactccactttaatgtgtcttatcattttattctataacaagttttatttgttttaggttgattttggacgcagatactctccctatggttgttccttttgtgcatactggtatgcaggatataatgccagttggagctagtgttccacggattggcaagacagtaagtatatctgaatctccaattttttcttcctcgtttgtagctttcatttttgatctcttaatagttggatgcatcatgatctctgctccgcccaaaatcagataataaataaaaaaacctgaactttcagag

SEQ ID NO: 29374 - DNA, 1638 bp, Arabidopsis thaliana landsberg
cgttcctctcctcgttatacttttttttctggttttgtttttgttatttctgttaaatccgttgggttcatccatggatcctcatcgtcatcgcctccatctccgtctttcttcttcttcttctgctcgattctaattccgtaagagagaaataataaaggattcatgttcacatcttctacctgatgagcataccatgattctctcgctatgcgttggcttccgcaaatctcgttctcgtctccttcttcttctccatcttcttctctaaaacccgtggcttcttactctgaatctccggatccagatcgtaatcaggatcgggatcggtttcatcgccgcttgtttcgttttaaccgtggcaggctcacccgtcagcggaagcttcgtcacttgacggatgacgatgttttgttgggagaacgtcgtgcttctacctcttcctccaccttcgattccggtttaactcgctctcccagcgctttcaccgccgttcctcgctctccttctgccgttcccttacccttacctctccccttaccggaggtcgccgggattcgaaatgccgcaaacgctagaggattggatgacagagatcgagatcccgagagacttatttctgatcgcacctcttctggtcctcctctcaccaggtatatttcaatttcgttatatcaattagggtttggagatttttttataatctcaattcaaatgtgtttgttatgtgctaatcagcgtcaatggcggctttgcccgtgactcgaggaaagctacggagaattcgtcatatcaagattttagtccgagaaacagaaatggttattgggtgaatattccaaccatgagtgcaccaacgagtccatacatgagtcctgtgcctagtccacaaaggaagagtactggccacgatttgccttttttttatttgcctcctaaaagcaatcaagcttggtctgctccagatatgccacttgatacctctggtcttcctcctcctgcattttatgatattactgcctttagtaccgataattctcccatccatagtccacaacctcggagtccacggaaacagatcagaagcccacaacctagcagaccatcttcaccgttgcattcggttgatagctcagctccaccgcgagatagtgtttcctcacctttgcatccgaggttgtctactgatgttacgaatgggcgacgtgattgctgcaatgttcatcctttgcctctccctcctggagctacttgtccctcttcatcagctgcttctgttccgtccccgcaggctcctctcaaactggattcattcccaatgaattcccagtggaagaaagggaagctaataggtcgtggtacttttggaagtgtttacgttgcaagcaacaggtagtcttttctctctatggtatgatctttcctacagtttttgagtgccaatatgcttcttcttttttagtgcaatcctgagttgtttttcatttgcagcgaaactggagcattgtgtgcgatgaaagaagttgagctatttcctgatgccccaaatccgcagagtgtataaagcaattagagcaggtaactccaggagagcaattctccagtggctcagtacggctgtgtttggttgtctgttgt

SEQ ID NO: 29375 - DNA, 1188 bp, Arabidopsis thaliana landsberg
  unsure (1)..(1188): unsure at all n locations
tttttatttagaaatgtttaaaatttgctttctaatttcaaaatgtaattttaggtttattcaatctcaagaaccagacgatgagttattcacatgaaagataggcttaattaggttgtttctattggcctaagtgaaatgtgtgcctcctatgttgggtgttttaactaatgctgattgatatgtcatatgttgactgattatgttactgtgtttgtagtttacgaatggnnnnnnnnnnnnnnnnnnnnnnnnncggtgcggattgtgctattgcaaatggtgaagtgacaatggaaggagacagtagtaatggaaatggtggtacttcagagaatttggaatgttgttctactcagcatcctatggaggcatctgaggttggtgacaaagaattttaacgtttttttttttttgccttttctgcacaaataattgttattgactttgcagttttttcgctttttccagggcacacagaatgaacaagtggatgattcaaaacagatgagaggacaaaaggtgcaaggaagggtcaagcatgagaagacctctggaggcaagaatatttcatcagtcttggtgaataagaaaaaagatgggaaagtggtggcatcaaatggttcatgttgctccaaacgtaaagcctgtaaagtctcctaagagcaaatcgctcaatggtagagaggctcatgtcacgaaggttactaatctctttgttgctcctatagttactggtgattagccatgtgtcttcttggctgaatgttgtctctgatctcttcatttgttcttatcagcatgggaaccatgactctctaccagctgaagggaccaggtaccaatatcattctttaaaacatggtttctgttttgcatcagttcattgccaaaactctaaaacgattaatgcaaacattccatcaagattatgtattagttcctgtcgttaagtctggtagtttgtttctctctttgatacagggacaagccaaaactgagggaaacaaggaaacaagtcaatgatacatctgaagatgatacacagtagtatgtctttttgggattcactcttcattctcatttccttagcacttttttctgactaaaacttgcttactgtttagtagtccaaaagaagatgatggcaaacctcgtcgagctagtgcacttccaaattatggattc

SEQ ID NO: 29376 - DNA, 1602 bp, Arabidopsis thaliana landsberg
agaatggcaattcttttacagctgtggaccatagatgagagttttacgtacatgatgtttacgataaaggtgagagggtcagaacacaaaaatttgatatccagagccaacatggaagttgggatcaatcgtactatgacaacaatcagcaggctacaaacatgtggcaaccagaaaatgcaggtgcggctgaggcggctgtgactcctgcctcattatcaaactccggaggaaaccagcaagtaaataatttgtacagtacaggacctgtggctgaacagtttaagccatatgagagtggcgttcagagcttcattcctcagcatatgaatgtggctaatctcacgcagaatggacccatgagtttctcgaacggtttttatagtagacaggaatttgttgatgatgctccacagtcatttcagagcagtcagcttttttccccaagtgcaggaagatcatctgatgggcgtccaccacatgcacttgtcaattttggatttggcggaaagctcattcttatgaaggacgatagtggttctctccagaattcatcatttggaagtcaggtaatgaagtggtattttttatattatgcttactcgcttatttttcttatattatgcttatcggagaacttgtatgaaagatattctccaattagaactttaagtgaatcatgaaaatcttttcactgctaacctttttctatccgactcagaagggaactgggggaagctccatctctgtcttaaacttggcagaagttatttctgggagtgcctcttattcaagtctcggagaaaactctttgagttacttcagttgtctggatcaacaatctcttccaggacccttggttggaggaaatgttggaagtaaagacttacataagtggcttgatgagagaattttgaattgtgaatcttcctacatggacttttcaagagggaaacttttaaagatgcttctttctttgctcagaatatcttgtcagtattatgggaaactccgttctccttttggttccgatgcattgcaaaaggtgagcaatccatgagatgtcttatcacttctgttttgtaagaaacattgatatgtattacaattttctcattcttgaatatacactgcaaacaggaaacggactctgctgaagcagcagtcgctaagctttttgcaattgccaaggaagatggcgtacaaaatggttatgctcctattagccaatgcttacagcatttaccaccggaatcacaaatgcaagtgagtattagacatcatatctggtatttatctttcaaggagaatgtttctaaaattaacatggttttgcttattaactcatttggaagaattgtccaggtaactgcttcagaggtgcagaatcttctggcttctggcaggaagatggaggctctccaatgtgcacaagaaggtcatttatggggaccagcgcttgttatcgcagcacaacttgggcaacaggtttgaatctcaagaatgctatagaactaaacattgccctgtaaagcatggatgactgacttggtcgatgtcataattgatgcagttctatgctgacggggtattctttaaaaa

SEQ ID NO: 29377 - DNA, 1787 bp, Arabidopsis thaliana landsberg
  unsure (1)..(1787): unsure at all n locations
cttcttcatcgctgttgtcatcatcgatcagatcaattggtcctgcttctgtcatcttcttggagtgcaagaagtccagaaccccatctaacgaaagattatgggatatctgaaaccggcgcagaagaacctgaaaaggtgatattccagacactttgactaagtttctttatcagaagaacacaagctttaagaaaacctgaactccaagaggagctagttagctaacctgatctgcgatatcatacatgcaaatatatctgctagttcctgcggctagaatatannnnnnnnnnnnnnnnnnnnncaatgttgtaaaacactttccagaacttgaattagctgcagaccgacggtcagtcatgacccgacctccagcgatatctctccgcccctctatggtgtacattaacacaccttcaatggtgtcccagaaattgatctgcccatctagcgtactcgaggctaattgcttcccatcaggacggaaagcaactgttagaacatcgtggttgtgtcgaaacgtttccacggtgcctttgctagcaaacacatcccacaaccgaactgtatagtcccatgaggatgaagctaaaagttgctgcagagaaagaaatatatgaactagataaggcatggaagttataacaccataaggcagaagttcacataattgttcagaggcacgaagcaaattgtattttgactaaaagaagtatgagactatgacagtttatttaccgttaagggagaaaacatcaacccatgaacaggagcctcatgcccactcagaatatcctttatttgcccagtcttcttggaccatacaaaaatctgcacataggcaagcataaagtgattcacctcaccaaagtatttgtgagtaggtgactgaaatccttcagggcctaagttgaattacctcgaatgaatctagggtcccagcacagacgacgtcaccactcgggtctgctgttaaggaaacaaattgtcggggtgtaggggttgtgtatgtcttatagttcttgtatcttttaaaatcccaagcacgaacagtgccgtccagagatgcacttaagagggagtggttgtcagccataaaatgaagagcagtcactgcattggtatgctcggtgaatgtaatgaaacatgttcctgacataacgttccacaccttaaaaatgtaacataataaaaaacgggctggttaaattcagaaatagatgagaagcatggtatagaacataacagctaagtctatgaaatttcattaccttgactttgttatcatcagcaccagttgccaagagctgcgaatccggtgagtaagtgacacagttgacgtcaaaatagtgtccttgttgcttcagtatataggtttcggttcgccaatcccagactaacagttgcccaagtttcgcgcaaccaaaggtcaagcaattaccacgctcattgaagacagctgttgttagcttctgcctagagatagagagcagatggatcagattgaaatctggcatctgataaagcccatggacaccttttgagaaccccgccacaaccatgtcaagtccctgatgatagtcgcaagcggtcacctttgctgatgcctgattgcacccatccttcctcaacaaagcccattttcctctgtgcatatactcttcaccatcatcatctccttcgtgatctgattcaaaacctttcccgtaataccccccttcgtttcttaagctcagtaccgacgcctatacatttgcgcaataccgcacagcccttctggagta

SEQ ID NO: 29378 - DNA, 2163 bp, Arabidopsis thaliana landsberg
cggaaaaagaacaataaaagccgtcctggatcgccggagaaaccacggactttttaaggaaacaacttttccgacaatcttggaggagcttcttctcttgtgcagatatgggaggcgaggctaaatcgatccaacggcggaaactcgcctatccatggccaatcaatcgagatcatcagctcagaagcgagcgttcaagaaatacaccttttagctccatccatcgacggagaatctgaatcagagaacgaatccaagaatcctgatcagacggtggagattgaatctgggactctcaattcggtttctgatattatccggagattgagtaacgaacagaagctaaccgccagcaataatggcggtgcagtcgatatgccgatcgttaaaacgccgacgctggagaaaagcagttttcaggtggttacttgctctccgcgaattcgaggaaggcaagcttactccgatctgcttgtgcatctggaacgcgaacgtcaccgcgaattggaatcacttcttggacgcaacgcagtttctaggtttcctcaacgtggtcgcctccaggtataactagcaaacgccccaaacattttaacaaacgatccagtttcagtgttaaaatcacaatttctttcactattccttgttgcacagtcaatgttgcggctaaggagtctcaaacgcggcctagcgattcaagatcgtcatcgtggtaccacaaaaagcgatttgaatcgcttccaacctagttctacaattctccatctaaggtatgctcaagaacctctgttttacgtcctacaagttcatgaactcatttttctcctctccttaatgtttaaatcataatgcagagaaaaactccgggaaaaagcagcaaacgctgccgctgaagccggactaaagaagggtcaacaatccaccgtagaaacagagagcatgcagtcaaaagaaaccagtggtattcttcattctccttctacagagcggttaagtcctcaaaaacgcaacatagaggaagcaatcttacgcaagaacgaaactgaaaccaaaatgagttaccttcagctgaaaaaagccatagtagcagaagtattggaaagagaatctgataacactagtcctctcaccagcgtaactcctcaagaaccgcggatactaaggaacgaggaagcggggaaactagaaagcggtacagagggaactcaagagacaccgttccttgagacacaagaaatgtcattccaaagcggatgggaagagcaagaagagtatgaggatgagcagtcttattacggagacatgagctatgactggtttacagaaatatctaggcctcggacttattgggaagatctgaggaaatctcggtatctggaagtgatgaacactaaatctgacaaggacgatatatgcagacttcttgagaggtaaacattatcagagaagagagaaacctttttttctttttcaaaaaatccttaatttagttctatggattatacagaagaacggtttcgggtttcctccaaagcggattacgagagaagaccgataagctcaaaatgtcccgcgttcagatacatccggctcaccggattgaagaagcaactaaagaggacgagaaatctgacatacgcgaagaacaagatgaagacagagatgacttgagccaatcatcatcacagatatttgcaccgcctccggcaggatcatggagctctctggacacaggagttacttccacaccaacgcacaatcttcattccactgtgagcctcttcttttcttgttgaaatgtcaccatcagttttggcgagagattggcatttatatttcattaaaatgtttcaggagatggagattataagcgaaatgagatcacaccttttacagctccaactagaaatgtctgagctacgagactctgtcataacgtgtttggacgtcaatgctagccttcaaaagtcggttcacctggaaaatccctttaaacgcaaatgctgcgtttgtaacgaaacgcaagttgtcacacttttatacaggtatgaacagatatcattatatcgatcacctacctctctttgaatatttcgatttggtttggtttatgccacccttacaatatttacaattgcgtttgatttctgtaggtgtgggcac

SEQ ID NO: 29379 - DNA, 1595 bp, Arabidopsis thaliana landsberg
tatgtatcccatacgtgtaagcgtatgtgaaaacagatttggttcaatttataaaaaatttttatgtcaagagacatgattggatccacttatgattatactctatatgctgacaatagaacaatattttacatagtataactcggaagttggtcgagttcatagcatcaaagcgtacttcaaacacacactgagttgtaacaagcatgtccaattgtttagacatgccacaaccgatatcttcatgtcaatatcaaatcaagatgagaaagatcggcttagttcttcctaatatcttctaacttcgtaacatcaatttatattagtagtttatccatagtatgtgaaaccaagttggaaagaccaaaatcagaagtatgataaactccacatacgacgtcaaaaatgtagatgtcgaaattcacatactaatatttttgtatttaggtttacgagggagctcaaatctttgatgggccgaacatccagagtaatgggccaaacttttgcactcactattctcgtcaataaaatggttggtaccaacacttattttgataataagtgatgattattgtttttggaaatacaaaacaaaaaagtatttattttatgaaaggaaaaaaagaaatgtaaatacagatacattagcgtcgaggcaagaccatgtgctcactcacatgcggtcttctcttctcttctcatcttccctttttatgattttttttccccattttcctctgcgtttgattatctgagagagagagagagaagaaacttgttctaacaaaatcaacaacaacttatagaagaccaaaaaaagattcataggatcttttgcttgacaatgaaagaaggaaaggatgggtttgttcgagcagatcagattgatctaaaaagcttagacgagcaactagagagacacttaagcagagctttgactttagagaagaacaagaagaaagatgaagaagacacaaccgccgtcgccatcggtggctctgcttcttcttcccctgtcactctaaacggcggcggatttgttggcaagaggaaacagagacttgagtgggagatcgatccttctaaacttatcatcaagactgttcttgctcgtggcacttttggtaccgttcatcgtggtatctacgacggtcaagatgttgccggttagtcactttcccgtcgttctagcttccttctctcatcgaaacctttccctttcattttatattattagtttgtaactgtgaaataatgctaaagtcttcaagtttagtttaaagtctcgaatttaagaatggattactacatttgtacttgaaatgtcggatccgaaacaggctttgtacttgaatagtttagttctgtgttcgtgttttttgaccatgaaacttgttagattgaaaaaaagtttggatttttaagattaaagttgctgaattgttttggatttgaagagtttttttctttagagggtagaagcaaatcttgtgatctccgtgaagccgacacgggttttgaaatcaaaagtgtttcttcagctacttgaaaggtctctacttggataattatgattcttttgctttgtggat

SEQ ID NO: 29380 - DNA, 1118 bp, Arabidopsis thaliana landsberg
ggccctcaatcaccgagatactgttcttcgacaaattcaatgcatgtaaacctcgaggaagagcaccagcggttattctaactgaaagatgtaataaggccagttaaatagaagaaacaaaaacaatcagtatgtgaagaagattagcaagaagggaaaatttagctacctatagcatttcctgagagattgagaactctcagaccaacaaatgcactgaggaatggtatcacaaccagaccatgactaaccagctgggctgtggttgcagaagcacttagagaggatatatactttttcgcagcttccattccaggagttaacttgatggcatctactttagcagaagatgttgcttgctcattcaacacgacgggttctcttggcaactcatcatcgtaccctgttatttcatcagcttcctcagacaagtttacatgctgaaggtcattgacccaatcttcgatacgcttgaatttagaatcctttcccgaaaattctgcttgctggtttgttgtttctccttcaaggaactttgataatttaagctcatctgttggtggtacgatccaatcttttgccaaagaagaataatcatatgaatcatcatatccatcctccacgagattttccttgttgttatctccagaattatgcatatcatagtcccgatcttgatcttcctcttgcttcacctcttcatcagtctcatggacagatttatctgtttggcgagtgtcgagggcatgaaggtcatcagaggatctagagtggtgagaagaatatttgaaaggtgaagacttctctgatgaagagtcagcaatattaggcaatgaattcgacctcaccatcaaaggtgaatcatgaggtgtttgactgtttgagttgtccatctgttcaccatataaggaggtatcatcgagttgacggctgtctttatcagtatgatgaagatctccaaccgagaaaatagacccacagagtgcttgatttgaaccctggtaagcagaaacagaagctcgaggaccttgctgatacagattaggactttcatctacacgcttgctgctgcctgcctcgtgaataccactctgttgttcaagagaattcggagaagt

SEQ ID NO: 29381 - DNA, 987 bp, Arabidopsis thaliana landsberg
cgttactttttggacatgaagacttggtcactgactggcacgtggcaatccagtgaactgaaggggtgataaaagatggctagtgtaagttaagtgcctgaactaggatagaaagaactctagatacaggtaatgaattaacctgataataaaactgaatttttaaggatccactgtagtaagcgtttctgcaaacaaattctttgatccttgatcaactttaccttgaatcccacaagccagcatatccttgagaagtctttttcctttgtcgggtaagacttgcgaaagtacactccgtactcagggtttttgaacccatattgtacgtgatgaaacagccgagttttgctgtttctgctcaaaggtggtgccaaagcaggaggaaaatcaataaacttgttgttaggagaatgttttgcctcccatttatgtaataatactttatgcactctaaataccctggtattgtaataataatactctctatatatatttatgaatgtaaattaagttattgtaatctgcttccgcttattgtttcctctgatgtgatgtaatatctgcgtgacgggtgaagcactcttgggcaaaatgatgaggatacaattactgaacttgtcgagtgattatgtgcatctacagagttgtccaaggtccttaggacaaggacaactgtaggtgaacctaataccttgggaggttctgtcacacagacagtaaatggaactaatttatttaaacagagaatattcctatgaacattttgcaatttgaatcactaaatttggagttcatatgcaaaagatatgaaataaacaagtttgggaatttaaaatatgaaactaggtctaattctataattatttaaaagtctagggttcaatctgcaagattacagggcctgcgcgcgaaaaccagggacgacgagttaattccagctgacccgagggtctcttaagcaaaactacacgcgaaagggtatca

SEQ ID NO: 29382 - DNA, 911 bp, Arabidopsis thaliana landsberg
  unsure (1)..(911): unsure at all n locations
gtcttgaattaagttagaaactatttctgtgtattttcttagagtaccttgtgtataattttgttttaaaatttctaaagaactatcggtaacttttcttcactttacagttttgttttttacctctacagtttttacaattttcgttcttgttttacagttaaaaaaaaatagaaagaaacatgaaaccaccttcgctttctctgctggtggaaggtgcttcgatactacgacaaagagcagcgaactagtaaagcctcggagatctgaatcccatttcaatcagcaaatctttccgtctctacttctctgtttgccggtnnnnnnnnnnnnnnnnnnnnaacagacattgcttaattttgcttccctttggcctgtaagcagattttcaatttttgctctgtgtttgattttcttatatagttggtttagtaagttcttctatgaagtgagaacaattctgggcacttctgattttttagtctctagtgattttaactagtctattgtgattttgttgaatttcaattttctcagacttaactgataaaaatctgattttttttcttcttcttattgttaagctttgatgatatttttggatcttgttaatatttagtataaagttcgtgaatctaacattatcatggttctgctgaatctatacttaaatttgaaaatgacttatgttgattaaaaaccataacttttttttttgtgtttcagggattgattgaagttaaaaaatagctacattgtactgtaagattgaatattgatgatctcgccgcgcgatttctcgtttgagtgattttcggctgtgaaaaatgaaaagatctcaggacggcttcttgttgtatcaatgtgtataatctagacggtgtatagatatgtagacttgaacactcctg

SEQ ID NO: 29383 - DNA, 1618 bp, Arabidopsis thaliana landsberg
aaaaattcacatgtacatattacgagtataagaaaatattaactaccctttagaaatggtcagcctcggtagaaacgcaccgaagtactttagagtggacttctccacgaaggaccaccacactgtctgtcccgagtttggaatgctttccgactaatgccagagagtagtcaggccgcatgcatttctgactaccaggtaaactaattgggccaaggcccaactgacaaacttcccaaacaaatgtgatttttgtttccatagaggatcgaactcgggtctggaagttttacccttccccaaatcttctcttaccactagaccacaaatgcttgggcttctctaaatgtattttcatttgctttactcatactttatttttttatttaaattactacggtttcgtttaaccataaatacacgtttactattctctaattaggatgactccatatcaaatttatgactcataaacaaaccaaacttggtcgtttagttttgttgaataaagatgatttagaaacatagagaagtccaacactcctccaagcgtccaaggtgtgtgatagtgtgggtcactttccacttgtcgaagtaagagaggtcccgaattaaaaatttataagtgaagaacaaaggagtcaatgtcaaatgccgaccacgcgagagaaaatgacctgaactgatttttttaacgaagagatgaaagagtaaaatggtcaaaacacactaaggacagccaagaaaaagattcaaggttttagagcttcacatacgaatgttctacacttgaaacaatgaatccaaaccaaactacataagtagcaaatatgttcaccctacccttgaaacaacactattctgcaggtcataaatcagttggggaatcttgtagctcttctcacccacgggaccatcgaacgctgctgctgatgagatccagctccattgttgcctacattgcttctattgtctgcaaaccttctcattctcattctctcttccttcatgtttgcaaaccgagaatccagtgtctgaggccattgcctttgccctcctcctcctccatttgcctgctgctgcactatcttctccctttgctgctgctgctgctgcatgtttaataagcccatcaatcaatcactaataaatctctttatggttatacatgtaagccagtttattgatgcagcaaacaaaagatcgaaggtttaagaagcaggtctaatgcaacataatagatggatatgaataattacctttccgacaaaccctctttgtgaagctctattctgagctggtggagcaataaacctgcacagaaagaaaaaaaaagctgaaaaactgatgaagatctgcaggaacaagccacttataaagaacatcaggagcctagagtatatcagctgagaatttgcaccaatagatcatcgttctgatccaagttcttgatattaaacatttaacttcttaccaccatagaaggatctaagaagaaagccactaacaggttaaagaaagagcctttgataatagaaaaagaaacacttcatgatcctaatgccctcagtgcacaaaaagtatgtagcccgctcatgcaggattgaatgaaagaata

SEQ ID NO: 29384 - DNA, 1804 bp, Arabidopsis thaliana landsberg
gcaggaaagtccactctattaattcttcttgcgggagatttagttccaacagagggtgaaatgaaaaaacccagaagctgaggattggcaggtattctcagcattttgttgaccttttaacaatgggggaaacaccggttcagtatctccttcgtcttcatcctgaccaagagggatttagcaagcaagaggcagtgcgagcgaagctaggcaagtttgggctaccaagtcacaatcacttatctccaattgcgaaattgtctggaggacaaaaggctagggttgtgttcacctcgatctcaatgtcaaaaccacacattttgcttctggacgagcctacaaatcacttagacatgcagagtatagatgccttggcggatgcactagatgagttcacaggtggagttgtgttggtgagtcacgactcgagactcatatcacgtgtatgtgcggaagaggagaagagtcaaatttgggttgtagaagacggaacagtgaatttcttcccaggcacatttgaagagtacaaagaagatctccaaagagaaatcaaagcagaagttgatgagtgaagttttgttgttagcttctaaggtaaactcaaactcctttatgttttataacaaactcaaaaagttttggacaattttatttttagcaatcgtgttctttcatcatttgtgcgttaattacatcatatatgacactatatacatcagtttctccatattacatatgttctgagtgtagggtgttgtgttttgggggaagaaaacaaaagacatgtgcaattctttttcaacagtgtgtttaaattaaagccataataaccagccaatgcttctttatatttttagctgtctgaaattttgctagtttctctcgtttattatatatggctctttctctctcttatggtagttgtggctttctttggttgattgtgtttaccacgcctcttcctttgtgtttattttgattaagatagtgagtatcatatgattgatttacttaaattttctagaggcataaatttagagaaagaaacacattaaaaaaaaaaaaggggaaaagatcacttggatggtttttagatacggattgatactcgaggacacgaaaacgtcatgcttttaatgcttaatttttatttttgtttattataagagatgttggaaatcactatgtggatgatgtgattttggtttagatttctccaaaaatgcataggagattatcttcaaagttttgtaagggaaagaagaagttttgctaacaacttagggaggaagaaaccaatgtttgatgcttcttatataggaggacagaaagacctatccatgtatcatattgggaaagaagttaatttgtctctatgaattacgtgttcgttttttacaggtcggtttctatgtcattggtactgcttttgatgtaaaccggtgtattattgtccccggtttacattcataattatatttactttacacatacaccaaaatttcaaaggtatctaatttctattttgcaatgatatttaattgtacgcgtaaactttattacttaacataaaaatgaaaagttgaaggtaaatctcttttactaaacactttattgtaagtttataatttcaagagactagcgggaaatatcttctgtttgctatttttagcggcggtggaaaaaaatttttggcaaaataaacattgtgaaatccattgttttgctctaaaactaaataagaaattaagtaaattccttttcctttttgttgaaatgagtgaaaatccaaagattaaacaac

SEQ ID NO: 29385 - DNA, 1390 bp, Arabidopsis thaliana landsberg
  unsure (1)..(1390): unsure at all n locations
gaattgaacaacccaacttttagcatactagctctttacgcacactataattttgatcacacttttttcaatgatgttctagaaggaccgcatatcatatgattagtcattattggtgcttaacggagactctgttttttgccaaattgaaagttttagatttcatggtaatagataagagtgatgttttaaaacatatttgaaaccaaagttccaaactaataccattagtaaaaatcatttacttataagttataagccctcgtcatggcccattttacatggttttggattttagatcgtaaagagaatacaacaaaactgtagacaaaacgaaatcaaaatttcgaatcaaaaagttgtacttgtacagtatataagtaactaatcgtcaaatgtgtatccagttaaaatcgtcacatatgtagatacaatgacgtaatgagtacccaaacatcaaatctctatttttattacaaaaaaaaaaaacacatctcatcgatgacttcacctactcttctctataaagacttgaaaaaaacttgaaaacttcttcaaagtttgtatccatttcacattcacagtcaaactcggttgccgaagaaatttcccggcaaaacctcaacaaacaaaaattagagaatgactcgtttacccttacctttccttttcttcttcctcacgtcaatacccttatctgtcttttcgcagttcaacgaccagtcaacgcttctgaacctgaaacgcgatctcggagatccaccgtctctccggctgtggaacaacacatcttcaccgtgcaactggtcgggagatcacttgcaccgccggaaatgtcaccgggatcaatttcaagaaccagaacttcactgggacagttccaacgacgatatgcgatttgtcgaatctcaatttccttgacttatcgtttaattacttcgccggcgagtttccgacggttctttacaattgcacgaagcttcaatatctcgatctctctcagaaccttctcaacggctcacttcccgtcgacatcgaccgtctctcaccggaactcgactatctcgacttagcagctaacggattctccggcgatatccctaaaagtctcggagggatctcgaagctcaaggtattgaatctgtaccagagcgaatacgacggtacgtttccatcggagnnnnnnnnnnnnnnnnnnnnnnnnnnnnnncgactagcgttaaacgataagtttactccggctaacattccgatagagtttgggaagttgaagaaactcaagtatatgtggctagaggagatgaattcgatcggagaaatctcacccggtgttttcgaaaacatgacggatcttgagcacgttgacttatcggtcaataacttaacgggt

SEQ ID NO: 29386 - DNA, 3481 bp, Arabidopsis thaliana landsberg
  unsure (1)..(3481): unsure at all n locations
ttgtaagtttcttttgcactgtaaatgtgacttaattcgttctagtgtctattgttgatgttaatatttatggtcaggaaatattattataaggttgtgtctactgatatgtgtgacttgttttttggtgtgtgtgacttatgtactttatcaacattagtttggtcccaatatcttttgacaactcaacttcagtgaatgacccaaccaattttcacgtacgttaggtttgtatgttgggaattacatgaacattttgttgaacatctataaagtaatgtctggtatgcaaattttattttgataccgtgtctgtggaaaagccggcctgagaatttaatggcttagcttcacgccaagaaacatacataactgacccactaaatatcgattaatccaaattcttttcaaatatatatatataggatcgatcctgaacatccaaaattactccaattgatattatcagcagaactactggggttttctctctaaaattattatataaatcaaaaaccctatactcatgaatgtttgagaagctcttaagtcttaacaggggaaataactagaccttcggttcgagtcttataattaggaaggacataattaatttatcagctatgctaatatgctatatagcctaagaaaattatggaccgatgttatatatataattgtatttgtacatctaagtttataaaattctatatatattactaaatataggattatacaaaaataaaaataatataataataataatataggattatacatcgatggatagtcccaatgatttactagaatagaataaaacatgttcaacttaagaaaagaagagttaaaagccaaaagaaaaaaacgtttagataaaacggaaaagaagagtgaaaatattatgaagacatatctcttatgagttgtccaaaaaaaaaaaaaacatatctcttatgataaattgggtatgtgacgtttctccttttcattttcaactgctgtgtatctccttcctgcagaaaagactttcttgaatattctacaaaaatgcttctcattaaaaatttaaaatatttttaaagattaacttgctaaaagcctaaaacatgtacaaatgcatttagtaggtagaacttaaacagagaaggaagttatgtgaatggctgataataatctgatatgatgcctaattgcctaaacctttttccattccactcttttaatacaaactactaggattacttacctaaactacttgttagaatcttcataatgggcttgctaatatgattatccctaacacataatgtagaaatcgttgagagcatataagtaagatactataataaattttttcctttacaaaaaaaaaagaaaaaaaaaagaagattttttttaaaaagatactataaaatactatatacgcatctttttgaacccccaaaacacatgcctcttcttattattaccaaccttgtaatgggcttctgggacatattgggcctttaggacatcttatttaatgaagcagctgatataatcaagccaacgtggtggcaacaaaagttgaacaagtgagagataagtgcgggaactaaatactctacatcagctacattctatatttgatacacttgcgcttttctagtgtgttgacttctctcattactcaattctattggacaactacggtagtatacagtaatacgatacacctagccacaggtgattagtttgagcaaaacaaaaatgagagtttctgagctcagtatataaatcccttaaaccctactctttgtcttcatcctctcactgcctcttttctcactcactgttacttcgctaaaaccctaatttcgccattcccttctctaaggtttgcttcatctctttaatgtctttcatagctttagaaatggctttggtttctatgatctattgcaaagaaatgattattatagcttgttgattagatatgcagaaatggaattgattttagtcttctgggtttacatgttgtgtttgcagacatttagaaatggctttgattttagggtttgggattctttgtggcctaattgaaaagaaatgactctaatagcattgttgttaatcattttacagatatatagagtaatggaattgattgttgatttagttctgtgtgtagacatttagaaatggctttctgcaacaaacttagcggtatcttgagacaaggggtttctcagagctcaaatggtccagttacatctatgcttggctctcttcgttacatgtcctctaagctttttgttggtggtaagtatttatatatcctcacttgctcttgctcttactggttttctagcttgtatgtttttacaggtgaatgttttatttgcttttaggtctctcttggggaactgatgacagctccttaaagcaagctttcactagctttggtgaagtcacagaaggtaagccatgtgttttctgtttggaatgattcgtaatggctatgtgcctatgttactgtatatgtgtataaaaacaatgatgacttaggttgattgatgaatttcttttgatatggctttgtagttcctaggtatgttgttgatttatgtattattatatatacaatcctcataccaatgttttgtctttggttgtgcagcaacggtgattgcagacagagagacagggaggtcgaggggattcggatttgttagcttcagctgtgaggattctgctaacaatgccataaaagaaatggatggaaaggttagaaaagactatactgatgtcttaatgtcttctctattagtacctggatttgggtattgatcatgatctagtatcctactggtgattgttcagtctaaaagtcttagtctcttattagttttctgggtatgatcaggagctgaattcatagcattgattgttctgtctaaaagtccgtctcttactagtatttttgggtttgagtatgatcaggagctgaatggtaggcaaatccgtgtgaatcttgcaaccgaaagatcgagtgccccgagatcatcatttggtggtggtggcggttacggtggtggcggtggtggtggctactaaagcaaacaagccagaggatttgagagagagaggagcctcagaactttcagtagttagttagtttgtttgtttcctctttgtttaactgcaaataaccttaactggttntgttaaacttatttagccctgttttttggttgtgtctgaataccgtagtattgttgctccatcttctgcanatctattagcatcgagttcgattctatgtttactcttatcgtttatctaccctaccatttgtgttcttcggctttatttaatttcctaaaacatgaattttgaatctttcatgtttccttgtcggtaatatagactatagagaccaaaagttatcttggttatacaaaatttatctttcaaatcaataaaaattcatcttgaaata

SEQ ID NO: 29387 - DNA, 2265 bp, Arabidopsis thaliana landsberg
acttaatacccccaaagaatcaatgatccttaagggttcaggcgcagctgtaccggatctcagcgaaaggcttctttgatcctaacgcaatcaaatcttctaatgttatgaccagcccaaatcctaccgttcaccaaaccatggattttctcagccacgtcttcaaaacttggtgcgttcgtaaccttagccctggtgatcccatctgacctagacgaccttattgagaccaccgacaagtctttaggttgtataagcgttgtgaagctctctagctcctcgagttttcttggacatacgatgatcgccccaaactctagtatgtgaaaatgttgccctgctttgtttggtacgtttgtttctagatcgaagaagacgatttcgttgggaaatgtttggaccgccatatcagattttggtttatgttcggtttgttaatcctgtgagtaggtatgtgtatatattgtggatttggggtttgcgttttcttgtgataaaagttaagcgtagatttgtgttggagggttactgtggggattatttagcttcgcggagaaaattttgctctgtagggtaaagtaagaatctttactttgctttttccaaaccaataaaaaagggttgttatatgaaagaattcgttggtagattcatgttctacgagaattgattcctttgatattgtcataaagatatacaaggaatctgaaagctgaaagggaaaatttctctcaaaaactggtaatatcccaaattattgatccttatatgatcctctcaacgggaatattcaactcaaaatacatggctttaaatatttgatttacccaaaatctctgtgcataggaagagttgcaagaacacacattcttcattagtggttaacggcaaatgcaaaaaaacgttataagaagatgaatatgagaaaacgaatgcaggaagttaccaagtgtttgggggcaacaaaccatttgctagcttacacaacagaaaactacaacgaatttgaagccggtaattgcaacaacagagtctccagctgaggccaaacccaccaagatttgtttcatcattgaagacataaactctttgactaattacctttgtttggaatgaaaacctgcaattttgaatgctagatgatcaatttgcatacctccaatggaaattatatgaaaccaaaacagagaacaagaagtttagggcgctagagaatatcatctctcttatctacctaaccagattggttcatattcttaagacttcacaatttatcgaagtcatcataacatcacccatcagttcttagacatgccaaaacctaaaaaagggaaaaattcaagaatgaaacaggaacagagacaatacctcaaactctggtacaagatgaatcaaagtcatcaggagcaacacgtgcaatccaattgtttaacgtccgcttaacatcagtatgattaacataagccaactcatacatactacacaaattcaccaccaagctctcgttcaaagccgcggttggcactctctccaatgcactttccatcaccttaatcgcatccgatagatctctcaagtacatcaaacaaagagccttattgttgacagcgataatatcagagttatccctttcaatgcatttgtcatactctctcacagcagaaacatagtcctttgccacaacataaaccaaagccttattcctaccaacaagattgttgaactgtatctcgttcaataaaccattgctctttccttcattcaacatcttctcaactctatcaaacgtagttttagctccttctacatcaccaaactgcatctgaacagaccctagtttcgaaatcaaaaccgggtctaacggatcacgattgatcaattccttcatcaaatccaaagacaccccaaattccttgtgacctaaatgaaaccctagcaagcaattcatcacaaatgtctctcttttcttccacaattccacagaactctctaaactctgagattctttctctctgattcgatctcgaacaaagtcaagcaaaacatataaacgatctaacccttcctgacgattaccaagcttagtcgggatcaaagcgtagagccatcgtaaagagaaaggaaccatagatcctctccgattagggtaaatctcagggaacgattcgtacctgtaatgcgtcccgtcgaaatcgtgcaaggaattaagctcatgagcagcttcatcggagcgacgaagcttcgcgagagccataacttggtaag

SEQ ID NO: 29388 - DNA, 1839 bp, Arabidopsis thaliana landsberg
tgttgaaatcctctgtttctttcgaatgtggagaagaagagaggaaagagttaagtagaagaatcgaagagaagctagagaaagcaaatgtgggtgatctcttgatcagagctccagagggaggtgaaacagtctatgacattgacattgttgaaaccttaatcgatgagtttgttacacaaacagagaaaagagacgagcttgactgttcagacgacatcaacgacagttcaaaagcaaatgtcgccaagttaatcgatggaaacttagctgaaatctccagaatcgaaaccaatttgtctactacaaagttcattacaattgcagaaaaggtttcaactttcccaagacaatcacacgatggtgtgtatcgtgccattgacatgttcttgaaggtaatgtccgctctcaaatgcatcggatttatgtcattcgaaactaaagttttgatcttttgattatacagcaacatccaggaataacaaagagtgagaagaaatcatcaagccgattaatggattgccggaaattatcgccggaggcttgtgctcacgccgtgcaaaacgagaggttaccattacgagtcgttgtacaaatcctcttcttcgagcaagttcgtgccacaacgaaaccttctcttccaccgagcggctcgcacgggagctcaagaacgacaacagaagaagagtgtgagtcagtcacagccacggaggagacgacaactacgacgagagacaagacgagtagttctgagaagacgaaagcaaaaggagttgtaatgtctcggattttctcgaagctttggacaggtaaagataaagatggcgttggagatgttagtagctcagatacatctgaaagtcctggctcagttactaccgtcggtgataaatcgacgccgtcgactcgccggagaaggtcatcgtcttgactttagacaatttgggctttttaaaaattagggcttttctttaagctaacaaatttgggtttttttgttttggtgattaataacccaaagttattggttatgtgaaccgttacaattttgagaaatccaaattctaatgactaatgttgcctctttttgttttgtcaagaattctactaatgttacccttttagttttctttttaaatttaactaaaaagtaatataaccgttttggcccattttgtttatatgtatagccaaccaacttagcccatgggccacggtccagcagctctccaacgttagcttagctatatagctatccctgactgaatcacattcccaaattctattctgcccgctgaattgaccataaatatgataaagaaaagttgattaattttccatgagcttctttattctacgtcatccaatttattatatactttcaaaaggttacgtttgttccatttttgtaatttctttactttgattacctatatatttttggattcatcagccttttcctcgttgaccaaaaagaaaagcttttctttttaaagaaatgtatgaactatatatcgaaaaaacgaagactttggttttgacttcctctgctaaaaggggttggagatttattcaattataatcatctactatttcgcttgtataactcgttttaaatgttaaaaaagcataacttacaaatcgctttatatacttgacttatacactgaattcactaataattcaattctttttatttttttgtcagcactaataattcgattcaagttctaagaattatcatagctatatcaaatctactggcccccccaatccgttaaaacataaatatttaaaaacaattacacttggtacacattaacacatacacttgtatta

SEQ ID NO: 29389 - DNA, 2179 bp, Arabidopsis thaliana landsberg
aacctcgaactagcctgaaatgtgtgaaccaattatacaaactgttcgtgattctgcatcgtgggggtcacaaacggacttctgacttctgctaaagattaaactcactgtttgcaagcaatttagtataaatatgaagcattgacctaccaagatcgacacaatcacacagtttcttcttaattaaacctagctatttttgtctttagcagaagtcagaaagctagttttgtatttttcttatttcttaaatatatggcggccaatgttatgagacggtttatgatttaaagatacacaatggacccacgacgttgccataatacaattattaggctgttaattaacgtgatcgttacgtttgctacaaactagctagttgtgtcttctttattttagtagataagtataagtctaaaaatattacaacccaataatggttacattcatggtcgacttagaagatgaaagttgatttcttaaaaaaaaaacacgcacaataaataaaccaccaattcacaaatacaagaaatttaataacctcgagcagttaccctatttaaatcccctctagccttgttttccttctcacacctatgaagcaatggaagaagagagagaccacaatgcatctgagtcgtctctcccatctttgagcaagcagttggagagctcgactcttggaggaagcacggtcgacgttcccgtcgttgatctaagcgtttctgatgaagacttcttggtgcgtgaggtggtgaaagcgagtgaagagtggggagtttttcaggtggttaaccatgggattccaaccgagctgatgcggcagctgcaaatggttggtacgcagtttttcgagctcccggatgctgaaaaggaaaccgtggcgaaagaggaagacttcgaaggatacaagaagaattatctaggaggtataaacaattgggacgaacatctctttcacagactctctccaccctcaattatcaattataaatattggcctaagaatcctcctcaatataggtacgtacctttcctaataaaatcgtatgagttagtaattcatgttttacgttaaatttcatttctttaacaaaatatcaaattttaaacgttggattttcgtccaaatttttgggggtaccagggaggtgacggaggagtatacaaagcatatgaagaggctaacggagaagattcttggttggttatcagagggattagggttacagcgtgaggcgttcacgcaaagtataggtggtgacacggcagagtatgtgcttagggtcaatttctatccgccaactcaagacacggaattagtcataggagccgcggcgcacagcgatatgggtgcaatcgcactcctcatcccaaatgaggttcctggacttcaagccttcaaggacgaacaatggttggaccttgactatatcgactccgccgtggttgttatcattggcgatcaactcatggtatggttgacttttttgttgttgttttttttacttgagattcgttaatgtttttggggttgatttgtggattcaaattaattgcagaggatgaccaacgggaggttaaagaacgttcttcacagagcgaagtctgataaggacaaattgaggatttcttggcctgtttttgttgcacctagggctgatatgtccgtcggacctttgccggagtttaccggagacgagaatcctcccaaattcgagactttaatatataatgactatattgaccagaagataagaggctgggcgctcgaagatcttcctgtctactgaaaaccctcaatacctacaataaatgatgatgaattgttcaagtagacaattctttaatagcttccttttgagggtttctatatgtggtacaataaaactatttcaagaatttaaaataatatgtggaaaagctaagcggttagacaaaatattcatctgattgatgctatacattcaaatgtaatcgctcctatcctatgtacgtagtgattaacctcaaaaataatcagcttaagttgctgtattcgtttacgttatcatgtaaagcaacgccaaccttatgaagtcaaaaggagctcttcgtctgtgccaaagtatacgttgacgtgatttgggatagtcaaaaatttatctacaaaattatcaagtgtttagttttatatgtt

SEQ ID NO: 29390 - DNA, 1572 bp, Arabidopsis thaliana landsberg
gtgagattccgtcagagcttgggaagctcaagtcactcgagacgcttctcctgtacgagaataacttcaccggaacaattccaagagagataggaagcattaccacgctaaaggttcttgatttctccgataatgcgttaaccggcgagattccaatggagataacaaagctcaagaacctccagctactgaacctgatgcgcaacaaactctcaggctccattcctcccgccatcagcagtctagcacagttacaagtcctcgagctctggaacaacacgctctccggcgagttaccaagcgatctcgggaagaattctccattacaatggcttgacgtttcttcaaactccttctcaggcgagattccttcaactctatgcaacaagggaaatctaaccaagctcattctcttcaacaacaccttcaccggtcagattccagcgactctttccacttgccaatcactagttcgtgttagaatgcagaacaatctactaaacggatcaattcctatcggctttggcaagcttgagaagctacagagactcgaactagccggaaatcgtctcagcggagggatccctggagacatctccgattcagtttcactttctttcattgatttctcaagaaaccagatccgatcatctctcccttccacaatcctctcaattcacaacctacaggcgtttttagtcgccgataactttatctccggcgaagttccagaccaattccaggattgtccttcactctctaatctcgatctctcatcaaacactctcactggcactatcccttcaagcattgcttcatgcgagaagctcgtaagcctcaacctaagaaataataacctcaccggcgaaatccctagacagatcacgacaatgtctgcattagcagtgctagatctctccaacaattccttaaccggagtactaccagagagcatcggaacatctccagctctggaactcctaaacgtctcatacaacaagctcacaggtccagtccctatcaacggctttctcaaaaccataaatccagatgatctaagaggaaactccggtctctgcggcggcgttctaccaccgtgtagtaaattccaaagagcaacatcgagtcacagtagcctccacgggaaacgaattgtcgccggatggttgattgggatagcatcggttctagctctagggattctcaccattgttacgagaactctgtacaagaaatggtattctaacggattctgcggcgacgagacggcgagcaaaggtgaatggccttggagattaatggcgtttcatagattagggtttacagcttccgatatcttggcatgtatcaaagaatcaaacatgatccctatgggagcaaccggaatcgtgtacaaagcagaaaatgtcactgatcaagcacagttcttcgccgtgaagaagctctggagatctgccgcggatattgaagatggaaccaccggagatttcgtaggccgaagattaaaccttcccttcccgggggaaaaatttggagtcacccagaaacatagtgaggctcctagggttctta

SEQ ID NO: 29391 - DNA, 2386 bp, Arabidopsis thaliana landsberg
caatattacattctattgatattgaatcaaagtaaatcaacttcaaatagctgtaagaagacatgtaatgaaaaaagggtacgcatctcaccttgctgagtgacctgaccaagtttatagatacttttccagcatgagattttactgaactttcgggataaatactcattgcagctagtgctagcctataagaagcaatggcagtgtgataattatgtcttgcctcgcaaactagcccatggaggttatggggttcagggtaataagggctgcgctgcactgcctgctcaatgcaagcaaaaatctgcaacacagtttcaggaggggaaattacttaaagctaactttggattaataaaaatcctatgtatatatatatgtctgtctttatacctgcggggatgatatatttccctgcagcaaagcaagccatgccaaaccaacttggaattctgcaagctggacagaattatctcacgcctcaattagagccatcacacttacaagtaagtaaaccacgattaaattagaacttacaggtgatatctgtgcagctcgtaaacaactctcaaaagcctcatctgatgttgactccctgagatgttaattagtctatgtgggcaaaattgtagttcgaaaacatgagaattctcttttacataaaaagcatctacctcgcataagtatcagctgagccagcccaaggtagcgcaagtgtaggatctatgcttctagcacaatcaaaagcttgctttgcaaatttcatttcatccgattccctgaaaatctgtttaagcaaccgaaattacaatcaaaaggggggaaccgtaactgaaatcatgaacatatgtgaaacaaaaatgcaagccttgataaagccaggacatcaaatacgaagccagaaagacaaaatgttaaggaacaatacctggcccataaaagcccaagcaacggctaaagatacatccaaatgcaatgcccggatcaaagcatgtagtttcaaagcactgttatcagacatacaacccaaagcaacccagaactccgagttttcacattccagcaataatgctcccagcaccatcttttctggtagcttcctgatagaatagtagactattacaagggcaaacatcaaaaactaagaaaatgccaaataacgcctagtataatcttaccaagaacttgaagtatcagagtcatcgcttaaacttgaaacaagatcacaagttatggctatgtcggtataaacattagcttgccaaggggctaagtgtagagctcgctggtaagaagctttggctgacaatgcagctgagtaacaaatgcttctccaagaaagaattgaatcactaaatgtcttcaaagtgaattctgagttttcagttccaccagaccatggaaagcatcttgcgtatgtaaactgctcaaggattacacattagatacccagataacgaacgagctttacccttaaaaacaagggccgcctaaggacctgaaaatttccatgcaatttccatatacaagacatgctgctggccagttcactgcttgcttttgcagctttacgggcatcctacagtggatttccattaatcgttctctcatacagttatattcaatatggatgagatcaggacaaaatcagaagagtttagaattattaacctccaataacgaagctgcccatccaaatgcgcccaaatttatgcattcctttgaccaactaagcaatccagaagcaagaccatagagcacagaaatattctgaggtgaaatcttcagtgcttgctcaaatagctccacaccctatacaaatactatatgagactcaaacaaaccttccaaagaggtcattttaaacagacacggatacaaaggttacctttctatatgagccaagcatcaaaaagatatttgcactttccactaatgcaaaaattttggtctcatctaattctatggcgcggccatacgcctgttgtatcgttgagaattacggtcacaacagaatcaacaataaaacgaaaccacttcaagaaactgggaaaatacaggtacaaaaaagaggaaacagtgtctttaccttgatagcagcagtaaacattccaagtcgctggtaagcaaggcctagagcctgcaatgacagacagacaaaaataattcttgtcaaattcggtcatatagtaaagaaacaatgtaagtaaatgttaataactagaagaagagaaaaaggacaattacttcccacaagtcagacatggtaggataacctctaattgcatgctgtaggctctgaacagcttcagaccacttcttctgatgaagctgtgatagaatccatagccattgatcaccaaagcaagacaataaagacagattg

SEQ ID NO: 29392 - DNA, 750 bp, Arabidopsis thaliana landsberg
ttcaccctaacatgagatttgaattataaagcaacattctaaagcaacgggggtgggacctctggaaatatttcggttcacttaatctggaaagaaaataatcgacagctagagttgcatatcgattcaaaaacttggtaagcgggagacggtatgggctgttaatttcactgtacacttgtcctggaggaagagctgcttctaagtcgatagttaatgttacaagttcatctagaaattttgatgcagcaagtggaagtaagtggaagagctcgataatagctgccacagaaagaacaaaaaaatgtgttaatatataatcacatgaccaggcatctgtttttatatatttccaagaacgtgattaccagctgcaattttcggctcttcaccagctttccatgatttctggcgactgtgcaagtttctctggctctaaccactttttaaggtgctccagcaacttacatcctaatgtcacattaaaccaatttgatagaagttcaagaagacgtgccagaccttggagtaaaggcatattgagattctttgtctgtgccagattaactagtataggtctgaggctactctgaagaagttctttgggcatccgttgttgattgataacctaaagaaaaacagagtttcagaacagcaaaatagtacattaaataacatcatttatcccagaaagagaagaaggcttttaggtagaggaaaaccttttccatcaaggtgttttttaaaaat

SEQ ID NO: 29393 - DNA, 809 bp, Arabidopsis thaliana landsberg
ggaagacgaaaaacacgcaccgtaaacttcagcaaggccttgaggcttctcccatttttctccttccacaattattttcttagacacaccaccatctttacatatatccttcacactgtcccatttaagcaactccacatcaaactgaagcgtagcattcgcaggaatagttggcggggaaccagattccccatatgctagctccgcaggtatagtgaaaacagcgttttcacctttcttcatcgtcttaataccaatatcccatcctttaataacttgacctgaccattccaaaccaagacaaaattcagaactcgaaagacaccggaattaaatagtaactatggatcaaaacaaactctcaaccaaaacttttatcacaaaccggccttacagaagacaacagccttaatatgatcctataatattatccgaatccgaaaaaatcacgatccaaatccgaatacataggcctaacaaatattgttgcaaaatagaaaagtaccttggccaagagtaaatttgaaaggagttcctctgttacggctcgaatcaaacttggtaccatctaacaaagttccagtgtaatgcactgcaaaagaaaacccaatctgagaacctgattcacacatatattatcatcagatcagacttcagcaatttcaaataaccttcaacttcgtcaccgttctcaggcgtgtcccatttttcaccttccttaacaagtttattctacaatcatgattttccgatctccatttcctcgccgattttcagataaggagcagagtcagcttcgacattgtcgg

SEQ ID NO: 29394 - DNA, 1960 bp, Arabidopsis thaliana landsberg
  unsure (1)..(1960): unsure at all n locations
ccaattctagaaaataattgaatatcttaacaataaaatataaaactctttttaattttagtttcaaagaaaataaaaaaaaatcaaagcgccgcagtcgacgtcccactgacctacctaccaacccacccaaaaagggcaagaaaactagcagactggttaaaagtaaaaccctaaaatctcaacgaaagggacgaccaattgttcgacgattggtcatggggaaaaccggaatccaattgttcgacgattcgaggaatgggtttttctccgtttccgatttaggattcgattcgagcctaaacagctctaattaccacccaattggtgggttattcgccagcgttaatcagactaatccattcgcatccctctcgtcctcggatctttccaacagaggcaacaacagcttctctacccagctcaatgatctctacaccaagtatatgccgggaaaagaggaggaggaagaagtagttaatggcgagaagaggaagaggaagaagaaaggtgggctcacactgaagattaagatcgctaatccttcgttgcggcggctattaagcggagcagtagctggagcggtgtcgagaacggtggttgcgccgttggagacaatcaggacgcatctaatggtgggaagtggaggaaactccagcactgaagtgttcagtgatatcatgaagcatgaaggttggactggtctcttcaggggcaatttggtcaatgtcattcgtgttgcacctgctcgagccgtcgaggtaccactatgataatcctaaccaaacatgtatcattgtttataattgaaatgcagattgagcaagtttctgacttttatactaatatatctcgttgactctttacctgtgaaaagtcttgtgtcttatgctgaattgatgagactttggtactcaactttctttgttttccaattcttgtatgtgtagctttttgtattcgagaccgtaaacaagaaattgtcgccgccacatggacaagaatcgaaaatcccaattccagcttctttactggctggtgcctgtgctggagttagccagacactcttgacataccctcttgaactagtcaagactcgccttacaattcaggtttgatccatttagattgtattttgttagaaataattaggtgatctcactcccttgtagctgaaggatttgtggccttagtacatgtcacgttgtttttgacaagaattcagttagatagttcattgtaatatcggatctatatagttatttgcnnnnnnnnnnnnnnnnnnnnnnnnnnnnnnnnnngtgtttacaaagggatttttgatgcgtttctcaaaatcatacgcgaggaaggacccacagaactctacaggggtcttgctcctagccttattggagttgttccatacgcagctacaaattactttgcatatgattctttgagaaaagcataccggagtttttcaaagcaggagaagattggaaacattgagactcttttgataggttctttagcaggtgcactatcgagcactgcaactttccctcttgaagtggcccggaagcatatgcaggtgggagctgttagcgggagggttgtgtacaagaacatgttgcacgctctggtgaccatacttgagcatgaaggtattctcggttggtacaaagggcttggaccgagttgcttgaagttggttcctgctgctggaatctccttcatgtgttatgaagcttgcaagaagatactcatcgagaacaaccaagaagcttgattttggaattgtatggattcgtggcaaattttaaggattgatcagagaaacacattgtggatactaattgggttcattttacaccacttgagatttcacaaattagtattgaggggggattaaaagattcactctacctttttgtttgaactttacgttttcaatttttgattgatctgattctgattc

SEQ ID NO: 29395 - DNA, 619 bp, Arabidopsis thaliana landsberg
tgcatcatctggagatgaaaaacccacccctatgaaatcagaaagttctaacacgccatcaacaaaatcaaatgtagcatcagatgcgtattttcagggtctctatcttatcaaaacaatggtgaaactgatacccagctggctgcagagcaaccgtactatttttgatgccttggcccacctttggaaatcacatgcaaggacatctcgtttacagaatgagcaaaatttgactttagttcaggtattttcatctacttcttattttcataattttctacattagctttgtgtttcaaactgaaattaaatgctcacttttagtgtttccgtgtctaaaactgatgtgggcatcagaaagacagaaaccatctcacaattgcaaatttgcctgatgtaaatagatgtagatgtttcaaatagtccatactaggtgttgtgtttatcgggagtctttatggtcttgtatgttgagagcctcctgacttatatctataccatcttgttttactgggatactcgttccccatcaaaatattaaatttattcagaaaaattggccatctcaaatctttattttctcaaactcgcaggtaaaagagagcaaatggcttgtcaa

SEQ ID NO: 29396 - DNA, 1923 bp, Arabidopsis thaliana landsberg
ggggggggccctataatattaaggtattcccctagggcattttcaaatggatggaccttcttgaatgcccttgaaatatatgccaagacacccatctgtcttacataacgttcgtttttttcaatttggtgacaagcttcatccacgaactgcagttaaagtcaacttgaattgattagtaggaatggtatgccaggaaccaaaaactaaacaatctttgagtagacggactacatggctgaattgcatagaaactctcgactccagatctccaagcaaaaggcgaacaaatcctgcagcatcagctttctgaccagatagataacgttcggttataccatgcattgatatagaccgtagggggtctattttatatgcccagtcaacaacagcatagaaatcctcctgcgatgacaagaacacaaaagtcttatttagtaagacaaatgaacgctacctctaggttttcacatagaaaccttattttgggggacatcttacctgaataccatcaagtaaatcttgaagagattcattcaatgccgtcaggtctggagagtttttacctgcaaaaattggaatattgttttgctttcagaaccattagaccttataatatgtagcgaatgctttactgatggcaagcagtttaagtttaccaggtttcttgtcagcttcatcaatgtccatgatccccaaatcatcattatcattaccatcgtcattgttggactggcttttcttatcattgccagcacctccaggaggagcaagagcaggtacctcaaagcacatgaagtgcgcaaaaaaggaactctgtattatgaagcaaaaaagaaacatgaggattttgtacatatatcagttgcatctaaaggccaaacaaaaaatcattcggttgacaattacctcatctacaagaagcgggatgaatattgttagcatcttggcataagcatctgacactgcagaggtgtcagtgtttgcattctgactagaacctgtagatccttctagccagacagtaggatttcgtgatacttttgtgcttgcacgaagctcattcgcgaattcacgagcctgtatattttgaagaaacaaagctttggtaactgaaaatttaaagctaaggaagacaataaaatgtttgctgattatccacacattaacattcagtaggttatagcagccttttagtcaattaagagtcccagttagtcagcggtcaaattgataaagaaacatatatctttcctcacctctcgacgaaggagcaagttcagggagctgcagtatgcttttctcaatggtcccaaacaattcttatcaagaccctgcaacaagaaagaagacaaggaatcaatgtactgcattgagcatttagcatgtcacctagtcatttctcggttttacctttaaatgttgcaaaagacgagcatatgttctgcatttgtaccgcaaatcagcatggtcaggcctcttcagctgccctctctgtttaaaagatgcggtgataaatattcagaattataatcactagacttcatattggaatagaattttataaaattagtacctgagaaaagtagcttttgtcgctgaccatgaaatctaccaaactagcaaagtagtttctcaagaactccgaagctctccttacaaaagtagcttttaatttttctagttctgctcgtttctcttttacctgaagaaaatacagcaagagtattacaaaaaaagacattttaaatgaatgtatcagacaattataaaagtttttttctattcacaaaacgtaatgtaataagccaggccgatgtactataccactaccataataactagagatagcgaattaaaaagaaataagtgattaggcatacagctcgcatattagcatagatcgggtcttaggtggcaatt

SEQ ID NO: 29397 - DNA, 3724 bp, Arabidopsis thaliana landsberg
gataacacgagcatatgttctgcatttgtaccgcaaatcagcatgttcaggtttcttcagctgccctctctgtttaaaagatgcggtgataaatattcagaattagtcactagacttcatattggtacgatggaattttataaaagtagtacctgagaaaagtagcttttgtcactgaacttgaaatctaccagactagcaaagtagtctctcaagaactctgaagctctccttacaaaagtagcttttaatttttctagttctgctcgtttctcttttacctgaagaaaatacagcatgagtattacaaaaaagtagacaatagttaatgaatgttacagacaattataaatgtatttttctattcccaaaacgtaatgtaataagcaaggccgatttactataaaattagaataataactagagataccgaattagaaagatctaagtgattaggcatacagctcgcatattagcatagatcgggtctaagttgggcacttcaagaccacttaaagctttggctaaccactcgcaagcctcaatattctggagcatgtctgcttcatcaaatgagcctcctgttagggatgctgcatactgcaatcaacaacacttctataagcgaaccaattagacagaagagagcaagcacaaaaaaagtgaacaaacctcagaaggcacacgcagtctctcaataactttatcaagttcctcaatgagagctttattgtttacagactgcatctctaacttgttgtttcgagtttctatctggtaaccacaaaaaaaaaagtgagaacatgtgttgacatataatggtttgatcagtccaacaacaaatatacttgaaataaatttctctttcactcctactcttgcagatttcagaagtactgtgaaagaaattacgaaccaaaaagaaatagtaaagcaatgtatatccatgagaagagtttattgacaacatacaacaactaatttctcactgcagtgacattgtcctcataatagaacacagcaaaaaagatcatttataggtcaagagtcctaccgattcaatgtcttccctcatgtgtctaagtttaatgttgaatattcctaaccattcatccatgtcatcaacgatatttgttgctgcctctagtccattcaaaacctgaaaagcatgaagatatatatacaagaaaattaaacacttgtcttcccatgaactgtctaataccaagataatccaaagaataattattagcagaaaaggaataacctcatctactaatggttcgctttcaagaattgcatgtacatttgccgcttcaagcgcttggagctctcgcttcagcctttcagaaaatgcctcagcttcaccaatgcccattacataactgtatatgacatttatattagttgactgaatattctggtaaaataagtggaaaagatatctgctcccactatcgatatccccagcaagctagttctcaaagaaacaatgccaatagttttaactaaatacaatcaagaggaaaaactcaaggaagtgattctacgattactaatcatgccggacatataagtaattctaagttagtcagaaatctagtctcacaggcttaagattcaggcggactctgtaattttactcttctctcttcattctatataacaataacacaaagcagataaagaagtcctcctttgtaagatatctactgattttacatttaaaaagaaagaagtaaatgcgtgaactaaaacgatctaaccaaatgatgaaaggaacagaaaaagacatacgttcccaacagagcctccatatcctcttcctcggcctgagagactagttctttctcaacagtaactttcaagtcgctttctgttacagattcagcaacaggctccccatcttctgtacttctttgagtagtgactactggagtgttatcctagaccaatattatgaaacaaagaaacacaaattagataactttcttatatgaaaaagcactcacatatctgaaaggaggggaaaatgacaataacaagtacatacaaaagcttcttttgaagataagagacttagaccaaagtttaaagttagaataagttatagtctgcacctttgcccaaagggccatctcgacaatatctataccaacaacttttggaaggcggcctaatacgtctttgcatatgttcaatatgcaaactaaaagtcggttcctacaatcatgacagagaaaggtatgtattaaatgaagaaaactacgtcaacaaaaatatcatcgcttatcatgtatacttcacatcttgtaatagttaatattgatgttgctaactgcagtacctgtcatcagtgttgcgcatggtccactgtggaggagcaacactttgactcctgagattatcaaacccctaaaagactttgcatcagcaaaagtagaggatacatagaaaatattgaacagtattttacaattacacaatcaattacaattacaaagtctcctacaccagatgcatacatttcttcttaaaatcttaggtactgtaagcttcattaaaatcttaccagtgtgaaagtgcatccacttgggtcattagttatgacttccacctttgacagatgcttgagtttatacatttttgcaggctggaaaaacaaagaattataaagcatcatcagtcaatctgaacttgagaaatctgctaccatggtatgcattgatttttatcaatcatatgtcttccaaatcaaaatgttaaatcttgtacgttgctcgtgaaagtgtgtctcatatggagaaagaaaatgaagattacctccagaactcctccacttgaatacttcatgactcgaagaattgctttctttcgtggacctttcgatttgactgtagaaagcagaataacaaaaagcatactcagttgattacaactctaaagaacctaaaaccaattggacgagaatgcttgaaacgtggatcagagtaaacatatcttccacttgaatcataacaacacagattctcctcgagtacactagattgattcacctaatagacactaccagaatcctttttgttgcgtaggaaaacctaattgagctctcacgagtcataaaatggccaagaacagtagaattcatcgatttagtattcaacagattctctaaattccataatcaccgaatctaaatgcttagaactagccaatcaacgcgaagaaggtcgaagtaattaaaagtgaaatgaatcaaatcagaacaatcaaaagagagaagaagaaggtaaggttctatcaccggaaagagcgagaactctgggtttagccatttgtcgacccaattttccagacttgccccaaacaccgcgactcttggccacacgtatcgacatgacgatcgattgcttggtgccttcgattgccgcctcgcaagctcgccgaagctcttcatcgtcggcgcttgacttggccattgttgttgttgcggatccagcaaggaggtgatgaccggtagaagagagaagagaaaaatagtgccaacaacgtggcaataagccttattgtagtgccaagaaaggttgaatctctcttttgttcccatttcttttcttttgtttgaatgattcatgatagtaacaacgacatgttcacaatttcaaaaaggaaacgagcgcaatcaaactacagaaaatcattacaataatctaatgcaccagag

SEQ ID NO: 29398 - DNA, 1390 bp, Arabidopsis thaliana landsberg
gataaggcttaagacactgatgtttgatatcggtatcattccttttctaattattattattattttattggggtggtcaaaccctcttctaattatttaagctactaattaatattggttatttatgtatcaaattaacaccaacaatcattctatatcttattgtgaaagaaaaaaggacttgtagtggaagtaatattcatgctagtactgatattgtcagccgatgttagtgataatccggacgatggaagatccattatacaagaaaatattatatattacacctaataaagatgtcttaaactcccggaaaaaaaaacaaaatctgatgataataaaatagtattaccacaagaagtcgttgcttatgttgctctgagcgtgcggatttggcatcattaacgagtcaaaagttaaaatttgttatatagttgaaacatgtgtgggaatggtgatgatgaaatgatgatggtgatggtaatacactaaccatttgtttaaggcgtatgaattttaaaacttttactgctaaattaattatcttgcaagagattcttaagaattggagtatttgctaagaaatggcaatcgttataatagatgttttggattctactatttgttccaccaagatagttttttcaagttcatatacaaatttatatgataatataacatattgtcatttacttataaagcgtatatctatgttgtcatttgacttcacaattttttaaagcagaacctacgtgcaaatttttttttgtcaacacgtaaaaagtattaattaatttgatcaaatcggagtatattttagttttttcaatggagatggtcagatgggtcaattgtttgctagtgaccacagatcgtgtacaacgggtactgtcggtacgtgcatgcattgagtccgaaacttggtaatcaaaatggactgtctttcacgcgtatagaaaaaaataacaatgttgtaaacatcataattaatgatattttatttctgtcacatgttatttgatttttttttttttttcatttttccaacattaaatccattgatgataactataggataatctatgcattgaagttcctcgaaatccacaagacgaacttctcatttccttaattgattctagtcatgcatacaaattaatattcggtgatagatgcaagatatactattttaatcattagtttcctatggtttggtttggaacatatagtaaatcaaaaccataaagaataatgatgaagaagagtccataggggtaggtttcaattatagataaggtataagcctagtgtggaaagattaagacagctaactgtataaaagcttaataattaggttgtaaactcaaaatgtatcagtcattatcattta

SEQ ID NO: 29399 - DNA, 967 bp, Arabidopsis thaliana landsberg
ggccggttaccatattccacctcaaattatagactagtagcttggaattaagtttgagtctggaatctttccttttcttttaaatcttgaaacatcgaatctatttttatgcattctctgtgagattgatatgcatctgttactggagaaactttgcaatcatgtctcatcagtctaattatgtctaaactacatccagttagaaccaatcattatggtgaaatcatttagacattctaattgtgcctgtgactgtaagtcatgtttcagctaaaatgtaagtcatgtttcagctaaaatgtctaaaaactggtttaccaaatgactttttggatttgccttaggttagcataatgatcgaaatgttagtttctgatttagagacattttggaggaaaatcaaatgtaattgatatttgagcctgaagatcgttacatttttgatgcttgaaaccgaaaaggaaaaaaagaaaactagaagaaaagtctacggggagaagacgatttggtagagatagttgatggagactgcttctggtgaggcagagacattcctttgttctcttgttgacctgatgatcccattttgtcaaggagtttagctgctcttggatcagtcagaagtgtcttctggaatgactgagagaagcctgtggcgattatcgttacatgaatctctccggtgtagcgatcatccacaacagctccaaatatgatgttggccgatgggtctgccaaacttgtcacgacctgcaaaacccccccaaaacatgagaagactgcattataatacagtgtatacccaattgaaacaaagccgagtaaaccaagacaaaaataccgtacctgtgatactcggttcacttcctgcaaagttatgtcttttccaccagtgatgttgtagacgacaccagtagctgattgtatggatgatccgatcaatggagccaaagttgcttgttcagct

SEQ ID NO: 29400 - DNA, 2930 bp, Arabidopsis thaliana landsberg
gtgataacttctaaactgcgatcgtatttttctactttaattggggaaaaggccaatagttcctttttaaacacaacaatatcgatttggttccgttatgatattattatgttactatacatagctttttaccccccagttgttactatacatagattttgttggtttttaactattaagtgcacacggcagcgtagacagtgacaacaagttgtccatacggacaatcagatgtccatacggacaatcagatgtccaaacttaatgataacttattcttaacttcacatatttttaagacgtaatatgttgcattgtgctaaactataaatgatgagttattatatgatcaataataataatgcggtgataaattaactatgtgagaacattgtttaggtttctagttttaattataattatatttagtaaggaaatgggtgcaaattaaatgttgttttgtagataaaagaaaataatataagcatgggtaaagataacgttaaagcgacaagatgaaggaaacagtcaaacagtagaaagtaggactgtaggaccatgtttttattgagaaacatttgtgtgatttgatattacatttttattatgctcttttgacatctgatttgatctaacaaagcccctacctagctagaccttctttgcattcaactacaattatttaccagcgttttattctctttaattcccttgaatactccataaacattgcagcaagaaaaagaaaaaaaatattacattgcaacaaggtaaaatattagtatcgaatcgagagttaaaacttcaaagcaaaggatcttatcaactgactgtcaaaaactctgtttcctaactttgatacgttacttatttattttataaaaaaaatttgttttcttttgatgaaaaaatattcagattatatattaattctgaattcagattatacaaaaattcataacgtggctatgaatatcaactattgttaattagcataatttcaatataaatgaattgttttgtttttggcattacaaattacttaattgattccatgcattgtgtagttcaaagcaatatttactaattaattttatctaaaataactgaaactatttttttcgtactatcatcattcgacgcatttttatattaaaagaactaaatcatctttgaaatcgaattttcatacatttttaattttaaagggtaatatatttgatagagtacatatttatttattgattttttatataaaaatgagtgaaccgtctataatttataattaataattatattagtgtaataatgcatttctgaagaggggatggattaggtgtagtataataattatattaatgtaacgttttaatccccgggattaaagtgaaatatcacctcacacgtgaactgtagtcaaagttccctacttcccgcatgtaaaccttacattacagtctaaacactaaacataacgcatgacctaattcactttcacactgggtgatgtgatgcttctacattactcatccccatattagcgcattgtttaacaattccacatatataatcaatttttcaagaagaagaaacagaacaacattatagatttctttagataataatgaaacacacatcatatattattggtcaacaatttaacgagagagttttgtgaatgttgtcctaaactcatacataaacaccgtcacaacaggtaactgaaaccaatactttataaaatcttaacatttaagcctacgtacgagagatggtgaaagaaagagacaggtcttaatttcttcttcaaactcaaatctcccacacgactagatctgcaaaagcagaaaagagacctcgaaattaaatcacataaacaattatatacacacacatgcaggcacatcctccgaaatatggtagtattagaatttatactacaaaagtcaaaatacacgaaggccaaaaaaagaaaaaaaaccccaatgaatgctctaaagaagcgcaaggtgtgtgtgtgtgtaattaaattagattgagtcaacattgttgacctaagccaaacaacatgtctctcgcatgcatttatccattttagatcccaatgaagaaataaactagtactaatatagatgtataaactataattatatagacattaaataagtattcattttaccatagtttatttaaccgatagagtagtatctagctatagtggaaccttaattagtataacaaaggaaaatagagaggaaacaaaaccagatagtacgaggctccgtgttgaagagggtgaagagcgacgccatattcatcggtgacaatgggctgacccgcggaattaatcagaacaacctcttccccaaatgcatccctcacattgaacggtcctgagctcacttcaagctccatttcattgatgaaaactcttattcgtgcgtccgctgcatccatatttagccattgttatcccattatttcatgttagtataatgactataacaatctatataaaacaaaattgtaaagctcacacaatctattttcaagaaagagagagagggtatatagaaataaagaatcatctaaaggctactaaacatgaaggtttaaaaaaaagatttgtatggatcaatgtgtcccttacattgttgacacaaaattaatgtatctctacgattgagtaaaatttcaacatgtatataagtaatctataacttaaaaagggtgataactttatatattaacattaccttgaacttgaagctggtccgaagttgatgggacagtagcgagagaatgcgaagtagtaatagtggtggcagtagaagtagtgggaggaatatgaagcatgatgttattgttgctgttgttggtggtggaagaagctatttgatgattagtggtagcgtaacacatctgagtct

SEQ ID NO: 29401 - DNA, 410 bp, Arabidopsis thaliana landsberg
ctaactgatttgccaaatcaattaacttgttagtgaaaaacttgatgatgtctccttcatttatctttaagttttcataaccctcctcaacgactgcaagttgatcaagcgtacttctggagaaccttcaaattctgactccaatgcattccaaacatcctttgatgtggatgctggtgctatccgaggaaaaatctgatccgtgacggcagtttgcaagagttgcagcgccatcagatcctttgatgatgaatcctcccatttggttttcaattgaacggcttatgtactgtgatatcgttgcatcagcatacttggaacactagtctccaccactttccacaacttctgtgttcttaagatggtcttcattttaatccgccagaaagaataattatccccatcgaagg

SEQ ID NO: 29402 - DNA, 3530 bp, Arabidopsis thaliana landsberg
  unsure (1)..(3530): unsure at all n locations
tgcaattctcaaatgctttcccaacatgcttagggacaccgagcttataccttcatatagcattttatttcgagtcttccataacacccaaatgatccagggactaacagatctcaactgagtagaaagttctctattgtggcagttagtaatcacatgattcatattggtaaagatagaattcccaaaaccattatcagatggcccaaacctggcgagcaaggggacactgaaacagaatgtggtttaaagtttcatctttctcagagcacattgaacatccatcctcaattaaaataccccttgttcgtaacctgtcttccactgcaacaacaccttttagcatcttccacaagaatactttgatttttggtgccgtgtttagactccagatttttccgaaaagaggatttaatgatggttgttcttctgcttctttaaacatcagtttatgcacctgtctactacacatttcatagccagatttaacagtgtatagaccatgattggtaccaaaccaacaaaaagagtcctttctagaaaccataggtcgctgtttacgaataagctgaatatctttccaaggaaataagtcacgaagcatattcagattccaattcctagaaacaggatcaataagttgactcacttttaatttaatatcattcatcacctgcagactcactcgtcttctagattccccataaaaaagccatttatccatccaaacataagtttgctctccattcccgatgacttttttcagacctgtaattagtaactccctgccatataaaatactctcccaagcgtaagatggtcttgtgccttttgtagccgagaggaagtatgtattcagatagtatctgcttttgagaattggagataaaagactgtctgaatcattgagaagtctcgaagcttgtttgcctagtaaggcttggttaaagcattgaagatttttgaccccaaatcctcttaaaacgttaggcagcattaatttttgagctccaatccagtgaattttcttcttgtcatgcatagagttccacgaaaagtccatcattacactagtcaactttgtgcataaagtcttgagtagcttgaagcaggtcataacatacataggaaatgccatagctatggattttaacagaacttctttccctccttgtgataaagatttcgcaaaccatccatggagacgcgattgaagtttctcttgaatgaaatttaagagcttccttttagatcaactgaaacattcgggaagtcctaaatatgatccttctcccccctcttttccaattccaagaatctttttaaccacatgttttaatacctcctctaccttagacccaaaaataatagatgacttggaattgttgatgacttgacccgaggcttccccatacagtttcaagcaacgcatgatctctgatctctcattcgctgaggctttgcacaagaggagactatcatcagcaaaaagaagatggtgaattgacgggccagaatcagcaagttgtatcccgtttagcctaccacttacttatgccttatttagtacattcactaaagcttctgcacaaagaataaacaaaaacgaagatagtggatctccttgtcgaaggccacgatccggtttaatatatccatgagattgctcgtttaacaagaccgtgtaagtaactgatctaatgcagcaactaatccactttatccatcgatggtcaaagcccattttctccattagtctctccagaaagcaccattcaaccctatcgtacgctttggacatatcagtattaatcgccataaactccttagaaacagcatcgttagtccgcaaagcatgaatcaattcatgagcgataatgatattatcagttattacacgccctgatacaaaagctccttgtgtatctgatatgatcaaaggaaggatcttcttaagcctctcacacatgatattggagataatcttgtaatgcactgaacataagcttattggtcgcatctctgacattttcgatgggttcttcactttcggtattaaacatatttgggtataattccattctattggaaagggaagaggagctaaagaatttttggatttatgctgttacacttggccccactatactccagaaatgttgatagaaatcactcgtaaagccatctgctcctggcgctctacttccttttatgctaaaaactgctttttttatctccgactctaagactggcgccgttaaagcttcgttcatagatggtgtgagccttgcttcaaagccgtcaagaagggaatctaaattttgtggctttgagctgctaaagagctctcgaaaatagtttatggcaatctgtcctttggatccttctgaaaactgttcatcaccctcttcatccacaagcatcaagatcctattttttacctttctactcttcacacagttatgaaagtaacgagtgtttctttcccctgtgttaagccattgttccctgctgcaatgtttccagaatatctcttcctctttataagcaaaagctaactcagtctttgtcctctgcattacgttgggctctgggtgcattttagaaacttccttctcaagagtctcttttaacttcaccatccttatctcagagttagtatttgatgatcttttccaacgagataattctgatctacatcttcctatacgttctgccaaagagatctctatatcttgttgtccaccacaccatcctcttttcactacgtcaacaattcctggttttgataaccaccgcttatcaaaacaaaaccttcctttggcattaacactttgctccgaagcaaaggtaatcaaaataggtcgatgatctgatgcccacatatcaagatattccatatgagctctaggaaataattgaaaccattcgtcattaccgaaactccggtcaagccgacattgaatccatattttatctcgccagcctgcccaagaaaaccagtttccagaacttcttatctctgccaatttgcaattatgagccatgttacgaaaatcccagaaagatgattcattgcggagaggtcctcccattttctcggtattggtcatcaattcattgaagtcaccaagcactacccaagcttcatttctaccaatgccaatcccagaaagttgttcccatactaactgtctaagagctctcactggatcgccatagacacaagtgaggaaaaacatcattgaccctatattcaccttcaagtcaattatgcgattatcagcactcaacacttcaaccttgtagcaattcttccaaaaaacggctaagccaccactcaatcctactggatcaaccatgaaacagttatcataacctaaagagtcttgtaatctcgtaacatacttctttttttgtttagtttccatgagaaatagaaaatctggaataaacgttctttgcatctcccttaaacgacggcctgtctcagtgttcccagcccccttgacattccaactnagtatact

SEQ ID NO: 29403 - DNA, 1594 bp, Arabidopsis thaliana landsberg
tataaccggagaatagcataacggttcttctaatatatattcatctcggattttatacaaagatatcaatatcatttttattcatagtctctatatagtatccattactttggatatactttgaaacttattaagtttctatgaaactatctacaatagttacttagactacatacaatggtcatttttctaaacagttgaatgaaatacaatgatttattttttaagaaataaagcttatgtggaggcaacaaagctgaaacattacaacatctttgaactctttgaagtgagcttcatattgccacatgtcatgcatttattgatttgttttttagttatataataaagattagataaagatatgtgtttgatatctattggacgttaagattttggaaatttgttatccaacccgatatttgaaattgattatatcgtagaatataaaatatttttttaatatttttatacccaaattcatcatttttatactctatatagaaacttgtttcattcaatttggacaaaaaaaaacaattttactatatttttgctaatagcttttagaaacttttatttattttttgtcgtcttattagtaaaatagatcctaataataacctttttaccttccaaaattcttctaattaccctttcgcctatcaaaattccaacaattttcagtttcaaaatcaatttcccaaccatccccaacatataccaaattatagatacccaccaaatttcttcatgtcgtcagctattacaaaccaccgtccatatcatggatcgattatgtcacagtcgtctcaagcaccctcttattcttctactccaatgggtaatgaaactaatacgaatgttggagcaactgaattcccggaattttctacacaaatggctcttggtgttatgagtggtgttcacgaaactattccaaatgaagaggatttaacttgtaatcattcgggaagctccaaatggaccactgatcaaaatttggtgctactgagtaggtggattaaatatgaacaaatagtatcgttggtagaaaccaaaaaggtgagtcataatggggtaaaattgctgagtactgtgctcatttgatactccgtgtgatggagttttgtgcagaaataactacaactacgtgtacaaaagtttgggcaaatgggctggcgcttaggataacgttaaacgcatgcaacaaagtgggtggtctaaggatggtgtattggcgaaagcgcatgaactatattcaaatgctggtaatggaaattttgaattatattagagtggctctcaatccttgatcaaccacattatggtagtcaagtaaaaggaaattctggttttggaagtaatggattttaaaggacccaccaaaattaagttaaaaaatccaactttgtaggatttaagggttggtccattaggaattataatggttaggaaaaaaccaaaaaggaaggttaaggggccacctttagaggtattcaccgaagaatggattgaatctcaaccaattaaagacttaagattgtggatcgattgaccacacatatccatgttgcaaattgagccaaccaaa

SEQ ID NO: 29404 - DNA, 2403 bp, Arabidopsis thaliana landsberg
acccttttaactatccaaaccccaacaattatcagttttttttttgtctcctaaccacccccaacaagtatcagtttcaagatcaatctcctaaccaaccccaacatataccaaattatggttatccactaaatttcttcatgccttaagctgttccaaactattgtccatttcatggatcgatgatgtcttatccatctcaaacacccccttattttcctactccaacaggtaatgaaactgattcgaatcttggagcaactgattttcccgagttttctacccaaatggctcttggtggtattagggtattcatgaagccattccagatgcaaaggattcaactccttctcgtcggagaagtcccaaatagatcactgatcaaaatttggttctcctgagtgggtggattaaatttggaagagacagtattattggcaaaaactaaaaatgtgagtcaactggggtaaaattgctgaatactgtaatgaacatttctcatttgatcctccgcgtgatggagaagcattcagaaatcactataattatgtgaacaaaagcgtgaacaaatgggctggcgcttatgataacgctaaaagtatgcaacaatgcgggtggttggaggatgatgtattggtaaaagcgtatgaattatattcaagtgctggtaaaagaagtttcaaataaataaaagaatggctcgctatacgtgatcaaacacgttatggtagtcaagtaggaggaaatacttattctggaagtagtggatctaaaagagcccacgagagtgatgctagtgactcaaactctgtaggatctagtgctcgtccaatggaaagagatgctgctaagaaaaagctaaaaaaaaaggtaaaggtgcagcgttgaaagtggtcaacgaagagtcgaacgaattttaacaattcaaggcacaagagttggataggttggagaaaataactatgatgcacagtgaaacataccaattgattaaggaaaagactcatgctaaaaagatgaagatgtttatagagctaactgaaaaagagaatctcgatgacaagagcaaagagctattgcaacaattgagccacgatctatttggaaattaattattgtcaagtggttatctgtattttgtcacttcatgctttaacgtgtgtttgtcactttctcctttaataatttgtattgtcatgttatgctttaataatgtgtggttgtcactttctccgttaataatttgaactgtcctcaatgcttttttttttgtgcgaaatattgtcttatatgctttattaatattatccatgattttaaatagagaatcttatcttatccatgacttttggtttgaaccactcaattcgaatccaaggcaccaaccatttaattcgttgtttccattttttttataaattagaactcattcttccattgatgtacaaaccataaatcttaccttactaaaaatctcaatggatccatcagaatatccttttgacatcgaagcttacaagaggcagtctgaaattgaagagatgtatatcatcaatcggtttagggagcgtcgaaacaaaataggggaagactatccacctcgtagcaagagaaaatactttaaaagagaccatgcatcagcaaaattaaagaatattgacgactactttaccaatgaacctatatatgacgatgcaatgtttcgtcggtgattctggatgagaaaacatattttctttcggatcgttgaagacttatcaaacagcgacaactatttcacccaacgatatgacgcagccaagaaagaaggtatatctccattaccaaaatatactacgaccatgcgaatgtttgcatatggtgtggcagctgacgcggtggttgaatacagtaaaattggaggtacttctactttagagtgcttgcgaagattctgtaaaggaatcataaagctgtatgagtcagagtatctcagagccccaactcaagatgacctccaaagaattttacgtgttagtgagatgcgagggtttcccgggatgattgggagtattaattgcatgcagtgggaatggaaaacttgtcctacagtgtgggaaggtcaatttactcgaggagataagggagccaccactgttatttctgaagcagttgcatctcatgatctatggatctggcatgtttttttggatgtccgggctcactaagcgatataaatatccgttcaccggtgttcgatgatgttgaacaaggaaatactacaagagtgaatttttttgtgagccaacatccgtataatatagcttactatctagctgatggtatttatccttcttatcctagttaaaacaggtcgattaggaaacctcagagtgaaccaggcaagttatttgtggggcgtct

SEQ ID NO: 29405 - DNA, 2131 bp, Arabidopsis thaliana landsberg
ctcgaaagagtggacaaaattggttttagatatcgcctatgatatcgaggatgttttggacacctatttcttgaaacttgaagaaagatcacaaagacgaggcttgttgagattgaccaacaaaataggtaaaaagagagatgcttacaacatagttgaagatattagaaccctcaagagaagaatcttggatataactcgcaagcgggagacttttggtataggaagcttcaatgagcctcgaggagagaatactacaaatgttagagtgaggcagcttcgacgtactccacctgttgatcaagaagagctagttgttggtttggaagatgatgttaagattcttttggtaaagcttcttagtgataatgagaaggaccagaggtttattatctccatattcggtatgggaggtcttggaaaaactgcacttgccaggaagctttacaactcgggggatgtgaagagaagatttgattgccgtgcgtggacctatgtttctcaagactataaaacaagagatatacttattagaattataagatctttgggaatagtttctgcggaagaaatggaaaagatcaaaatgtttgaagaggatgaggagttagaagtttacctttacggtcttctagagggaaaaaattatttggtggtagtagacgatgtatgggatcgagacgcatgggagagcttgaagagagcgttaccgtgggatcacagaggaagtaaagtcatcatcacaacgcgtaatagagcaatagctgaaggcgtggaggggacagtctacgctcataagttaaggttcttgacgtttgaagaaagctggacgatgtttgaacggaaagcattcaggaatattgaaaaggttgatgaggatctgcagagaactggaaaagagatggttcaaaaatgcggtggattaccgcttgctatagtcgtgctttctgggcttttgtctaggaaaagaacaaacgagtggcatgaggtgtgtgccggcttatggcgacgcctaaaggataattccattcaaatttccactgtgtttgatctaagctttaaggagatgcgacatgagttgaaactttgctttctttaccttagcgtcttccctgaggactacgagatcaaggtagagaaattggtacacttacttgtagcagaagggtttatacaagaagatgaagagatgatgatggaagacgtgggtcgatataatattgacgagctggtagatagaagtttagtgaaagctgaaagaattgaaagaggaaaggtgatgtcttgtagaatccatgatcttctgagagacttggctatcaagaaagctaaagagcttaactttgtaaatgtttacaccgagaagcagcattcttctgatatttgcagaagagaagtggttcaccatcttatgaacaacaataattacttgtgtgacagacgtgtaaacaaacgaatgcgatccttcttattcatcggagaacgggcaggaatgcttgggggttttgtcaataccacaaacttgaaactgaagctacttcgagtgctaaatatggaagggcttttgtttgttagtaaaggttatatcagccaaactttaccagatgtgatcggggaattaatccatttgaggtatctagggattgctgatactgtcgtcaacaatttaccagcttccatctccaatttacggtttctacaaacactagatgctttaggcaattatcccttcgagaacacgaccgatcttagtaagctcacgtcattgaggcatgtcatcggaaaatttgtgggagaatgtctaataggcgacggagtaaaccttcagaccttgaggtctatctcttcctacagctggagcaagctgaaccatgagttactcataaatcttcaggacttggaaatctacgatgactctaagtgggttgaccagagaagagttcctttaaactttgtttctttctctaaactgaaaaatctccgtgtcctaaagcttgaaatgggaaacttcaagttatcatcgaaatcaagaacgacaattgagttagaggatgtgaactttcccagtcttgagtctctgacacttgtcggaacaactcttgtgaaagctcaatgcctgctttgcaaagtt

SEQ ID NO: 29406 - DNA, 591 bp, Arabidopsis thaliana landsberg
aacatatccatgttgcaaaatgagacaaacaaattgataaaggaaacgacccagactaaaaagatgaagatgtatctcaacctaactgaaaaggaacatctcgatgacaagggcaaagagttgtttcagaagttgagccacaatttatttggaaaataattgttgtcaagtggctatttgtattttgtcacttcgtgctttaataatttgtgtttgtcactttctcattttgtaatgattgtttgtcattttctcctttaataatttgtattatttccttatgctttaataatgtgtgtttgtcactttctgcctttaataatttgtattgtcatgttatgatttaataatgtaatctgtcagttttggcttttaataacagaatcttatccttatccttgtcttttgtcttttaaccactcaatttgaatccaatcctctagccatttttttaatataaatagggactctttcttccattgatgtaccaataccacaaatctcttcttactaaaaatattcaatggatccatcaaaatatccttttgatatcgaaccttaccaatagcagtctaaaattgaagagaagta

SEQ ID NO: 29407 - DNA, 2239 bp, Arabidopsis thaliana landsberg
gcgtaatgaatattgtgcttcttcctcaatttgcaggttttctgtgtgggtctttggtgcttggatttattctggtactacagtgtgttcacactattcatgcttttcatgttcgagtcaacaatggcaaaaagccgcttgaagacattaaccgacctaagaagtgttagggtggacagtcagaccgtgatggtgtatcgatccggaaagtatgcaattgaataactttatattttaccctaaaggtcgtttttgtattactgctctgtctaaataagccaaattttaggtgggtgaagctcttaggtacagatctgcttccaggagatgttgtgtccattgggcgaccttcaactcagactggaggagaggataaaacagtaccagcggatatgcttttactggtaggaagtgctattgtaaatgaagccattttgacaggcgagtcaactccccaatggaaggtacttttttttcattaacatcatctttgtttgttatatgacttctctttgaagttccgctctctagactttggtatttgaagagttctgaattatagcattgcatacaccttggtttttgtcatcttacgtgccattcttattattgcatcaacagcttctctcacaatatgtgtaagaggttctagtttctttgtttgacactaagaatcatcaggattaactagtgtgcactacttagtttatcaaatggatcttgcttaatccgttacattataaggtccatacgtgtagtgaactatgtttcattaagattatatgatgtctataataggttccaattgttggccaaagatctgatgaaaaattatcgatcaaaagggataagaatcatgttttatttggcgggaccaagatcttgcaacattcacctgacaaggtatttccgtctcagcgatatcaaccatttccttcttctgtactttctccaaatcttccatactaataaatgtttggggtcagtccttctctctgaagacccctgatggtggctgtctagctgttgttctccgaactggatttgagacgagccaaggaaaactaatgaggacaattttattttctacagaaagggttagagatctttcctttatttgttatttcatttcagcatgcttgataaattttgattgttctgatctatttggtaaaaaattaggttactgcaaacagctgggagagtggtctgttcatattatttcttgtggtatttgccgtgatagctgcaggttatgttcttgtaaaggtacggcaatatttttttcaggctcttattcaaataaatatgtctatttatactagtgttgaggaaactcatttgcagggtctcgaggatcctacaaggagcaaatataagcttttgctaggctgttcacttatcatcacctcagtgatcccgcccgaattgcctatggaattatccattgctgtcaatacgtcattacttgctcttgtacgacgtgggatattttgcacagagccttttaggatcccttttgcggggaaggtattatctattgtgcttcatttggctatttgttggtcttaagtactctagatcttgagcttgcagcacgcttaaaggaattagtattcattcttgattgtactgtggtcttactagtgtcatactttccctttgctgacaggttgatttgtgttgttttgataagactggtacactcacgtcagatgacatggtaagtcaattgaaagttctgggtttatggtgacttgatttttcttatgataacttcattatcgtttctgctatataggagttccgaggagtcgggggtttgtctaattgtgaagaagcagagactgatatgagcaaggttcctgtacgcacattggaaattttggcttcttgtcatgccttggtctttgtagaaaacaagctggtatgagcaacacaatttcttttcctttttgacgttggaaaactcaaatttttggtatcagttttgctgttgttcctgtttatgggctgtgagaaactccattattgtgactcttttgatctatgaacacatgctttcctatatttccgatatgtgatttccatgtagtatacttcttacttcaaagtttgaaatgaatcttaatgcaagagtctgcatgtgatacatgatacatgtactagtagtcatctttctgaaaccgcttgtggttttttgcgttgcatcaagaatcctctttaaaaaatctgtcat

SEQ ID NO: 29408 - DNA, 1988 bp, Arabidopsis thaliana landsberg
  unsure (1)..(1988): unsure at all n locations
taaagacctgacccaccgaaataaatactttcctacggtagaactgcataaaagaagggagagcaaagaacagacctcagttacagaattataatcgaaagttatctcctcgccatattcaatagcgcgtactgaatagatgccaatctggtagtgtccatccaccgcagtaaccctggacgcaccagataacaaaggggaaaatgagtgaattgtttacaatttaacggatatgaaaacagcaaaagaatcagagagttcttcactccacatttttgaaaatgtatgtatgcataagaaatgtatgagacttaccaagtatgaatgagcagagaagatacaattataagcaatagaaatatttctaaataatcatttaatatgtgtaattgatctgagcgtacttaggcaggctagtttatgcatgcatcatgtataaaactaattaaaacagctgttttggttctgctccctgagtccaaaattctgaatgaatgcagaggggaagaatttaacttacttagcttcacaattaggtcggcaagagtgacaaattcgacttgcgtagttagccatgtgcatggcatcaacaacgactaaatcatatccatcagcatcaccctgccgtgcatcataaaaagtaagaaaatggtctaagatattaaatacatgcccaaacatcatattttctccatacctttggtctctcaagatatatattgtagaactctggtgcaggatcagttttgttttcctgtaaggaacggatcccatcttgcttctcaaaccacttccaaacaggataaacctaaaatatccaaaacaagtcagaatctctgttcagagcctcctttaagagaaatgttcaatatttaagcacagtgcgcctagtgaacttcagaaaatgtttctgctgcagctgagtaactgacaaacataaaattgcaaagctaaagacccacctctccaagaaattcaacaacaaaatcttcttctccaaaaccaccttctttgttgcacacaacaccaaggccctacttggacaaaaaagcagtaacagagcagattaacaaacaaatcgtaaatatactgatggattcctgttaaagaataagaaagctataccttccgataagaaacatatttatcatcagaacgactttctatttcctttaagacgccttgacacatcttcattgttcgtatatcacactcttcacgagcactctctttgagctcttcaatcacaggccttaaagggaataccataggggtgcttccagatccagtgaacagccgaacttgcctgttcagggtccgtaagactacatcttctataaatgaatgtttatcctgcagtgaccagtccaattctccaggcattgaatcaagtaagaggttatgggtgtaaggatcgattccataaacctcttgctctaaaacctcatcgccaagaagctttcttggtttatactccttgacttcaggcagttccatatctaattcttcaatgccatttctttgtgcattaagcttctcaccatagtcctctggcaaagaaacccgcatctttcgttgtacttcctcctcatccgcaacaattgcatacttttcaatcacttcatatttcctagtaacaggtggcacaagactagctttggtcatgcgtgcaccccattcacgctcttcggtcaccgaatcaaaagaatcgtctgctgtgaagtatttttcgatgcgtaagtcttgtgatcgaccttnnnnnnnnnnnnnnnnnnnnnnnnnnnnnnccgaagctgagctatagttgtcactcttgccattgtcagaaagttcagaagatgtgtcactttccgaactaaacgatttacgattcagtttagacaaacgccttttgatttctcggtcagatgcatactctccatagtcagaagcaccatttacaccaaatgtgtcactagtcctgctcatgtacttcttttcagactacc

SEQ ID NO: 29409 - DNA, 1560 bp, Arabidopsis thaliana landsberg
  unsure (1)..(1560): unsure at all n locations
acgagaaagggatttgtttcttaaccgattttcttgttgttggtgaaaaccagcagacttttgatcttgagggtgatagtggaagccttattctgttggctgcgagcaatgagaagaatgagaaaccgcgacctgttggaattatttggggaggaacagcaaacaggggacggttgaagctaaaagtgggggaacaacctgagaattggacaagtggagttgatcttggcagagttcttaatcttcttgagcttgatctcattacttccaatgagggtcttcaaggtctgtgtcatttcttagagtctttttgcagtactaatagtatacactgtctcctacaaagtctcttttgctgagtgctactgcggagctggaacagaaaaacggttttatgtgtgctgcggttgattccaccgtcgtggaatcatctcctggtgtgtgcaatatttccaggtgtaaaacgggtgannnnnnnnnnnnnnnnnnnnnnnnnnnnnnnnnnnntcttatagaagacgacaactcaaacattcatccagagttccaaatagaagacgtgttagaatcagtggctgtgatcgaagaacaccagttcattccaagttcaagcaacaacggatccccactccatcagaaacttaatggaccagagaatctcgaatccaagaacctgtctttgcttaagactagtagctcaggtgatgagactggcttttctttgcagttaggtgagtcagatacaaagaaaagaaagcgaactgattcaccgaatggttctcaagaacatgaagagtgagggaaatgctcatgagacttcataatataccagaggagtcaatagtaacatcactattatttttccactgcattttttctccagaggaaagatattcagaatagcatatttgtattggctaatgccaagggatagtcaaacgttatgagcatatatgtgttggtgattttatgaacacctataattttgttgtaccttaagaacatcttggagcataagcaattgcaatgaaacctcccagaaggaatagttataagtgtaagtagatacaaccctatggattaattggactacaaaaacgctcacaagacgaacgcctagttgctagtcggtagatacagttggccagccttggtcagcttgaaactttacaaattcagcgagaagcttgatttcttcgtcctgcaaccgcggtccaaaggtacattgtcctctcggtgtgcatttctcaccaaatccctgaagtaaatcatcagacatacttcagatcatctagctaagtggaagacaattctcagttttatacaaggaatttcttcaaggagatctcaccggcattcttccctttccaaagtaggtaacacgatatatttcttcctcagtatcaactccatttctgtagaaaagtaaataaaccattgcaaatcttaagagataacgatctgtgtaaccgatttttcctgtcagaatattatagatgcacacagcacacagttctttgagtgtccagcataagttatattacctttcgaggtcttttg

SEQ ID NO: 29410 - DNA, 2931 bp, Arabidopsis thaliana landsberg
  unsure (1)..(2931): unsure at all n locations
aaagcaaagtattaaccagtgagtgttccgcaaccagataaagattgcaaaaacttttttgttgacttacctttgtgaaatcgcaagtttgacatccgcagagataacccgatcctttgatgactcctcgaagctcctaattttaagttgtttcaatgcaataacaaattccaaggcttaaggaaaatggtgtactgaaacaaaacagttgagctgaggtatttagtttttacctcacgtgagacagaaacatacttcacaggaacaccatcgagcataccggttgatattaagcttctgacgtttgaaggaaagcttgtggaagcttccttctttgatgacttggcctctgctttggtctttggaagtgatcctaaactcggtttagcaacttgttgttcgcttacaactccgctgctggtttgtgaactcccagtttcttggtcataaacaatatccaatgttccaattgggtcttgaacatatgattgatagtttccaaccacattggaagtagagccaacaccatgttcatcgtttatttcaccaaatgtgatcccctgagagtcctcattgccatagggatgacccgctagtgcaaaatttatatagctactttcgttttcccggctacaagcttgtatcgaagacgactcgattttcctttgactatgaccttctaaagcaacatgtgtactcatcgtttccttaacccgactaaccggaagttttctatttccatcaccaccaaaacaacccccagcaacctccacgccattagatatcgacaattcaacagatgtatcttccatataactctcagctatactcttattctggtggtggtggctacaaccttccgttctatctctatcaccaaacaaaagaggtcttggaggcatttcagctcctagaagccgatccataaactggttagaaacagactgaaaaaccgatgagctttcccacaaaggaagaccaacatttgattttcctaatcctacaacaggatcttgcacagcttgtttcttgtttgggaacatctctgaacgagaagaatcgacaaaccaaggatgaggacgctttgaatcatctcttgttgaatgatcatacactgaatcttcctcacttgtatgctcattattcttcataacccaaaaacctttgctttcatatgactgcaaacaatataaataatatcgacccaaaatcagaagtgaattctaaaacccattagcgaggaaacataaaccctaatggcaaagttgagaattgtaccattttttcgtccttttcgattcgattctatctctcacgttgtccaggagcaagtgcgagtgcgagttctactttccccagaaattcgaatttcgaaaaatcaaacctttagctgaaaaaactgttttttcacagaaatagattgttgaaattgaaacctaatcgctaagtaaagagtgttaaaattctgaaagcgaacgaatataaaaagctccttgaggttggaatggctgaaaattggagaaatcagaagattggttacctgaattgatagccggaaactagatcgccggtaagggagaggnnnnnnnnnnnnnnnnngaaagtaacggagaaggatgtgatgatatacggtgcgcgagaagcacccgaattttgcttcagctaggctctttttaaaaaaaaaagcataaagcaaaaatcgcatgatgtgatgttacggtttccacgaggcttatcttacgctgtgttgagtgatgtctaatcgtgaccgttcatctcccctaagagtttgtgggcaccaacttcttcttttcattttatcaaattttcactattttatcaaattttcaccatgaaacaaaaacaacatttttaaagagatgatatcttcaatattattgatgatgctaaaatttaaagtttagttattatgtgaaatagtaactaaacttccccaaggtttttatgatctttaatgtcgggctaatatgatactcgaattatatgaaagtagtaaaaaaggattcgtctaatgagctctaaaatgaaatgggataaaacgaaattgatggcgtaaaagattttacgtcggctaaaaaattgaatacaaaagatacagatttgtagatatgtgatatttcattccttgtgaataggctgcctgcttttgaagctaatgcaatcaacaatccaaatgaagcttctacaatattgaggtaattgttgactataaaagatgcatttagaactaacgaaacggtgggctatgctttacttggattgaagaagagctaagttaacaaataacaattgagtggatagtaaagatattggaattattaatcctttcaagctagcctcacagtcactcggcgcgctattccaactacttgtgtggagatacatattatccttaacaatacatcttgtttgcctatagggacatatcttttctatatttgagcatttcagcatttgatttggtatagagtgtttttgatgtgctcatattggtttagggaagagataaagactgcattatggtaccttttccaagatcacagccttacaggagaaccaatgagctctgcatcttcgctgctcgaagattggcatatattaccttaggagcagcatgagccatgcgcaaaggtgacactgagatggtgttgaaccatgttctttgaatccatttatttggacagaagatgttgacagatcacaaacaacactctcaagaattccacttctgatcatgctttaaaatttaattttgattagctcaactaaatttataggtaagtttcaaatgcaaataaatatctatttcttgggttgcttttattcgtgatgggggaaaataacagcttaatagtagttgataaggtatcaaaattaaatagaaaaatgattttttcacgtgggccaaaa

SEQ ID NO: 29411 - DNA, 618 bp, Arabidopsis thaliana landsberg
  unsure (1)..(618): unsure at all n locations
agcactacaacggccacctagtatattgccagccgtgaatgtttcgtatcctaattcctctgaaccatcaatgggaacgaataagagaaggttggctgattcagaggttattgatatgacaaacaacttccaaagagttgttggggaaggaggattcggtattgtctatcacggtactctgaatggaaatgcacaagtagctgttaaagtactctctcaatcnnnnnnnnnnnnnnnnnnnnnnnnnnnnnnnnnnnnnngcttagaatttgtaagtttgtgatcacctatagcattagtagtagcttaacgatttcgtgtgtgtttattttatggattaggttgatcttcttatgagagttcaccatacaaatttggttagcctggttggatattgtggcgaaagagatcacttggctctcatctacgagtttgtgcccaatggaaacttaagacaacatatgtctggtacacttgcaaataagattttctagtgatttcacatgtaccaatagctcatgaaacacatactttaggaaatggatcttaatctacggtctaaatatacaggaaaaggaggcagaaccaatatcaactggggtattcgactacgaatag

SEQ ID NO: 29412 - DNA, 8061 bp, Arabidopsis thaliana landsberg
tgtgacgagaaccaatgtttcttactctttcaatggcgaagaatcttggcaggtttgtcttttgtttcccgaaatgtagctcagatgatttggttttgattatgttgttgaatttcaaagctctagcatgaatttagatatttggtttggtttggttttgatctgaaaccaggaaaaaaagagctgcctttactctggttcttagcgattgacttatttttttgggaatgtgttagggatatggttttggttgctgaatctgctccagaatttagatcttagtttcgaaatggtagaggggttcttcatctgtgaaatctacttaacgtgcaaacaaataggttgtcttatgttgaaggtgatcatcaatttattatcactgtcttttgacctctatgttctgttctgtttttgattttttttcagccactaaccgaacttcaaggaacaaaatgcaagagatgtggaatctataaggacgaccctcttaaatatgatacatttgacgaatgggagctttgcccttctgatttcacagcagagggtagttacaagcgcttcaaagagaaagaatttaatgctacttttctctgccatggatgctcacaagttggagctggtgagttttaccaagcaacacatcttgagctttagggtcatttattactgttttgccatgaatactgttccaactataaacggaatctctttcacatgtatctctgttggctgtagcttcagtttgaatctgttctctgtgattaggactatcatattcatatgcattctttttcttttggcaggttcgaataaagaatcaggcaccgagaaggaagaacaaaagagcggaatgcatcctggaattgtggtactgattgtagtactcttgttaggtgtagttgcggtgggactcttggtaggttacaagtattggagaaagaagaaacggcaacaagagcaggcccggtttctcaagctgttcgaagatggtgacgatattgaggacgaacttggccttgaaaataccctatgaagccaagtttaatgtgccacagtaattcaaagtttatgtacatacatacaaaacgtcttgatcctcctcacaagcatttttgtttttgtcggacatagagaggaaaggggtacaatgatacatacaagcagttacttcatccaaagaaaagtcaatgttgttatttcttttgtcataactgtttaacaattaaagaggctaaaagaaacccagactgcgatagttaaatcctttttcctttacttaccaaattttttttttgccaaaaaagacattacgaggtgctttattctttactaaacgatccacaagcgagaatttcataaatgcatgattcttgctaaacaatgaaaagtaacatcgcagagtttgaaagttgtcggaaaacaaaccaagagtcatcaagagagaaggcaaagtaacatccaggattgtcacgcaacgaaaagaaaagtatcacgcagaaagaaagggaaaggaaacaacatccttcagtacagaatgctacatagagcttttaacctgtgaaccatcaaggtgactcactgcctttaggggaaggacggctaagctcagcctcatcatcaatcgggctcctgtcttgaccattaagtccaacaggactttcaccacctccaacaatgggactcgcagagttcctgccattaccattctcttttgggctaccatcatagtctgatccacgctttgggcttgcatctatcacttttcggtctggactcaggctttggtccctacctttgggagatacagatcgctccattgccttaggactgcgtgatctgtcctccacgcttttctctcttctcactggggatcgcgatcgactgatgaacagagaaataaagagtcaaccaaagggcataagccatggaattagcgttgtcaacatacttaatagctacaaagtacgaatcatttctacaatattaagggaaaatagttgtctacgggacatgcttaaagatcaaactaatatagttccagaaaaagctcagaattgctctaagctttttaccccacatatgaagctcaaaatatgaatttctaggtaagttttttggtggctctcctattgtattccgtatttgcatttataagacaattttcgagaagtccaaattcacaactgacctgtagctgcgacctcgactgtaactacggctacggcttgggctccttcggcgacgaggggagcgggatttgactggtgacctggaatagcttccaccctgcctggagaattataatccaaaagagatatgagaagaagcttaaagaatagaacaaactgtggaaaaacaaagattcaaagatttagtacctggccttctttggactaggactgtttttgcagtttctctcaatgtgtcctctttcaccacagcggtaacatttattcttccagtctcctgctgtgcagtctcgggcccagtggccatcgacaccacaattaaaacagcgaccagaaccaggaggtgggcctctgctaccattgtcccgcgaaccacgaggagcctatcataaattcaaaagtttggcaagatatcagtaatttttcatccaaattatcaagccaatggagaatcggtaatacagacacaaataactaacccctcttgatgcctccacagtgatgcgacttccatcgaaatcccgtccatccaagtaatatcttgcgtcatcagcatcacgaggatcactaaattcctgttctcaaaatgtgagggacaatgatagatgcataacatatatataaagtttgtgcgcatgacaaacttgagaatcaaacgcttgaataaaggaaaagggtaatataagacttacaacaaaggcataatcacgcttcatatccacatctcgtactctgcgtaaattgttgccagaaaatcaaggccatcattacttaaggaacttccaaacaccagtttttgagatttgaggccatttccaataaaaacatgcaataaatcaacaaacaaaatcgccgatgcaccctctatacaccagacgagaatttccaccaattacaccacagtccacccattcatcaaacatctccaggttaggcaaacccccagaaaccttcaacaagatcattcaagttaaagaaaaaaaaatccactaaacctagctccacaattttcccacatgtaccaatgcaacgttataagtaaaaactaccctctttgattctaatgttaaactttaggtatatatcccctgcacaacatcaaagaggaatcattccagattcacaccaaagaacaattaacaaaaaatccaaacacttatctccccaagaatacaaaagtcaaattaggtcagtcaagacaaaggaatatgactctttaccttccgtatctgctaaagagacgctcaaggtctctggtacgagttctagatgataagcgaccaacatagaggcgagtgtttccatagcgatcatcatagcgaggcattgtcaagctgcaaaatatttttaacataagctattaggcacatatctatatatatatatatatatatatatatatatatatatatatatgccaatcacaagaaaaagaataacagtatcctcttcaaattatataaacaagaaaaagaccagagagttaaaacactacctcagacctaaacatagaacccatgtgaatatctatgatttttcagcagaacacaaatccaaaaacaaagaaaccaaactgaataacacattcagaggcgaaaagaagaaaatttcgtgaggggagaatataaatctctaatcagattagacagaaggaaacctataaaggaaatctacggcgaggaaacgagaaaccaattgaaatccctaatctagagagcgaagaacaataaaatcgtaaccctaaacagatccaattacaaagattcttcctcgtacctggagagacgaagaaggagagtgcaaatacgcagtaaccctaataatttcgaaacgaaggaagtgaaccgcggatgatactgcgattagtcttcaacccctatcttataacttggaaaccgacgagattcaacggtagcgatttgtttcaatcaacggtttagatttcacggcgagataaacgtcgatattaccgatatagaaaatagaaaattgcacactttccaatttagtacttttattgggccttatatcaaactctaaagcccattaaagatttagcaaacatatgcaatttcgtattaatcataagtattaagtacatcataatcattggtcaagttactctaataattttctgttttgtaaatcagcgacgcttgttcttgcttccgatcaagagtgtgaagtagaagagaaccctaaagaagaatccccaagctacagtgatccacaagcaattccatttgcttatctccgtgattccttgctgtttcagtatatcgattcccgtcgttacgcaagtctccgccgtcacgttgatccccaaaacgccgctcatgctcttcaggaggctgattttcacggcggtcggaacttgtcccagcggcgaattgtcgaacatctggatccctctgacgaagcatttcgtcggatcttcgaattcgttctgtagaacaccttcgtaagggtatttcactagggagaggtaatggaaccagatccagtagagtgggattcgatctctagagatgaagaatccggagaagaggaggaaataagcgaggattgctacaaccaccgtgaatccgatcatcacgtgtgagactacgccggataagaacgtcacgaaggaacttccggcccaaaacgcggtgaggattgtgaagaagaagaagaggaatccctcggagcctccggcgagtcctacggccgagaatgttgtggcggcgaatgcggcggataagattatgagagcagggatggagattattgtgtgagcgaggacgtatgatgatcgccggtaagcgttgtaagctgtttctctcatgaatatgtaacgttcctgtagaaagactggtattgcttctgcacatgtgtagaatgttgtggacattgcgaatgcgaagaaccctaagcgttcttgtatacctcttggtgaattgtctagtttccagaatattgtggctaggatcattccggtgactagtacagctcctaggcggattccgaatagctctggttgtcttcttgagtttagtatagatcgtttaccaattacgagcatttcagtccagaatgggtttgcaaaggtttgaaatgatgatcttaggtttgttgctccggagacaagcttacctctcgagatacttgcgctgattgcatctttgagagatacattggtgtttcttctgctctggcttgaggtttgctttgctcgccattgcttgtggaactcgactaaggatttcgttccttctggcgaatcttccagctcacggataagatcgagtgcaaactccggcttgttctcgttttcaggaattgggtgaccgaattctgagaagaactgagggaggtgtgtcggggagccgctgtaaacggtgtttcccctagataggaagattaacttatcgagtaatcccaagattctgtaactcggctgatggatggacatgataactatgctgccgctttgtgcgattctctgaagcactttgacaaccatgtatgcactggtagagtcaagaccagaagttggctcatcgagaaagagaataatcgggtcatggattatatcggttccaattgagacccttctcctttctcctccagacacacctctgtgtccctcatcaccgatcacggtttttgctgcgttcctcaggccgagctgatcaatcagagcttgaacccgtgccttctttttcttcttagaaagcgagcttggaagcctgaactcagcagaaaacatcaacgtctcttccacggtgagcatcgggaagagaagatcatcttgcatcacataagctgatatgactttatgcaggctagattcaagaacttccccgtttaaagtaatatcaccgcgtaggctctcttttgaaatccgattggctaatgcatcgataagcgttgatttccctgacccgctcgctccaagaacagccatcatctctccttcccgggcttcaccagaaataccattcaggagcaccttagtattcatctccatatcattaccatcaaaaggtgaattcccacaacaaggaaagggcttaaacttcttcttgatcttcacgctgtaagtcaagtctttgaaggaaagaacaaacggagaagaagaaggcacacgagaagacggaaccgaggaccagaaattggacgcaaccgcaatatccatagcccgactctggtcatccccctcatcttccacactcatgagaagttctgcaagtgtgacagacacccgcgcagtgtctctgtgacatctctgaagctccactgacttgtggatattgtaaaacagagggaggccatcgccattgacccgtttggccggagataatataccgaacaaaccagacatcacgtgaattattgtctggttaatgttttggcctcaggtaatgtgtctaaaggtcttacccacagaacaattttgatcgactttataggatatttggatgggagaatgagggagaaacttgtcaattagtttggtgatctctaagtatctaactttgagttgttctgggttttgtagcttttcatatttacatgtacatagcttttgtttatattttcgtatgtatataaattgtaagttacgagtaggtgaggagttgggcaaatccatccacatttttccgttattgtatgtattttttcttggggcttaaggtactctgtaaaaaaatcctattttaggtggtttttgtttacaaagtggaaaagtttactccatggaattacgtgtttatttcatctgtatttaatgtatccggagtttatggaattgcaataagtatagcttatgtaacatgtcaggaatagaatttctccttgcacatgtatgtatgtcacgaatttcttaatctccttttgtttattatagtcacgacccgcgagttttctataatcacttacaagctctaagacttgttttttggtgcgtgagacaataattgactaggggttaattggatttccaactattttgaatcagtgaatatcttcgtacagtaactaaagcacgctacgaatatactgtttgttgtatcaaaatcaaatcatccaacattttgaacatttatttaccggttactaattaacttttgcaattagttaatatcaaacacataagatattctcataattaggatttggcatggtactatactaagattgtacaaaggcatgccattatgcataatgaagctaatggcgtgttatctttcaactgtttgtttaatcatgcacaccattttcgtcatataaaaaagcgtaagtgaagcctatttcatttcaaaaaaaaaaaaaaataattataaggatcattgatttgtacttttgtagttggtgaaacaaaaaggaaatgaatgtgaaaattatggcaaaaaaacgtgcaaatgttcggcttttgatgttgtagagctacacacgaaaacacaacaaaatttgtcattaggaatatgtaatggaaactttatataacgtgatgagttagatttaggcatatggaagtttggtgtagctgttatatctgttttcttgattattttacttttgatagcccatttttacaagagttgtcaaataatagaaaactatatacttagtatcatcagcttgtctctatcaagttgaactaatgatttatccaatgaaatacataacatttcttatggaatgtacactttcacacagagaatgagtttatattattctggttaagtttagtaagactttctttatgtaaagattgttttgaaattttgtgtttggtagaggatattttgctaagtttcccaacataattttgttaacactttgagatttatcaggtaggactagatcaaggaattgaatccct

SEQ ID NO: 29413 - DNA, 1391 bp, Arabidopsis thaliana landsberg
gagccgtattcattgtttgattcgtagggagtgtcgaaggctagaggatggacttcctatctatgcctaccggcggcagattttgaagaaaattcatcgtgaacaggtatctttaagaatctcgaagttgacaagtggtctttgggtccaagctagttttgaatcacttgagtacagataatcgttcctcagtgatcgagttatgctgttgtcttgttgtagtagttcatattgtctgctaaggttcagttttctctgttttataagtgagtccgtgtttggtcattttgagtctgtattaattgattttaattgtgtttgtagataatggtgttgattggagaaactggttcagggaagagcactcagttagttcagttccttgctgattccggagttgctgctagtgagtcgattgtttgtacacaaccacggaagattgctgccatgacattgggtgatcgggtcagagaagaaagcagtggttgttatgaggaaaatactgtttcttgtactccaactttttcgtctactgaggagattaattccaaagttgtatacatgacggataattgtctgcttcagcactacatgaaagatcggagtttgtctggcatttcatgtgttattattgacgaagctcatgaaagaagcttaaacacggaccttcttttggcattgcttagaaagttgctatccagaaggattgacctgaggcttgttatcatgtctgccacggctgacgccaaccaactttcacagtatttgttcgattgtggtattcttcatgtcaatgggaggaactttccggtggagattgtatattcccctagtggcacagaagagaattctgttgttggccgcattgcttcatatgctggtgatgttgttaagatggcagtggaaatacataaaacagagaaagaaggaaccatccttgcattcttgacttcccaagcagaggtagaatgggcatgcgaaaggtttgtagctccgtctgcaattgctttgcctttgcatggaaagctttccttcgaagaacaatttatggttttccagaaccatcctgggagacgaaaagtgatatttgccacgaatattgcagagacgtcgctgactattcctggtgtcaagtatgtaattgattccgggatggtgaaagagagtaaatatgaacctagaacgggtatgagcatcctgaaggtgtgccaggtcagtcagagttctgctcgacaacgtgctggtcgtgctggaaggacagaacccggaagatgttacaggctctactcaaaaaccgattttgattcaatgaatcttaatcaagaacctgaaattcggagggtcatcttggtgtacacttttgaggatgcttctttgggtatagacacata

SEQ ID NO: 29414 - DNA, 1292 bp, Arabidopsis thaliana landsberg
tgggactcctgacttaaattgttatcatgtaagcacatcagctttatcatcctttctaccaattcctttatctattgcttatagtgtttcttcgtctttagctcccatctcttttcatcagcctgttttctcttcatgatagtcatccttgaccatcattctactttggagctagttacatcctggtggggtttcctaactacttgtttcttaacttaaccccaggaattagggactcacttcatataagatttccgtttaaagaggataaaagtacaacagagatattgtattttctacctctagttagaagctggaaactgtgtctagtccttcatataatttgctcgcaaattgatatgtttatcgtctttggttccaggcttttgatttttgctctacgacaagaaacgagccttttctacatctcttccattgcctttatgtgtatcctgtagctgctactttaagtcggaagaggaatccctttatccgtgtagaattgagaaaggatgacacagatatccgaaaacaaccactcgaggtaaatattttgatcatcaaccagacttggatacgagccgacctttttcttgagtcttatttgtttcttactaatgatttggctaggcaatatatccaagagaacctggtgtttcactccagaaatgggttcatacacaggtcgctgttggtgctatgtgccgctagctaccatgatgaaattaaggtctctcttcctgccacatggacgccatcacatcatctgttattcactttttttcatgttgatctccagacaaagcttgaagctccaagaccagtaagatttacatagagttctgtgcttgtttatctctaatgaatctagcctatagtgactaattttcttttcttttcaggtagttgttggatatgcatcacttccattatctacatatatccagtatgtatatgatattaccctagcgtttggtctctggactttttatgtattgctgaaagaaggcttctcttttagatgtccttatcactaattgttaatagatgcgtttttcatctgtatgggcgaaagtggtagtacacaaacaacaatgaaattttgaagatgcagtatatcattgatgtcaaagttatctgaacaactagattgcgctttcagtattaacaagctgggagaagtgtatgccttggtttatcattttttcttagtgctgacaatttcgttgatttctaatgcagctcacggtctgatatttctctaccagtaatgagagaacttgttccccact

SEQ ID NO: 29415 - DNA, 2819 bp, Arabidopsis thaliana landsberg
aagacttgacacaaggaatgaaacaacttcaaatgtctagcaatggagacgtctcttctttaccaccacggtctgttcttgccaaacagcaacggttccattttgttaacaatcattctcgttgaataaaacaaagtttctctttgttttgaagcagaagtaaaggtgtatctgtgagaaaaattaccttggagttagcagttgagaaagatgctcttggttcactctatggcagagatggcaccggtgtggataatctacaacaggtatataaatgataccctctcttaatatatatcttcagatgatgctagacaatgatgttgatgagtttttgcaaactttcagatttcaggagccaatgtggatgtgaaggatcctacaggaactgaagctacagtcttaatctctgggaatcctgagcaagcccgcacagcgatgtctttgatcgagtcaatccttactgattaataattgattgcgttttgcaactacttttggttgtttcgttttgagtttacatatcccaaaactccatccattttttgtgactggttttgaaaactagcacttgttgcagtgttgtctagaagaatacaacattttgccggtttaccaatactggtttacgaataccggaatcaacgacaggaaaaaaatatttaaaatgcttagtttgaagtcatactaataccggttccatattaaaatgcttaatagggactacgggcccaatataaaagtgtcaaggcccatgtaaaactttacggagttcaacgttaacggtaatactaataatcttaacggtcgtcgtcagagattcaaaatttgaacacaaaacgcagaaaaggaaaatcaaataattcctccggacacgcctttctcttacctcactctcttttatctttctttgcgttaagcttttcaatttctacatctacaaaacagagagacgatttgcttccaaataattatggatgatgttcagatcgatgatacttttccggtggatctaaatggggttacgtcactttgttcaccggagattcctagtttcgatttcgttagtgatgaaacagagaaattagagatcggagatacttccattgatgactgtgacgatgcattgggcgactccatggtgtgtgatccgaattcaagactggttcctactggtctcacaagaactaatcgcacaggttcgattctctgactgatctttggttttaatctgcatttcttcttcgtttaggaaatttctggttttggatctgattgttttatccgattaacttgttaaaccctaggattcgggattttattcatttcgcctaattctgggtgaagatggatttaatctgatgttaacgaggagagttaggtttctaattcaatgtaagttatgtattgaggcattgatttttgttattggtgtaagcagatgagacaattatgttcataaatgctggaggagatgattcaaaggtattagattctgaattgaatatctccagagatgactatttcgaaggaggagatgtgttgagaacagaagagtctatagttgaagctggagactttccgttcatttatcagtcagcacgtgttgggaacttttgttaccagttaaacaatcttcttccgggagagtacttgatcgatttccttttcgcggagattattaacaccaatggacctaaagggataagggttttcaacgtctatgttcaagatgagaaggcaagtagaaacaactgaagatggtgtttttatttcatgtagttatgaatgtgagattgtgtaaatattgtgtatatgctgaaagaagtgtttttttttgatgtgttcaggtgttagctgagtttgatatattctcggttgttggcgcaaataggccactcctgttggttgacttaagggtcatggtgatggatgatggattgattagggtaaggtttgaaggaataaatggaagtccagtggtttgtgggatttgtcttaggaaagcgccacaggtttcaggtaatggctcttctctgtgcttgctttcatatatgattttaaattgttaagggaatctcaaagttttcagtttctaactcattcgttgcattactttacagttccaaggacatcacaagattttattaagtgtgagaattgtgctaccgaaatcgagatttctcctactcgggtactgtttaactagcctgctgtcatcttttttcctaaaaatatgtgttatggattacctgagcttcttcttttatgttgatatttgagcagaagagacttatgcgagccaaagctcatgacaagtatgagaagaaaatagcagagctttctgaacgatatgaacataagacaaatgagtgccacgaagcatggatgtcactgacctctgccaatgagcaactagagaaagtgatgatggaactcaacaataagatatatcaggcacgctctctaggtaatgaacttgtcatatatgacatgttatatctgacatatcaatccaaatttgttactgttatatctttttttgacggaggttttcttacttgattcggtgcttacttggaacagaccaaactgtgataacacaagctgattgtttgaagagtatcactagaaaagtatgagaatgacaagagacattgggccacagcaattgattctttacaggagaaaatagaggtagctgtttaatttttcaagtactgttgttttagagcctgtttgcatgatacattgtcttaaactatttttttgggaacttatgaaactgttgcttttcatattattgaaattggaacaat

SEQ ID NO: 29416 - DNA, 1353 bp, Arabidopsis thaliana landsberg
atcttggcttgaagattctcgttcagtaagatatttgccggcttcacatctctgtgaactatgggaggcttgcaaccgtaatggagatactcgaggccttaatcatttgaaaattctcattcagattgcgtaaatttttaaaaagaactaattttgtgttttttgattttacaaaccttgtgctgcatccaatgatatctgtaatctctcttcccagctcaagattaaggaactttttcctttacaataaggaaaaaaaaaaaaaaaaactgaattagtttagttgcttctgttaatacaaaagggctgtgagtttattatctaaagactaacctgacaaatagtctcctaagtttccattagccatgtactcgtagataagtgccatgtggttatcttcattgcagtatccgataagagatgtcaaatttgtgtgatgaactctcatcagaagctcaacctgagagaatatagattagtttggactttggatgcaaaacattattaggaattacagagaaatgatgtcttaacaagtaatttagagaatgacctctgctcgaaactctttgtaaccttgagttgactcttcggaaagtatcttcacagctacttgatctccattcaagaaaccatggtatactttaccaaaacctcctttaccaagaactctctcgaagttgtttgtgatattcacaacttctgagtatataaagtatcttttggctgtgtccaatggtccggtgttgacacctaatggtttgtttgagattgtacctcttcgtgatcgttttttaaaatgccagatcaaagctaatgcggtcaaaacaatgagcaatcctgcgagtgatgctactactgggacgatgtaaccaattttcttcttcgttgttgtttgacatgagggagactgacaaaggtccgggtttccaccaaatctaaagtttacaaaatagaaacttcagtctgtatctttcgcaatagaaacggttcaaactacctcacatagcaacaagcaaggccatcctttctagattgcaatacgaaactaaattgatgaaaatgcacacattatgtttcagagctcattgagatgcatacctaagcgaaagagaaccatcttttgatttctccaacagtttagctggaatcgaaccagttaacttgtttccttccaggtttctacaagtataagcacagaaccttgtataaatttcacatgtaataaactgctactggtttataaatctcaccactatagtatgcacgactcacaattcagtcaagtttggtaaactggcgaggaaatcgggtactttccctgttaagctgttgtttgataagtctctgtat

SEQ ID NO: 29417 - DNA, 2281 bp, Arabidopsis thaliana landsberg
attttatatatttaatttctataatatatatacatcatatttaaaattaaccgaggttggcggaatattgactattcaacgatacacatacatgcatgagaatgccttgtcaatatttttaatttttattttttttgggcgagccttgtcattattttgataaattttctgcatataaagaaatataaccaacataatataaaatcgattaatacaaatttgattctgatttcattgatacgagaaactcagttaaaagttaaagttatttagaatcaactacatttagttcgtaaaattagtaattaatgttgtgtgcttgacattatgtgaacacaacttaatttactaaacccaaattagaatgaaaattgaaaaaaaaaatgacgaagatgaaaacgatagaggaggaggaggaggaggctcgcacgtcggagaagggacttggtcgtgaagcgacactgattcatatattgccacgtgtatctctattatttcccacgttttctgcactctttcattctccccattttcgagccagcagcgtcacttttttttttttttttttctttgtttagtatagagtaagtagatgaacatagataatagtgtatgtgcagaatacgtctactattaaaaatatcaacaacaaatagtaggagtagtaatttgtcacgactcacgtacatctactgcaagtctgcagcaaatcattgccgagcattataacttaaacagcagtattttcagaactatctcacggtttttaccaaaaaaaaaaaaaaaaaaactatctcacggtttaattacatgactcaaaacaattgatattgctgttgtaacgtttttgtgaaacaaaaacaaaaacaaaagaaacctttgtttgtgggccttttggagtagtcacgggaaaaaatctgaatccgcattttgggctaaatgtaggcccatctctgaaacatctaccaatccccgttagattcaaatttgggcttagctaatatagtgaccaatgaccatctcgctccccttttgtttattcgcctcaataaattgatatgtagaatattttgttttattccacaataaattttgtcaattacaattctccaatattttaataaagtgagaaaaaccacatgtaatgaatatacttgtggaaataaataacgtaccattaaatgaatgtttctgaaatgtagttggaaacaacttttataatgttttgtcaccaaacttacggaatgacaaaatggttccatggcaatcacgatacgattgatccaaaaacattgtaacgttacgaaaaaatgagatatttgcaagatataatagataataaaccgaggccaactgattttgtaataagtacgaaaatgataaattcatgataatttgtgtgagttaagaataaccaggacaacaatcatattatttataattagtgttacaataatagttcgaaagtaaaataaagtttttttcttcttctaatgtatgtatgattcatgattgtatgggtaataaataaatatcatagcgtagattacaagccatcaaaagcaagcttgtcgaggagagccagagcattgctgcatagtcgcatacacttggtggccttcctccggaccatcctgaccgtccgtgttctactcgacgtctcttcaaatccatctagacacgtgtcatcatccgtgagtgctgcgcttagccacgttgcgagatcgcttatctgccgctggaactcatccgcgttcagtgtccgcagaacggcgagcgacttgtataggttgtcgagagagtccacgaagagctctcggcaatccgacaacgcgattcgctcgcgttcgccaactgctgaacgctgcgttttgagcaagagcctcagcacccgtttggtgtcggttgtggtaaccgcgacgctagctcgagcccacttgctggtgttgtttcgagcgacgattgcaaacggccatagcgttcggacgcagaggcggttgtatcgcgttacgttgcacgcgtttctaacgtatgtgctgtactgcgtcacgatgtcgtttgtgttgatgttgctaccggtggaggctaacgacggatttgggtttagtgccacaagaagagagagaagcagaagaagagtaaacgtgataggagaagaagaagacgaagtcatgttctttattggaggaatccaaactttttaagaatttgggacgatatttcaaatggagatcgagagagactatattatatacacaagaccaagaaggagcctatggga

SEQ ID NO: 29418 - DNA, 2609 bp, Arabidopsis thaliana landsberg
gggtacgcataacaacgtagtttttttttgttcacaaataacaacgtagctaatttatttatttttcttatattatcatagacttttgttggttaaataaaataaaataaaatgagaacgtatcaggtgacctcagatgtaaggaaagggtcggtagtacgtggcatattatcattgggtatcttttttaccaattaaattggagatgcatcatgcatggcctcaccgaccatgttaagtaaccttgtggcaccgtcgaaaagcaagaatctttaactaaagtgtccagtcagctctttttcttttactttatttcggctaccaaacattattatacttcacaaaatatacgccaagtaattttttttttctgcttaaaagtagatttctgcaattataacttttaagacaaaaaataaatgttttaacaaatgttttaagaaattttaagcttaaattttgtccagttttgatcccaatttttgtccagttttgatcccaattatgtaccaaaattataacttaatatttcaatatatcaaactgtatttcaatatatataccaaaatttgttgctcatatcatcatatcgtatcaataaataaacatacgtcagattacatttatagttatatatatacatataataaatttagatctcatattctcattgttattttgattaattccgttagttcatttaacactcgcttaatccagtttgattcataaacctatctgtaaatttaaataatatattacgttatccattgtataaaattaaatttctattactgaatacaaaagaacgtatttaattacattcttgtagaatccgaattccgaagcaaattaaacattaattgttaattaatttctctttataaaacccacctcatcctctaacttcttcatcaatctcaattctcaaacatcaagaagtctctacaaaaacaaaatctcacatctaaagaaaactctcaatagaaaacagttaaacaacaatcaagaatctataatgggaagagatcaagaaggaagccctccagttcccttacatctctgcgtcttcgtcttgatcctcttaatgttcgtaacaatctcatggtacgcgagctacgaaccagttatagaaggttttacgtatcagttcaagcttgctctcatggcttctcctctgcttttgctcttggccgttcattttctatccgatgatcaaggagtcggagggatgatgacgtctttgatccatctgaacgaaagagagtctttatatagagctggaggaacaccgtggggagtggccttcatgcttgtctttctcttcttcatggtttcttatcaatctcagcttcaagaacgttggtttcctcttagataatgagacgacatcgtttattggttcttttactactcttgactttctctttgggtttagtataatggattcttgatgtaatttttttggtttaaatttcattgaccaattgtaccgttttatggaatcttttctctcatggtatagaataattcttagtatatattatgacgagaataacaacagattactataccaagttttttggtatctgcaccaaatagctatggacggtgaattatattttgttcatttgggccttgggggaaaattaaacttttgtttaagactaaaccggtcaatatttagtatccttaattatgagaaaattttatcattccgccccaaccgaggatcgaacccggggactaaggtgctagtccacaactcagttcaagcatcgatattttcctcgtatggaacgtaaaatattgaattttcatgttacatgttctcgcaacaatatttttctagaaaaaatatgtatgacgtgtgctttcatttgaccggataaggtcgaacgatatatgtccgttacttccacgtctctgcctctggtcaaatacgcaaggcgctctctttctctataaatcttcaatctcaaactcatcttcaaatcttgacacatcctcaagagcggaaaaaaataattcttggcatattaccttttgtctaatcaaaactcttataatcgagtatttttcttatatattacaaccaatggatggaggcttgggaacgatgttgatgaaggttgccttatttgccctagttcaaggtttggtgtatctcatcctcttgaaatcgtcgagggtttttgctagatcgaattcgttgaaaagggcttacagtttccgaccgatgaggtcagtcagcatccgtcggattctggcggcgcttcaggatattcctgctggcgacgatatgtctccttcatctaacggctcttcttcttcttcgcaaggtgaggcagcaacagcaacaactacatcatcatcaccatcttaggcagcaacaagaacaactacacggcattatttgatatatttttcattttcttttagattgtctcgttaatttgatgtaagattatgatcaattcatatgtatgattagtttagatgttgatcaattccatagtattaagcgtgccgtaggaagtatagtccaaaaagatatagcataatatcttgattagtaattttatatttaactaaacttattttatcga

SEQ ID NO: 29419 - DNA, 2339 bp, Arabidopsis thaliana landsberg
  unsure (1)..(2339): unsure at all n locations
tgtttggtcatctctcctttttatttctttctttataaatagaccaaaacacgtcgttttgttcaacgatctaatctcctaatcgtttcatttctaaccgtcgataagttccgtgtacaccacaggcctcatctatacgcgcgtgtggcacacttatcgaggaaggagaacacatcttaaaacgcagcgtttcgtagtgttaatgggccaggcctcaagaagccttatttttttcatttttaaaaaaagctggttctgaagttaaacaagacaaggatgaagatagctttgtatccaaacagtcatcgaaataagcttggacgggaaattgaataacggccacatgaagaataataccaaagccgggagaagaagaaaatggcggtggcttctcttagtatttgcttctctgctcggccacatcttcttcttcgcaacttctctcctcgacccaaatttgttgctagtaagttatctttagcttatgttggtgttggatgaacaatatttcattgttttgatataatggaggcaaatttacgaattttgtatttctctgttctcaaaagagcaaactttagttactgttttgatcatactaattgaatttcatctgtttaattgattggttagtggctgcaatgagtgaggatccaattcgtgaatggattcttacagaaggaaaagcaactcagataacaaagattggttctgttggtggtggatgcattaatcttgcaagtcattatcaaactgatgctggttctttcttcgttaaaactaacaggtatattaattgatgtcttactaaacctctctggtattcatagtcaagacttttaatgttttgttgtttgttacactggttttaggagtattggacctgccatgtttgagggagaggctcttggtcttgaggctatgtatgaaaccagaacaatccgtgttccaaagccacacaaagcaagtttaatctttcttttctttctttggcgtatatacattattatttttgttgatctctctaatcatagattcttgtttaaaagtgttaacaggctggggaattgccaacaggtggatcttatatcatcatggagtttatagattttgggggatcaagaggcaatcaggtgataatgatgaatataaactatgaaccaatgttaagaactttagtttcatgggttcatggttattagtcattaggctgaattaggaaggaagctagctgagatgcataaagccgggaaaacttcgaaaggttttggctttgaggttgacaacactattggcaggtggaatgaattccattttcaaaaatcttagtcacttttattgagttgctgtcttctctcacaatcttcatgatgtgcaatgtgcctattttagtaccccgcagatcaatacttggtcttcggattggattgaattttatggtgagaagagattgggttaccagcttaagttagctagggatcagtatggtgactctgctatttatcagaaaggtttctttctctcttctctctcgttataaacttggtgagaacagattggtttaaggtttgaagaaaatatttgaacaggtcatacactgatacagaacatggcacctctctttgagaatgttgtcatagaaccgtgcttgttacatggtgatnnnnnnnnnnnnnnnnnnnnnnncgacaagaacaacgaacctgtcattcttgatcctgcctgttactgtataagctttcattctcaaattcttgatatattttaccattttcaagcaccgttttgatctcattcctcctccacagatgggcataacgaggcggattttggaatgtcgtggtgcgcaggatttggagaatctttctacaatgcctatttcaaggttctcttccttttctcacagtttctgtatcaactaaaatcaagtttaaaggttgttttgtttcattgctccctcaaggtaatgccaaaacaagcgggatatgagaagaggagggatctgtatttgctctatcattacttgaaccattataacctgtttggctcgggctaccgatcatctgcgatgtcaatcatcgatgattatctacggatgctcaaagcttaagatgaggagggaaagctgctgcttatatgctttctttatgtgtgtatttgtgtgttggtgttatgaagggtggtttatacgaagaaagatgtctgtcatacatgtttaaatcgatgatctggttgtacataggtggtaatgtgatggagagaagaattcacaatcgattttaaacattacaaataacaactagtaataaaagcagcatagttaatgacaagagttacta

SEQ ID NO: 29420 - DNA, 4452 bp, Arabidopsis thaliana landsberg
catggacagagaaaagacaagaagctagaggtattattactgctcgatttctgtgctgcttcctcctttttaccttctgagttactcgatttcacataaagtcttctcctttcgcgaacccaattcccgttccctgatattctcttcgagaatcgattagaatgaaccatggatgacggaaacgacgcagtcggatggcagagactgctatcaaccaccgaaattgacattgttcctatcaaaaactggattctacagaaaccctaattcgatatcgaagaaaggagaacaatcgattcaccaaagttccaaaagtttggcgcttggcttgactcgaaacaacacagtcgacgagttctcgatgtcaatgacatatttaccctcagatattcgacaagatacaaataaagtcctttataaagaagggcaaaacacgtaaatatgtccttcttcttctctctcacaatagtttcactttcttcagtccccattcgagtttgaactttagttttcgatggttctgttggctcttcgtgtgaaatttcttgttttgggtcgccttcttcggttatagaggtagtgaagaatattgacgacattgcagccttaagggttaaaaacctttgatgggttttattatgtacaagacatgttgcttttgattgatcagttaggtgtgtcactgttagcttatttagttggcttgtttgtatagaggttaatgactgtagaatcttctagctacatattaagttgcacaactaaacacgattgctaaatatgcacacttgtttccttcctcaaaccacatgtaatgctggtcagacagagaaaactgaaatttccatgtacaagaaccacatagtactaacagatcttactaccacgaacataactgtggctttggcttgcttaacattgtgtaagactaatgtctatttcaccgcagaatcgaatagcagagccgatgataccatcttcgatcttcgttcttccagttcaggtaatcttttttcttgtttcgatgttagcaaggtttcatccatgtcttctttcactttacacatgttttgttatttttccttgtagcagatttctcaagccgtgatttccttacagcttcttggatttgtctctcatggtctttcaatatgtcctcaatgtttccaccaggaggcatcaatggtcccgaacaatgcattctgttcttcttgcgtacgtatgtctgaaaccacacgaaaaaaagaacatcttaggatccatgtaatctaatagggaaaaagtgtattgctaatatcttttatatattaccgttgtggtttgtacggctacatcttctttatgtgaaggagacaagtatctcccagtcatgggcacattgcttgatcgagtagcctttagctcaactacattgttcctacagctctcatttttactccatgttgctgttatgcttggatgaatcattgaattggtatgagaaaagcctttctgatctctgtcgcctctcaagcctgttctactgtcttcctgaggattgaatctcttggtggtgattgtgtcttttgactgccctgaagcaacgaactctggtgttgtagcagtactcttgaagtctctcgaacctcgtctcacagattcaggtccacgacccttcaccgtttcagactttttcctgaatttatatagaacttgtgtttaggaattcacatgaatcattttggtgcaataatacttgtataaggagtttttatcacataccttcttgcttcttcatcacggacctttgcatcaagttccttgcttggaggatactttggcaaacttgatacattacaagggagtggttccatagtgaagaactagagaacaaaagaagaagaaagaattgagtttgcattgaggaggtgaatcaggaactgctagttgaagaaatataaagctaccttgctacttagtgtcgaagaagccgtgccacgcttcgctggttctaaggatagaagtttgtcaacaagagctagagcagaaggtggtaagttcttgaaagtctctagaaggacccgttcataagcgttgttgcggcttgaaacttgtatacaagtggtagctttgtcttttgcgagtaatgagtcacttggtgaaccacacaacttgaagatcttatgcatttgctccacctaagagacattctcaaagatatcaataatttgtgcttaatggattcaaagaactgattgtctgatgaatctacatgtaactcacctctgttcttcccggcatgattgggtttccctaaaaacagttctgtgagaatgcaaccaacactccacaaatctatccctggaccatattctgtagctcccagtaaaagctcaggggctctgtaccacaaggttactacacggctcgtcaaaggttgatcttgttctgaatgatagatattcgccagaccaaaatctccaatcttgaggactccatcattgtttaccaagagatttggacccttaatatcgcggtggaggattccacggctatggcagtgttcaagcccgctaagcaattgtttcatgtaacatttgatctgcaagaagcaacatgaaacaagatttgtctccctattagtccaagatttctttgttaccttttttcattataatcgaatccttgaacgtacctgagattcagtaaattttactccgggtctaagagcgagaccggaaaggtcatgctccatgtactcaaacacaaggtacaagctaccagagagtttagaggtcacaagacattcaagcttcataacgtttggatggtctagtttccgcaagatgttgatttctctagccatgaatctcacgctttccggatccatattaacgaacctgaccttcttcattgctaccattttacctgtctcaagatcccgggctctgtacacgctactgtaagtcccttgtccaatctgttaaaagagacaacacaatagaaacgttatagcaatcaagaaacattaaaaatagtaacaaagagagtataaggaactaactttgtccagcttctcaaaagactctgctcgtcgtggaacccaacctttgatggcttcacctgcaacagaagttaaccaagaaggccatccagctgcaataagctcggcctcagggctatgtggaacacttgtgggaatattactcggtggaaaaatattgaatcctcctcctcctgttccaatatctgcagttggccatctcctgtgacaccttgtaggtctctctacaattactgttttaccgtcactatcatctacaggaacaatcaatccactagctctagcggatggtttatgtgctaaaccatcagctttaagtccaccagagcttccatcaacggatttatgtgaaaactcatctttcttggaagttacaggagcaatcaattgaactgaggacgttttgttccaattctcttttggtttctcatgttggtcactaacttcttcttctgcagttccttttgagcaaatgcagcccataatactcaaagaccgtttcacgatttttttcgcatcaagaacaactcttatcctgaatgattcctaagcataaaactcaggaatctcaggtttattagctaaagacacagaggaggacgatcagattttgctcctcctctaagaaaattaatgcaattctcttcaaatgttatgtgtcagggatcttttgatcttatatgatcccaaatgaataggaagaagatcttttaaaacctagaaacaatgaggattaaagactttggaggcagagaaaagaagacttgtggttcaagaaacgagagagatgatgagagaaagaactaagaagcagaggaaggagagaattaaaaagactttggaggcaaagcaatagcaaaattcagaaagctaaacaccaaaatacaataagagagattaaaaatcagagaagagaagacttgtgattcaagaaacaagagaaatttcagaaatcctctgtgtttttttttccgttatctcactgcaagatagaaaaaacgttgcagcaaattctgttcgtcgataacggaaaatgcggaaagagaaaaatgacgaacagaatgtagttaattctgatatggaaatttctttaggaatcaggagagatgggatttggtttttgtgtcgccggaaattatggagaagccctagattctccggaagaagacaactcacaatatctcatctttttctatttttgaaatgttaggaaacagactaacgaatttgcatgaagtgaagatttgatccaacggtcgaaaatgaagttgttttgtttgttgttgttacgacaatgacccacgtaggatgttttgtcggagatcgtgggtcccacttgatatattttcatctacctgcaagaacatttatcccaaagactcttctaagttcaagtctcccacaaagta

SEQ ID NO: 29421 - DNA, 1806 bp, Arabidopsis thaliana landsberg
ttatgctatgaagccgactcgatgagtggagatgatgaggatgtctgctcagaagacttggagaaaccaatgcatggaaaccataaagatgttgactttgtagataatgatccaagccagctcgacaatgttgaattcgatacaacgggtagtggcatttcaatcagatcacagcttcctagttgcgttctagaagagccaattttctcagaatctccaaagtttaagaatgttcagaagagtgtagctgcatcgacaaagttttcagcaaatcctaggaatgtgtctgaaagctccaacattggagacatgaaagtcaatcacattagcccgtgtatgtcaaagaaggtttcaggtcctacagattctctagctgctagtcttcagagagggctgcacattatagactatcaccaagggagctcactatcaaaaagttcatctgtttccttctcttttggccatatggttttgaaaccttgcgcagaaggtgagaatcttaggtgcttcggtccaatcttttagaaaagataaagcttcagaaggtggattgtcgtcgattctcctatgtctttcatgtagaaagaaagttgaccaagaagctgaagtatgtccacaaaacctgagatatttgcctactttctctatagctttaattttggtaattctgtttcgttacttatcttataatctcttctatatcaggtaacagaagaagctggttcaaacgaaaaacatctcaagaacatgtgtatggagcaagcagctaaaattgaggagctaactctcctggtaaaaaccttgtaaactttaaagaatattagtgttataaaaccttgaatcagattttcaaaaattagttttgataattcttaacttagaccaatatacaacatagctgtggaagagcctgtgaagttaccagttgagtttcattgacgatatttgacaagaatggcaatctaaattgaataaactgtgttgtggccttgtttgcagcttaggaaatcagatgatggagaagatggaacagagttcatcaaagaaacatatgagacgaaacaaattagtgaagagtttggaaaaacaaactttgaggtaagtgaaaaggaagctcttctcaaggagattgcagacctaaagagcaagctgcagcctactaagtccacagacaatctgagatcctcgttactactacgatccattcaaatgcgcaaaagcattgatgttagcaggaatggtgagaacagtgatgatctagcgaaagaaagggagatgtggacagaaatggagagtgagtggatatccttaacagatgatctcagaatggatatcgataaccatcgcagtcgagctgagaatctagagtttgagctcaagcaagagaagctagccactgaagagttgaatgacgcgctcactagagctgtgcttggccacagtagattcatagagcagtacacagagctgcaggagacgtacaatgaacttggggagaagcacagtgtgatgatggctggaataacagatgtaaagaaagcagcatccaaggccgctatgaacggccgccatggaaagcgttttgccaaagccttttcagatgagctttctgccatcagagctgagaaagagaaagaaagagagctcttgaagaaggagaacaagaacctaagaactcagctgcgagatacagctgaagcagtccaagctgctggtgaactacttgtcagacttagagaatctgaacaggccttacaagtctctgaggtaaactaagctcattcataagatcataacactctcatg

SEQ ID NO: 29422 - DNA, 1774 bp, Arabidopsis thaliana landsberg
gaccccgaactcttagttgcttttatcgagtgctgctactaggagaagtcccttgactgtcttggaatctgagtctactattcgtgacatggctgttttgttatatcaagctcagcagcttcactatgatagtgctactatgattatgaggcttaaggcctcgattcaggctcttgaagaacaaatgagttccgttagcgagaagagttccaagtatggacagattgctgctgaggaagtgcctaagagtctttactgtcttggtgttcgtctcactaccgaatggtttcagaatttagacttacagagaactcttaaggaaaggagtcgtgttgattcgaaactcacggataacagtctctaccatttctgtgtattttccgataacattattgctacttctgttgtggttaattctactgctctcaattccaaggcccctgagaaagttgtgtttcatcttgtgactaatgagatcaactatgctgcaatgaaggcttggttcgccattaatatggacaacctcagaggagtcactgtggaggttcagaagttcgaggatttctcatggctgaatgcttcctatgttccagtcctcaagcagctgcaagactctgatacgcaaagctattatttctctggacacaacgatgatgggcgcactccaatcaaattcaggaaccccaagtatctttccatgctcaaccatcttaggttctacatccctgaagtgtttcctgcgctgaagaaggtggtctttcttgatgatgatgttgtagttcagaaggatctttcatctctcttttcgatcgatttaaacaaaaatgtgaacggggctgttgagacctgcatggagaccttccaccgctaccacaagtacttgaactattctcatcctctcatacgctcccactttgatccagatgcgtgtgggtgggcgtttggaatgaacgtctttgatttagttgagtggaggaagagaaatgtgaccggcatataccactactggcaagaaaaaaacgtggaccggaccttatggaaactgggaacactacctccaggacttctgacattttacgggttaacagaggcactagaggcgtcctggcatatcctgggattgggatacacgaatgtggatgctcgtgtgatagagaaaggagctgttcttcacttcaatgggaacttaaagccatggttgaagatcgggatagagaagtacaaacctttgtgggagagatacgttgattacacttctccttttatgcaacaatgcaattttcattgatatcttagggtccatagttttacttccacttctagacagctatatcttccacatttggttacagagacacttgcaagagttttgtatgctctagcaccatcacttactgtattttgtgaatgtgatattcaaaattcaatgaagcatcagatattctctgatattcacacattttctctgcggcattatgatttttgcttcaaacttgaactgaataacaataaaccctataatgttggcgaccatatagggggcaacgaactcatctatttcaaaagattgtttctttttttgaaagttaaataaagattctatgtatcatcttataagattgacaagcttccttctctctctttctctcaggaagcagagtaacaatgaagagctgtgagcatgaactactcaaaacaagaagaggaaagtcccgcgaggttagttcacgttttctctcttcgccgtctgcatcttcttctcctaaccgcagaa

SEQ ID NO: 29423 - DNA, 3344 bp, Arabidopsis thaliana landsberg
  unsure (1)..(3344): unsure at all n locations
agaataacccgaattttcgaaatcaaaattcagaatctaaacaacactttatatcatatttggagaagtagttagaaaaaactcaaatcttaaccaaaaagcgaagagaagtgagaccataataattcaaataatcaaaagcagaagagtaaggagtgaccatgagaaggaggaacaccaacagcaggaggttgttgactcattgtagttattttcttcttcttcgggagtttggaagatgatgcaacagagaacaaaagtgagaagaaagaggaaaaggaaaagcgcgtttttatttgtaggcgaattaggtttactctttttaaaggtattttctaacggttatcctatcaaattatatcttagtcaactttttttatgttttaaatgtatatcctaaatattttcttgatttttttttttaacttttgcttttgggaagtgaatccagattctattccctataagaagatatttttttggtaagccctataagaagatattgttacatttatctttgactattttaattacattaatttaatttggaaggattttaaatttttagatattaattacatttatttatttttcaaactttaaatttattttctcacttttcttgtatttaacttaatttttaaaaactttcttttccataaattcacaaaagcaattatattcaagaaaaaaaaagaatcttaccacattttttttttacttttcatattcctcaactttttaagaaaatcagaaaaacaacagaatatttaattaaattatttacattttgacatgcaaccaaatttcatcagcaatataatttcactagaaaaaatcatcattaatttcatataatttgtttttcatagatcaaatcaaaagatttttacatagttaaaccagagacaaggctgatgaacaaatcaagtaaaaagggccacaaatattgaaaaaggaatccatgttttccaatgttaacgattctcaccccttactcccctagttatctcattgtcttgtggagttaaattaaaacgctaagagatcagctggagaagtcatcatttgccacatgagctgatggaattatggcatagcatccagtactgtctcaatggcatgtggagccatggcctcggaggaggaagatcaagccccagttttgatggcattctggaaaagacgagagaaggtaagtgattttgaatagagagagagagagagaatgacttaaattttgtgatcaagatcatataaaatcacctcttcccactgaggactccgcgagctgatgttgtcagagaagaagctgatattcctgaaaaaattgatttatagcgaggcaaaagaatctgtcctgcaatttgatcaatataaacgccagcaaaaattgaataccatacaaaagcataacagatcatctagattaacttgtcattagacttggaacaatctacaagtttacctaaggttagaaaattgctgcgaagattggaaaccattagagaattcttctcaggagtaccgtgttcttctagtagacttttggagtcttcgaaggcatcattggatttaaggatatgctctccacagtgttccatttcaaaccaaacaccacaggggaatcttttacgcctaacaagccaaatcataacctctgcatatggtgttgcatggatgacggagatggcaaattcaatcaacatacatatggagtttattgtagtgctcgtaatggtgaaaaagatgtagaaaactgatgttgttggcaagagaagcagaagaggagtgaacagaagagatcccactacatgttgcttcnnnnnnnnnnnnnnnnnnnnnnnnnnnnnnnnnnnaggattcaattttcgccctctggaagaacaaagaagaattcaaggtaaggttactttaagtaaggaactgaggtgaacaaaaatggttcaccagtaagaagatataacaatactttagtattttcattgaattcaagaagtttaaaaaggaaacggaaaacgtattgcatgtctcctccttttagatttaagaaaaccaagaaaccgattcaccagatgttagttatcagcttaatgaatgaactcatctaatttaatactcaagatttacctgaaaagcctccacaaagctgctaaggcttggatttggtgagaatacacaagtgtgattgcccagtgaagagccattatatgaagtgttgcaaaagtaatgacatctatgacaaatgcggcagatactgtagcaccaaaagtaattccaaggatggcaattactcttatcaaacaaaagatgaaagaagccatgaagacccagagagtagaccatatctgtattacattaagagataccatgcccaaaactccagccaattctgtatttaacttaaaacccgctggaactcccatcaaccacacactaccagaccgcaaaataccattcgtaaactcctttgcaaagtcgaatacaaatgagcagacagattcggtgttaaacagtagacctagatcaatcaagttccccaaaacaagatcaacagccatggccgaccatgtagaatgtctttgcagtgcagctttctctgcatgtttcacacaggatatggaccttgagaaacccagaagaattgtcataaattaataatcgtgtgaaacttctcagaaaaatgacaaatgcattgcataaaggtatctagaattaaactttttttatttcccaagattagtaggtaagcagttgttgttagaaaaaaaaatatgaagatgcaattttgagccaagggcaaacagaaaaagtttacaaatctaactaaagaagaaaatttgggtatacggttgaacttacatcatgtcaatctcttcaaggaagattggccaatataagatctgacaactacgtatcctgaagttgatccatgtattcttgagtaccctcctcgatgcgatgtgcacccatgaaaaaatcagaaaacttgaaagtaaatagaagaattgggcaaggctataatacagacttgataaagagcctaaaattgtggcgagtaaccgccatgttaaagaagatatcctgaaaagcaagatagaagcagttggaacaactaacaacaaagaagaaaagaattcaacaaggcaaaaaaaaatatcacgagggcttacaagtaactaatggaaaagttctgggaagaagtctccagctgcgtggatatcttcttataagcaatcttggcagctgcggcgcaatttaggaaagaaaacagtttcctgctacataagaatgagagaatattagtaacaggtcgagaaaaaaacacccaacaaagagaagca

SEQ ID NO: 29424 - DNA, 1608 bp, Arabidopsis thaliana landsberg
caaggaaagcgtcattccctttttctatcaactcctcttctttcttcatcgatatgattgagaacccttcagccctggttacaccttgaaacactaacttcccctcaggcctttcaaaattaacacgagcccgatggtagtccaaattaactaggtgcttttttaaccatttcattccaaggatcacgtcataatgactaacctctgcttctgctagattaccaagcaacacttctccatttatcacgataggtatatctcgatgaaccccaatagtctacactttttctttaccaagagtaccaatcttcgtagctttcggaacaaattctccttaaaaagcccaacacttaaccactcctggctttacacaaatgaggataacaccactatcaaatagtgtgtaagcattccagcctcccactaaaacaaatcctacacggttattttattactaagcaaaacaattcacacgcaataaattttataacttactaatcaaaaggcaaaataattctagatcaaaataacatttacgtacctacgatcgggtctgtctcatcctcatgctctccagccatcatcacacgcggtccaacgttttagcgctttagagggggtggaaaattctctctagggcgattctcagcttgttgtcgcccaatcttgcgagggcaatatcttgaaacatgctgttgtcgaccgcactcataacaactcctattggttacacctcgagggcaatctctatgaagatgccttacgtgattgcacccaaaacatgtcggtggagttctcacatttgttgtatcccatgtcacttgttcgagttcggccctttggtagcttttgcctaggctgccatgttctgactcatctctttttctaacccaacctccaaattagccgctttttcaaccatgtttgggtaatagttcatctcacaacgattctagagttcaatcctcattcccctaataaacatgcgaacaagctctttctcatccaacgttcagcttgaaaaccttctcaatcggtcaaactctacctcatactccttaacggtcatatttccctgacaaaggtttgagaactcgtgctcgatccagtacattgcctccctaggaaaatacttccttgaaaattttgcattgaaatcctcccaagtctactcatattgttcacacgtctggcctacaatcttatcccaccatacctgagcttcatccttcaaggactgaattgctaacttcttgtggtacgcttacggacacctaacataatccagatttctttcccatttcttcctccagttatccgcagcaatagggtcagacttaccaccgaagaactccatgcccacgtcttttaaatacttgatggcatccaagtacgtcgtcccttggacatgagcctgcataggatgcggcggaggcggaggtggatagtgaggcggaactaccatatcccggtcacgctgtggagcattcacctctggttctcctctcatagctggctccctcctcatgaattcctggaacctacagaattcctcaaacatagccatctcattggcccgaagggacattcactggtggttgtctggtt

SEQ ID NO: 29425 - DNA, 5028 bp, Arabidopsis thaliana landsberg
  unsure (1)..(5028): unsure at all n locations
caagttttggaaggtgtatcgctgcaaaagctaaataaacttgggttctctagtgaatttagcacaaaacaatgtctaaaaaggtccatcttttacacgacagtgatagacatccggaccactcttaactcttaatataaatttgaaaaatctgactttcatattattttttatctaaacgaaaaaaccaaaatgttagtcgtaatccatgttgcaatgaacggaccccataaataattatcctcccaaaaatctactcataaacgagtcatgacaatgattttttaattaatattcagatattgtttcctcagatctctaatttttccccagatacttccatccgaaaataaaataaaaaagctagattttattaatttattttaactagtcaattttttttcttttatgagtttctaactttctatataaagtttcgaaaacattaccaataatcgtcgtaaatcactccccacctcatatttttagccgccagaagaactgattggtgtaaaatccaattttcttgctgttgtgagttttcacttctccgaggtaaaaaaactaatcccggcggtgagaatctcttgggaacttgctctgaacgaaactttttgttgcaataattgtaaccaaaaaataaagaagacaaaatctttttgtccttattgtagattccatcgccggagcctgtccgaaaataaaatttaactaaacttggcaaaattcattcaaaacgagtccaaatcaaatcaacccctatttcaacgcctctttttctccctgatttatatatcggagagatttcaaggcaaagctttctcatttcctcgtaattgccggcgaattctactaaaggtgagacctttttcattttcccagaaagtgaagcaatctttttggggttttattctctttagctttcttaactgatcaaactaaaaaagcaattctgttttttctttcttccctcctataggttagttactctgcatttttgattactgtttgatgatttttatgtttagggtttttaattgagcaaattcttctgggtttatcagattttatatttttgtgaattggttaagatttagatctggatttagatttttctttgtttcatggttgactgaaagtttgaaacttcaaatggagaatcactgaatctgactgatttgaattttggtggtgtttctagagtttgttgagcaatgaagggagcgactctcgttgctctcgccgccacaatcggcaatttcttacaaggatgggacaatgccaccattgctggtttgtttcttttttcactcttgttggtgcaattgtgttttgttttgatcaattatcatctgagatttgaaaaatgttacaatgatggtgaattggatttgattgcaggaactatggtttatatcaacaaagacttgaatctaccaacctctgttcaaggtcnnnnnnnnnnnnnnnnnnnnntcggtgcaacggtcatcacgacttgctcaggaccgatatctgattggctcggcagacgccccatgctcattttatcatcagttatgtatttcgtctgcggtttgataatgttgtggtctcccaatgtctatgttctgtgctttgctaggcttcttaatgggtttggtgccgggctcgcggttacacttgtccctgtttacatttctgaaaccgctcctccggagatcagaggacagttaaatactctccctcagtttcttggctctggtggaatgtttttgtcatactgtatggttttcactatgtccctgagtgactcccctagctggagagccatgctcggtgtcctctcgatcccttctcttctttatttgtttctcacggtgttttatttgcccgagtctcctcgttggctggttagtaaaggaagaatggacgaggctaagcgagttcttcaacagttatgtggcagagaagatgttaccggtaaggtttcttctcgctatctttggtggtgttatcacctgaatccacttttgaccgttctttttatattaaatgcagatgagatggctttactagttgaaggactatatataggaggagaaaaaacaatggatgatctcttagtatctttggaggatcatgaaggtgatgatacacttgaaaccgttgatgaggatggacaaatgcggctttatggaacccacgagaatcaatcgtaccttgctagacctgtcccagaacaaaatagctcacttgggctacgctctcgccacggaagcttagcaaaccaaagcatgatccttaaagatccgctcgtcaatctttttggcagtctccacgagaagatgccagaagcaggcggaaacactcggagtgggattttccctcatttcggaagcatgttcagtactactgccgatgcgcctcacggtaaaccggctcattgggaaaaggacatagagagccattacaacaaagacaatgatgactatgcgactgatgatggtgcgggtgatgatgatgactcggacaacgatttgcgtagccccttaatgtcgcgccagaccacaagcatggacaaggatatgatcccacatcctacaagtggaagcactttaagcatgagacgacacagtacgcttatgcaaggcaacggcgaaagtagcatgggaattggtggtggttggcatatgggatatagatacgaaaacgatgaatacaagaggtattatcttaaagaagatggagctgaatctcgccgtggctcgatcatctctattcccggaggtccggatggtggaggcagctacattcacgcttctgcccttgtaagcagatctgttcttggtcctaaatcagttcatggatccgccatggttcccccggagaaaattgctgcctctggaccactctggtctgctcttcttgaacctggtgttaagcgtgccttggttgttggtgtcggcattcaaatactgcagcaggtaagataaaacttttgattgttcagacacgagtactcttggatctatcatttgatcacttctctgattatctcgagttttattttgtatgcagttttcaggtatcaatggagttctctactacactcctcagattctcgaacgggctggcgtagatattcttctttcgagcctcggactaagttccatctctgcgtcattcctcatcagcggtttaacaacattactcatgctcccagccattgtcgttgccatgagactcatggatgtatccggaagaaggtaaatatcaaaacctataagatattttaacatgtttccttgttttctcatgatactaaagttatctctgtttcattttgcaggtcattacttctctggacaatcccagttctcattgtctcacttgtcgtccttgtcatcagcgagctcatccacatcagcaaagtcgtgaacgcagcactctccacaggttgtgtcgtgctctacttctgcttcttcgtgatgggttacggtcccattccaaacatcctctgttctgaaatcttcccaacaagagtccgtggtctctgcatcgccatatgtgctatggtcttttggattggagacattattgtcacgtactcacttcccgttctcctcagctcgatcggactagttggtgttttcagcatttacgctgcggtttgcgttatctcatggatcttcgtttacatgaaagtcccggagactaaaggcatgcctttggaagttatcacagactactttgcctttggagctcaagctcaagcttctgctccttctaaggatatataacttgtaactttcttcttcgtcaattgctctgtgtacctaaagattctcttcatcccctttttgttttgtttttcagataccttcatatcgtttttgtttctttttttttttttttttttcctttgtttcgttgtcaaaatcaatctaataagtactcaattttctctctttccttgaccaacaccgatagttacgaaggtttaaggataaagctttctcttgtctttatgacttggttctgatggtaaagcaaatagagaaaaacatagatttaggtaagtgtgatctactacaaagaaaatctccagtttcttggaacgcaagtatgactctcgagggaaaactgtatttacaattagattagtacgtctcaggacttgtgcgtttcctcagaggatgaattgcctgtatgattctcctgagaattcttctggatattctcgccttcgagcttcgctgagaacttgtatggcctctggaaatctctggcattttgactgtcaatactcagattgttcaatttctcctcctgttagaaacaaactcatcaatcataatttctcggtattcggttgattcccgcgaaatacaaatattagttctcagagataaaaaaaaacttacattttgtaaagcttcaagctttttctgcatagcttcatgctcagctcgaatccggaaaagaacaccttgcttctggtagacattattctgggcaaggtcttgatcgatatcgctaactgtggtggcaaacggatgattggccgggatccatctgactgtatcgggatcaacatcaggtggtatcgagtccccttctttgagaaaaatcgttggtcgcttccattggtaagctcttgaccttcttttctgatgaatagtttgttctttctctgtaagtgtgactggagctagccgataaactttcccgcacatctctaccgttgagcttcctttatcaagtttcacaaaagggttgttgaatgggtcctcgtagttaagagatttggagctgataaagaaaataaaaaacatcttgagatcaaaagctttagagaagttaaacacacacacatccacctacatgaatccagttatgtgtttgatagtggcactaattcgaaagtttaggttattcagagtgacaatagtaaagaagataaagagtgaaagtttcaaacatgcctcttctatcaccagacctcagctggccacgtctcacaagatcagcatcagagccggctcc

SEQ ID NO: 29426 - DNA, 1366 bp, Arabidopsis thaliana landsberg
  unsure (1)..(1366): unsure at all n locations
cattcaccgcgacatcaagtctgcaaatattctcttggacttcaactttgatgctatggtgataaactagtagcttgcattcatctacggttttttgttaagactacattgatgacattttgcatttgtttattcaggtggctgattttggattagctaagttaacatctgataacaacactcatgtatctactcgtgtgatgggaactttcgggtaaaaatcatctttaatctactaaacatgtacatttatgcagtttgcttaatgcatgtgatccttgtgcaacaagttctgaaacttttggttttgggattttaggtatttggctccggaatatgctgcaagtggaaagctcacagaaaagtctgacgttttctcatttggcgttgtactnnnnnnnnnnnnnnnnnnnnggcgccctgttgatgcgaacaatgtctatgtagatgacagcttagttgactgggtactttactatgactgcagataatctaaacttctgatttttctacaatctaaacttctgactaaagaaaaagctatgtgtgattgatggtggacaggcacgacccttgcttaaccgagcatctgaggaaggtgattttgatggtttggctgattcaaagatgggtaatgagtatgccagagaggagatggctcgcatggttgcttgtgctgcagcttgtgttaccattcagctcgccgcagacttggtatgagccaggtaacttaatttgagcccaatcccaatcattttttttctctagagaagagcattcactttgttttttctggttatttgggttgtttcggttgcgctagcttcagtttcagattggtttggttctgtttctttgttctaaagaattggcaacacattttcttagctgcagtttcttttgttttcattttgccaagtatagtcattttaacatatgttaataatgctaatggagtgagtgatttgctgtacaaaatgagcagatagtacgggcgttagaaggaaatgtatcgctgtctgatcttaacgaagggatgagacccggtcacagcaacgtctacagttcatatggaggaagcactgactatgacacgagccaatacaacgatgacatgaagaagtttaggaaaatggctcttggaactcaagaatacggcacaaccggcgagtacagtaatccaaccagtgactacggactgtacccgtctggttcaagcagtgaaggtcaagccacacgagaaatggagatgggaaagaataagaaaaccggtcaagttatagtggaccctctcttaaaccataagagtggagaaattgcagggttttttggattcttttcttataactgtaaagatttgaggaaa

SEQ ID NO: 29427 - DNA, 1033 bp, Arabidopsis thaliana landsberg
aacaaaaaatacccattaatgttcattggtgaaacacaaattaaacccatttcgttttgactatggattcatttttttaagattccgacaacaaatgagaatgtaagagaaacaaggggagagttaccgtgagaaggaagagagctgcaacaacgaagagagaggcgactaagcgatggaagaggagaggaaagatgagaaacagaagaaatgtaaaatgaaagatttgaggtcattgattggtgaatcatagagatccgagtttaactttttcttgcttttctttaattgttaatgtttactaactttcctattataacttttgttattacatgagtagaacctttggaatattcgaaattccaactagtggtgtccaagcggcaagcaccatttgttgtggttctgtttgacttgaattaatgtaatgacaaaaagaaaacaaactaataatgagaaattctaagaaatagttttaatcccgactgaactattagtcatgcacactcatacaccacttataaaactaatcaaatagtttccatgtacgcaatgaaatttttacattagttattacatatagattatgaatcccgcatcgcaggaaactcattttcaataaaattttgtattatatatattaaattataaaaaaaataataattatatttatgtattaaattattgaaatgatatatttaaatatttgaattattacataaattataccaatgtttaacgttataccgtaaatattttctaaaagattttaaaaactatttatgaataaaaaattgggaacaagaagaaattatgattagaaacactatcttttgaaacaatttttatgcagttcaaaagtattattattgacaaatacataacgaagcaatccaataagacagtccaaattttttctaggaaagtgataaaattaaattgcataccgaggcccttggacttaaaccagattaatcttaaccaagattgaacaaacctcttcagatgaaattgcgaattttcctccaaattt

SEQ ID NO: 29428 - DNA, 1404 bp, Arabidopsis thaliana landsberg
aaatgcctttggtggttcataatgttaatgaaattctttctgggttttaagtgtttccaataacactttgaaggtaaaaatgtgattgtgccgaaaaacaattgctaaattaacacaattaatatgtcaaaactatagcccaaatttcaaaattttccattttacttttctttcaaccacaagagagcaaacgaacaagaatagagatctattgcactgttttaagtcatcacaaagcttcttcctttaagtcatccatggcaacatcatctgcatcctcatcttcaaccatctcatctctgaaaagagttttgaaatacggcaaaaccttaggaagcacatgcaaatccgccatgtttatactcatcagatcaaaggcaatgcaggtattatgcatatgcgactcatcaatcactggaatcttcggatatctctggctaaaatgtgtgagaacaatccgatacacattcgccgcagatcccacatcgattgcttctttagtcgcgctgtgattcttcgccaaagcttcttctatcaacgcatcttcaaacgttgcctgtcaaaaacaatcagtttatgaatgtcgaaatctaacttgtagaattgagttaaataacaacttttacctcatgtataagaattgttgcatctcgtgatgcttcgaccgtctcagggcaaggtcttgagtcgcccgaataaaccattttccatccagggatttgttctccaacactatttactctttcagctgccttgataacaacaccatacgcttgaggacaatgtacaacaggaaaactaatcaaatcattcaatccaatttcgctaagaaccttcttcagattctttaaacacagcaaaaccgaagaattatccatcgagatatcagatcttttgaagacactctgcataggacttccttgagtaaacaaagaaccctcagcttcgcccccactctctaaagaagcccaagaagttgctgtggtgcttctacaatcaagaaactccatatctaaatcctcaagtctttgatatgcatcaagaaagcgtttaagcggcctcggccccaccacaatcactggctcgtgagtcactcctttcaaaagcttgctcctaagagctagaatcctcgcaagacctgtatggtgatcagcgtggatgtgagagatccatatacatctcaactttctaaccgcctcatctgcaccgtctaaaccatatcttcttttaagctggcccaaggttccttcaccacaatctaggagaagactacctctagagaacaagtcaataaaaattgcactaaccgtttcgcattatgaaggctgagacgaaccagtgcctagaataacaatctccatgtcatctcgtctaatcttttcaagacagtttggaagaacagta

SEQ ID NO: 29429 - DNA, 1833 bp, Arabidopsis thaliana landsberg
agttccccttaggagtggacacaaatatttttacctaaattttcttcttttcttcgttcaaccaaaagaattataacaatacgtttttaagagttttgattgttgtttgttttatttagtttagtccttcatgtttaatttttcaataaattgcaccaataagaaaaaagaaagaaagagaaagagagtttttgatcagtctgccgccaaattcaacatgttaccgtttcttattttcgcaaaattgtcacctttacagatttttcaccgaaattgaaagctcacgaagagttttttcatttgaagcttgtaagtaaatctcttttataatctacagtttcaatggatgctccggttccactctctttatctacactgttagaactctgcaccaatctcttgcaaaaatctgtaaacaagtccaatggtcgtttcacagcgcaattggttcattgccgtgttatcaaatcgggtcttatgttcagcgtctacctgatgaataatctcatgaacgtctactcaaaaactggttatgctcttcacgcacgcaagctgttcgacgaaatgcctctgagaacagctttttcatggaacacggttctttcggcttattctaaacgaggagatatggattcgacttgtgagttctttgatcagttgcctcaaagggattcggtttcgtggactacgatgattgttgggtataagaacattggtcaatatcataaggctataagagttatgggggatatggtcaaggaagggattgagccgacgcagtttacgcttacgaatgtgcttgcatcggtggctgcaacgcggtgtatggaaacaggtaaaaaggttcattctttcatcgttaagcttggtcttcgcggtaacgtttctgtgtcgaattcactgcttaatatgtatgcaaaatgtggtgatccaatgatggcaaaatttgttttcgatagaatggttgttagagatatctcaagctggaatgctatgattgcgttacatatgcaggtcggtcaaatggatcttgctatggcgcagttcgagcaaatggctgagcgagatatagtcacttggaattctatgatttctggtttcaatcagagagggtatgatctcagagctctagatatcttttcgaagatgctgagggattctctgttgtcgccggatagattcactctggcgagtgtgttatctgcttgtgccaatcttgagaaactttgtattgggaagcagattcattcgcacattgttactacagggtttgatatttccggaatcgtgttaaatgcattgatctcgatgtattcgaggtgtggaggggtcgagactgcccggagactgatagaacaaagaggaaccaaagatctcaagattgaaggttttacagctttacttgatgggtacattaagcttggagatatgaatcaagctaagaatatatttgtttcgttgaaagatcgtgatgtagtcgcatggaccgccatgattgtaggatatgagcaacacggttcgtatggtgaagctataaaccttttcagatcaatggttggaggagggcagagaccaaacagttacactcttgcagcaatgttaagtgtagcttcaagtttggcatcattgagccatggcaagcaaatccatgggagtgctgtaaagtcaggggaaatttattcagtttctgtcagcaatgcattgataacaatgtatgcaaaggcgggtaacattacatcggcaagccgggcatttgatttgatacgctgtgagagggatacagtatcgtggacatccatgattatcgcgttggcacagcacggtcacgcagaa

SEQ ID NO: 29430 - DNA, 1260 bp, Arabidopsis thaliana landsberg
agatgccttcccgatacgaaacttcagaaaaatccatttaagaactaagtcctctttcttagattatgaaaagacagtatcagttccccaaccataagaaaaaacagagaacccatcaaccatataaagaagagggaaatatatcttcgtttatttcaataatccctttagtgctccaaactttcaagcaatgtgccagcacccggagaagttaggtatgagtgtggatgccaccttttagataaagaattggaaagtctagctctactacgatgaaaaaagtcaatatggagactgaggcatgaaccaacatggaaagctaattatgtaaaacaactattgaatcaacaacatgtcgtatactaacatagattacaaagcatggccagaatcatagaggctgcctcaaaaccaactataagtattagtttctctcatattgagatcgagagagaaacagaattgtaaaatatcttcattcaatcgtaaaagatgtacaaagaaagacttaaatactaagactcttaaccagagttgataaccaagctagacataaagtactacaccaacctagtgatatctaataataagctggtgaaaaatgcaatcacgtttactcgatacatctgacgtaacttacatgacacattttggtaaaacagaaagctgcgtagtgatttaccgcggatagctttagtacttgtttctgttgtcaccagcgaccaaaagcataaggaaataggggtagtaaaagatgtgtctaagaaagggttgggtaggagaatgtggggacacatatggaataatgatcagcagcaaaaccaagaggaagatcaagccgatgcccaatatgaaatacgcaagcaaagggaggtggcttactgcagcatacgtgccagccataaaagctattgacatggatgtaagcgcaagtccgagaagtggcaacgcaaggttgaaagctttcatgataagagaaagatcgcccaattgcgcccaaatgagagcaactattgttatgatagaacagtacatcgccaaggtgtcgaataccagaaacacttggaacgctgttttcttggccaatgttgccattccaaagttgggaacagaaccattgtaaccccctggtagtgtaaaccctgcagtgaaagtcatagtggctacaagagtggccaccaacacaagtctattaacccgatctttgtactttcaaacataaaaagttttgtgttactggagtcgataatattagtttgg

SEQ ID NO: 29431 - DNA, 800 bp, Arabidopsis thaliana landsberg
ggaacctagtctgatgcactgcaaactatctgcatatcatagaagagtgcttcattttccatggcagggacctaacacaaataaaagggcatcaaggaaaacaatctcatggattctagatacctgcttcatagatagttaaaatgagaatttctcaaaaggttatgtaccaaaatcgtgtgatcaactgtttcttctttttccaagcaatcagtagctacatttagagattcatcctctggaatttcctcctacacacaaacttaattgtgagaaacaagaaaagaagaacatcactgttaagagctgtgaatctacctcaagtgaactgagaattatgatcttctccagcgacaagtaaccttcctcctgctaataaaacaacaagaccaaggaatttaaaaaacagtatcttaaagaaggttgaattatggagaattggtgttcatcaaccttctttgaaacaagtagagttcgattgatcagaggaacccaagaccatggagggaacgattggttatgtatcttccacttatcggcaaaagctcgagaagctacagagaaaccttcgacggtgagtctaccatcgctgacctctcgagctgaatccattggaggagtaaacaaaatcgctgatctcttcgtcgtctttctccggtctattatctcagcaacatcgtatcaaagcaaccaacccgaatttagtttttgaaaaaattaactaatccaaccaaaccgaaccggagaaattcgattttcgaatctaaaccagtttcgaattaaatccgccgcttcgtcct

SEQ ID NO: 29432 - DNA, 2800 bp, Arabidopsis thaliana landsberg
  unsure (1)..(2800): unsure at all n locations
atcggttgattcgatgttttggattcatatgcgatatatcaaaaaggtgttgcgaattcatgtaactcaccatggatgtaagctcaggtgtgtgttgagcgagtggtctcctgacaacagtaggagcagcggattttacaaaagatggtttgtttggtacatatggtctgatcattgcttgaccgtcttgaaaactagacggtggtggtcctggtggaagtggcggtctcatcataggaggcggtccaggcggtgggccatacggtggtcttgggattagatgaccaacaaacattccaggatgaggaggatgcatatcgagtggaggcggtggaggtggaaaacgcaacattcctggaggaggatgaacatcaggttgaaaattagtcagtgaagcagcagctcctgcaaatgttgattgatgttgctgatgtaaaggtgctggtggtggtggtgcaaccatctttgagaggttagcgttttgaaaactactggcgttagattctgcaggacgactctcagattcattgcttggaatgccaggtggtgggagaagagggacggaagttatattagcattctgcaaaatagatatggaaaaatctgtaatcaagtttcaatctttcttcatttgatacacgaaaacacataaattgccaccattttaagatagctatcagtaacagaatgaggttttaccatgcgattgtcgaaggtaaaatctgatgattccgggaatctaccatcgccttgacttccacttagaccaggaggaggtggttgggaagattgaggaagttgaggaggtgggggaagaggaggacgaacaaaatcctgctcttttggtggtggccccggaggtggtggtggaaatggtgaatgtggcaaagtaaggcctgtagttggtggcaaaggaggtagaggtggaagtggcaaagaagcagataaagcattatccccatccggtagaggaggaagtggaggaggattaactaagacggaatcttctgactcggtaatagaagacaatgcagcactactagatgaagcaccatctgaggagatagcaagtcctgaaaaacgttagaaaaaaaaatccttttacgatcaataaaaggaagtagggaaaagactgttttgatttgtaagaagcagcattaacaaaagatatacctatggatgaattatacattggtggctttcccgggggtggtgcaccagttgggttcaaagtagggtgataataaacagagtcctgtcataatatgcagaaaagtgagggaggttttcgaaatcaagcagggggaatagaaagaaaactaactaagtacctctggttttaagtcctcttcgccagttaatcttcgctgagggggtagatgactacatagaaaacaagaacaggttatacttatatctaatagcaagccgatgacatcttaacaaacaatatatatagcaaacgaaaagtaacgcgatgaacgattaatcacctgaacataacagaggttgttgcctctccttgctccttctttttctcatcatattcctgtaaaaacaaaagagacaaaggaataagaagacaggagatgccaaatcataagctggggggagtcctgtgggacaaaggaataaaacctaactcaaccagagcaatacctttctcttcttcaccaccattttaagagtatcttcaagctgtctctttttatgttttcttgctttgtccaaagcaccttccgcctctacaccaaaaaaatgtcaactctgtattagtttgcatagggactgagcaaatctgtatatctgttgggggtttagagatatgcttgaaacttgaaagccaaaaataactacgaaaagaagaagacatattcgatttgaaggtataagttgttactagaagtagagtaaaacttacttgacatatcaagcttcctgatctgatccttgatctgttcaggatccttcttcaaaattccaacctctcgtaccttttgcctctctttcttgttctgttaaagaaccaaagttaatgtaaatggggagagcattgcccacaaattatatttgctcacagataatgagacaccaattgaacaannnnnnnnnnnnnnnnnnnnnnntttcttagctactgcaaagctattgacctaaacgagtctgaacatgcaaatcaaactcacaaatcaatttctctaatgcctaaacaaccaaagaaaaagtctaattaaggaaaaattagcctttatatgaagatttgtccacttgaaccctaacaaagagtaatatatgaatcaaagctaaatcaaaacagagcagttttaacctgaatctaaactcatacagctacaacaacaattaatcccaattcgatttcaccaacaaaaaagaaagggaagattgagaatggagaaaacaaaagcccttacacgcttaatttctctcttgcgaatctgcttgcgataagcatcagtagggttcatcactttgcctcccttcgtcgtcttcatattttccgtttaccgttcttcaatctccctcccaccgatttaggatttgctcacagatattttacaaggaataaacaaagatcttgtggagatttatcttttctctcgcacaatataatttgaattttgtttcctcaatacaagattggattttctctcctccctgactctcgctcgatctatgtctatctacgaagcaaatttttgtccttcattgtcaattgaatcttgggccgttcgtggattttcttatgtatactgaaaaagcccattagtaatgttataca

SEQ ID NO: 29433 - DNA, 4599 bp, Arabidopsis thaliana landsberg
agcatagaattgtggttgattagagaggattattggcttatcctcctcctcctcaattgtcatcccctgaagacatttttccaactgaaaatccattcgcaaaagtccaccaacaaaggaaatctaagaaacagcacacccagaaccgatagaaacagaatagcacccagttgcagatcttgtaaagtcaagaacaagtgattgaaaagaagagatgcaagacaattcaacaattcaacacagtagggaaaactttgcggacagaaaatgagtatatcttcggtctaaactctgcccagacgaagaattctgagagagaagtactacaacccaaggattgggacggctttgaatgttatcaacgacgaacagatcgcgcaaattcacctggtaggagagagaacagagcgagatcttttatcttcgcttttttgttgttgttattgttaaacggttttgaacatacagagactacaaaatattcaaagcaactttatatatagaagaattttttaaccgtatgaaatattcaaaaggtcaattctcctgagcctaacaattatataatcctgcagtgtactatacgtatctactacatctgaagatgtgtgtacatacatatactcgtggtccggtttatgtcgatcgggtcgggtcgggttcagtcgttcagataaagtgatcaaaagttggccacttggcctaatagttttggttaaaagtgcattacattacacgtgttgtagtcaatacgtggggttagggaacttttaaccagaacacctggctaagtttgtgtctgaggttgaattttttagttttagatatggttacttcttaatagtaacttgaagttagaatagtttaaacatctgtttgattggatgtgtatataattaacaacaaacattttaatttggtgatcatacattgtcgactcgagtccacgttatccatttttgttgttctttgttttatttttaaaagttatggatatggagtgttttgctgcggtgatcaagagcatctaataacggtggaactctcgatcgaaatgaatataattggatataattatataaatacatagttcgtggactacaggtgttgttcaacagcataaataaatttcgatttccaaaatgaattattgtaaatatgcaaaatttgtatgaactttccgttgttattgtataagtacgtacccgattaataatatggattaaatatgtagcatgcatggtgaaattaatacggtacatatcaaatgttgcaatcagtgttgtaaactgatcaactaagaaaaatatattgggaattgtgatgacatgacgtaatgtacttttgatcgaaggcttcgtatgataacattagtagaagaaaaaaggaacaagatttgcattaattaggatctattttgacctaagctggccaattaacaaaagcaaattgccttaactaatcatcatttcatatatttggaaaagttccatatcgtggccacttcttaatgcaattatttacgaataaaataagtaaatcatgtcggtcttgtggtcgggacactttatccacttggcttacgtatcaaccaatcagtacacagtttagaacttcccacagttcaggcttacgtggatccaagtcataggctcgtgttaacacgtcatccaattttctcgtcccagtctccagatattgttatgatttttaataagtagataatatcaacaaacgcaatagatattgctgatcatcatcaacttgatcttatgaagatgaaatagttcaaagctttaaaagaaagaagaaaaaatatacaattatttgcgtttacaaaatttcgtttgtttgtattttaatgtggattctttttttagattttttgagtgaggttatctaaaactattggtcttgcaacgactaaagcctaaaggtggaagagacactaatcgactggaagccacatattttaacataatattaacatattataataccaataatggtactttgaaaattggtccaaaatagataagaaagattttcctcttgtgctctgtctgttagggatttttgtttgttgagtctatctatattttctcgtcatgatttatacatatgacaaggagagctccgagaacgaccttatatctgaaagtgggatagcgaatgccacttatctatattcttaactgagtaatttacttgcaatcaatcagtttttatatttgtaaacttaaaccgatgatgttagcatgttttagatatacttaactagtgtgtgtatgcaagtctgacacataattcccgtaatataacattctggaaagttaaaccaccaaatcattgagagggaatctattgtttatgggatgattaagcaaatgacttttgtacaagattttaatttgaaggctcacaacgaaaacaaattactgcagtgaatccagaaatcaagttcgagagagttaaaggggaaaaaaacagaacaataaagagtaaaaacgaagtcatgatcacaaatcttgcttaaacccaaagtttactcactgctgttttgcaccatcgttttctggaacggtattcacaggtgttgaggagccactacgtttgctagactgacctgtgattgttcttcccataaatctccctgctttgctcaatccactaccgaccgctccaaaaccgctaccaaccatcccaacacccgagctcacaccgcttccaaccaatccaactcctgtgccaataccggtcccaaccattcctacaccagcaccgagcccacttcccaccatcccgactgcatccattgtgctacctatcactcctgcttccttcagtctcttcctttcttccatgatcttcttctcgtcttccaacgcagccatttgctcctctttgttgaactcatgataatgtaccttcaattcaagtcaatttaggaatcagcgaaaagaaaaggtttgcagtttattcaaggaagatctatataccttaagagttatgcttcctctatctttcttatcttttactttcaaagtatcaagtgaagacaacagatttagctccagttcttttgtaactccggcttccaaactgcttaagggaagtttcacaagtccaaggcgctcatcttgacctacgtctttatcaaatacctgcaaaatgtttaatagaatgaagagaatagttaacgtttgcaatggcaaaattgaacaagtatgaagcataaatatttcagattccagacctctacagtgagcgactgggtttctttgtcctctgcaatcaattcgaatgtttgatcccagacaggattcagattgttctcgattgcctttgttttatacttgaatacaggacgaatgtagatggtagcataagggtcagattttccaatcaattccttattcttcaagttagttgctttcacaactgttactataagctttccctgtggcttaagctccaaatcactgggaaagagaaaagatagagagaatcgtcaaactatctagtgctttctcaatacgtatcatgacctccccaagattggcaatacgtaaatcctatggctataacagaagagaagaaaagacaaaagattggcagtggcaggcaaaaatgttgtgagtgaaaaaacgcaaaatgaaaatcaagcagaacacatgagtaccttaaatcaacaggaataccaccaatgggaacaacaattctatgaggccactgaagcatgtctttgacgatagtatcaacagtatcctaacatagagagaagcaaaagctgtgtataagaccaaatgggaacaaataaaacctcttgaaactgcttgaactaccaagagaggaacttacatcaatcatatcagatagtccaggaattgctgttaagcttccaccaacagccttcagagtgtaatcaattcttggttttggctggttgagatcatttaaatagttggtcattgtaagacaggagatataaaatgatataagaaaaatgaatcttattctggacctttacaggaaaagtgtacctcagcaagtagagcaacaacaacagcagatatacaaggaatctcatccgcaagttgaaagataacacgtgcaactgtgaaaacttgaagatccttcaactgtttcagccagaaacaagtgtttgtagagatactcaatctctattggcacaaacgacaacccaaacgacaaatactaaaatatctctctagtaacctgaatgggtatggaggcaacaagtgctgtcacacctaaaacaatatttggatcaccaccccatcgaagatcaacgtccattgtgacttgaccttccttgaaactttgaacacgaatacctgcaacaatgatttattatgcatatgctcaggcttacagcaaaactaacctaagagacaactgcatgatgttctttcaagcacaaggattcattagcatttggcaggtaactcatccaaaataaataataggacaataccaggttgaaaaatggaagagaaaagatagccatcacaaaaattatgttgtccaccgtactttaccttcaatctttggtgctacgttacccaacgtcggtgt

SEQ ID NO: 29434 - DNA, 3081 bp, Arabidopsis thaliana landsberg
taaagtcttaatatttttggatgctcaaacgatctaaacttttattttaaaagtccgacataatatgcaagtacatatctaaatacctatcaaattttatttattattaaaggttttgttttaagttttaacaaaaaaatcataaagggttttgagttttcgattaccatactaaatctccagaaattttgataccatatgagtatatgactacgtggatcgtcgcactcaaactcaacatgaccatgatgtatacgcacttaatttaaagggtatagcattaccatatctactatagataattaatagatgcattttgacaagaatataaatcttagtaaagtacggttaatattcaaatctgaaaacagaaccgcttctttcttttataggatcgtttaacgtatgatgagagctacgtaaaattggccattcatttcatgcaagaggcattattgatataaattaatgtatgtgtaacatcagtctattgcaaaacctatatagtagtatgttttaattcagtttggtgctttaataaaacagatttattttttcctttttatatataattcagaattattcagttctaaaaaacatgtttagaatacaaactttgattcggatattatagcgagttcaattaatttacgtgtctaacaatattcttcaaaaaacaaaaacaaaaacatgtctgaattggatgagtgaccccaaaggactgagatttattcccaacaaagcattagcatgtgatgagtagtgaatggaatctaagatttttaagtttgatgactgtttagaattcaacagtatataatataaaattcagatagaacattattttttcgggctatcatcacctacttcatctttatttcttttacattaaaaaaaaaaaaaaaaatatgatgcattttcgtggcgacttaaaaatgttatgaaacatacataaattaccaactctaactatacgttatctcgtatgattgatacaattaacaattattcacgactacacgtataatgactaaatcgtagtattttcctttagattccattcatgcataacagtgagattatgtaatgacaagcataagcatacgcatacgcacacatcactaatggaatatttacactcgacgagtaacgctaatatttaatgtgaatttgtggagaaaaattactcttaattttttgagttttggttaccttttcgtttttcttcatgaaaatatagttaaaatgttcatttccgttaccttataactataattaataaacctaaaaatttgtaaatgaaaacacgataaacaaaatgaaaagaaaaaaatgtttgcgttgcatgttggcatttaccatttactgatttacaaaatatgtgtctaaaactattatgtgtaacaaaagaagccaattctaatgtgtgttaaactcttattattttggtaaattcattcgtcatgaaaccaaacccaataaaatccataaatggaacatatcgcgatttttagttgaagagtgtatatgattctataagttactagtttgtcttgttccccgccaatttgtgactaaagtaacttgatcagccattaattactctcattcctaagcaatgtgaaaataggtaacagtattgtcctctttttacattttttaagttgtacatggtatttttactattttgaggatagtaatgataaaggtcagttataaaatttgtgaggacttatttggaaacgaaacgttttgaaacaaaaaaacaatagttctaaaacatacattaaaatgacctagaggaaatatttgtaacctatatgaatcgaatcaaataaataaaataacaaaatttagccaagaatggaccccacatgcgtcaataaataacgaccccttgcgagggttaaggcaacacaacaacacaagcttttttccaagtattgaaaacaatttcaaaactcaatattctctcttcatagtgtcgacatggcttgcgaaaacaacctcgttgtgaagcaaatcatggacttatacaaccaaatctcaaacctcgagagcttaaaaccatccaagaatgtcgacactttgttcagacaacttgtgtccacgtgcttaccaacggacacgaacatcgatgtcacagagatacacgatgaaaaagtcaaagacatgagatctcatctcatcaagctttgtggtgaagccgaaggttatttagagcaacacttttcagcaatcttaggctcttttgaagacaaccctctaaaccatttacacatcttcccctattacaacaactatctcaaactaggcaaactcgaattcgatctcctatctcaacacacaacccatgtcccgaccaaagtcgcctttattggttccggtccgatgccacttacttccatcgtcttggccaagttccacctccccaacacaacgttccacaacttcgacatcgactcacacgcaaacacactcgcttcaaacctcgtctctcgcgacccggacctctcaaaacgcatgatcttccacacaacggacgtactaaacgctaaggaggggttgaccaatatgacgtcgttttcttagcggcgcttgtagggatggacaaagagtcaaaggtcaaagccatcgagcacttggagaaacacatggctcctggagctgttcttatgctaaggagtgctcatgctctcagagctttcttatatccaatcgttgactcgtctgatctcaaaggctttcaactcttgaccatctatcatccaaccgatgacgtggttaactcggttgtgatcgcacgtaagctcggtggtccgaccacgcccggggttaatggtactcgtggatgcatgtttatgccttgtaactgctccaagattcacgcgatcatgaacaaccgtggtaagaagaatatgatcgaggagtttagtgccatcgagtaaacaaacaattaataaaacacatctcttttcttaagattgtgttaatgtttttgtcttatattaactgctcttttcatttcatgtcttgtgtgtgtgtggctagcttattaagtgttaagtttgtgaattttga

SEQ ID NO: 29435 - DNA, 1115 bp, Arabidopsis thaliana landsberg
acaacatccatgaaaggcgagagagactcatccatgaaaggcgagagagactcagaaaaaagctgcttacatatattgaccacagtagaaattgcgactctctgaagcaaatgcgatgttaaaaccatctgacttagcaaggctatttatttgggatgagtaacttgtatgcttgttgagaagaaatcaataaacgaaagcactgccataattgctccagcattcaagcaggctaccggctcatgtcaggatattttctcaagtgtttgcaaacactagaaaattcaatagttagtatgaaataaaacttgcgttctttaggtgtaaagaataaggtcatttggtggaaagtataacgtacctgctcagcaacgtccaagtactcaataatcaaaagtctttggcctgaaatcctgagagttacaagctctcttatcatcatgtaactcttccacaacctccatcgtttctgacctctgttatccataacttaaaatcttccaattaaattatctgatctcaacctgtaatcaagcaaatgatcaaagttcaagtctttctatattaacatacaagaaaaaaccaaaagataagaagatacaactaagagtcaatcactaaccacaaattcagtggaaataaacgaaaacaaaaattagagtcaatcaaccgcaaaatcagactccaatcaagacattgatcagacagattaacaaaaacggcatcaaggctaatttcatgaatctctttgtaaaaaatgatccgaagaaaatctaaagagaaactaaattacataacaagttacaaaattcaaaatcaatctaaacgatcagagaagaagattctcaattgtaacctcaatcgtcgttggagaaaatcgatctccatcgccatcgcctgttgtggcaaagagagagagagaatgagtcggggaaagaagaactgtttggacttttttcacaagttttttctctcttttttttcttctaaaactcgatcaatcagaacgcgccacgttatcgcctctcttccttctcaaaaactctctcaagagagctgatatctcttgataatacattattttgatttatttttgaaccattttgtcataaaac

SEQ ID NO: 29436 - DNA, 1327 bp, Arabidopsis thaliana landsberg
cttaaccatttagtttaaagactaatgagactacttagtaaaactttaatgatgttgttagaattgtgtacctggtgcaatgtaaccgactgatccacataacaatccatctgttgagccaaatgacactgaatcatctgtagaaactgtttcttcaacaccttgaaccaatcttgaaatcccaaaatccgtaaccagagcggtcatttcatcatcaaaaaggatatggctcggtttgagatcacagtgaacaacttttacaggtgaatagtgatgcaagtaagctattccttcagcaacatcgctgcatatattcaccaactgaatcaaatctaagttcttgctcgagtactctcccgggtataagtgcctctccaagcttccatttggcatcagtggcagaacaagagcgttgaaaccaggtttgctgcacgtagtgatgatcctgatcaagttcctgtgtcttgttctcttcaagatctgacattctcttttgaaactccccgagaactccagtgcggtctttggatcaagtacttttaccgcgaccttcgtgttgtttctgagaactcccttataaacatgaccaaatctccctgaaccaatcaagctagaagcattgaaacctccagtagctgctatgagctgctcatacgatattctcgggtacttcgggtcattttggttctgtttttcctcgtcttccacctcttctttggcatacactgttagattctttccaaatcttgatctttggaccaaagggtacccgaacacacacagaacaggagttgcgatcaacgataacagaaccggtagaagaacagaagggtacttgtgtttcttcttgcaggcttgcatgccttttatagagccacacaagagagaatctccaagaaaagactcaatagtcagcttagagaatgatcctttgtcagatacattaccagagagcaagttgaaggagaaattcaagtgcttgagagtcgaagactgttgaaaagaaggcggtatagctccggttaatctgttaaaagacacatctagctctttcagatatggaagttggcctaatgatgaaggaagcgtactggagaaaccgtttcttgaaagattcagatgctctaatgcaatgcagcttccgagctgaggcggaatcttccctgagagttcgttggaagacagatcaacggagagaaccatatccattttgcttagctccaaaggtattggaccgcttaagtggttgctagagaggttgagatacagcttcaggtttctgagattggagacaacttcaacaggtatggtccctgtgaggttgttg

SEQ ID NO: 29437 - DNA, 1733 bp, Arabidopsis thaliana landsberg
taggagaattcaaaaccatgctttatgttttgttttctgaaatatttgttggataatagtaatgaggcctagtgtgatgttttcaggtagactctttgatgaagcttcttccattaattggatcctcaaacataaggtatttcctcaaagaaatagaaactgcgatgtgcgttaatactagaatttgatcacacattgcacataatacagcaccttaagcttagtgggcataactggaatccttgctccacttctggaggagaccgtgtttcgcggattcttcatggtctctcttaccaaatggtaaaacctctgttcttttttctcatttggttctggacaaaagcttactacattttgttacgttctgtatttcagggtcccgaccccaatagcgatcatcatcagctcagctgcgtttgcccttgcccatttcacacctggtgaattcccgcagctgtttattctaggtaaaacataactaaaaacaaaaccatttgcatcttctcatggttatgaacatttctggatgaacaataagtatcttttggtttaggaagtgttttgggattatcatatgcacaaacccgcaatctcattaccccaatggtcatacacggtttctggaactcgggagttattttgctactcacttttcttcaggtagaaaactcattcctatgatcactacaatgtcaaaataacatatcaactcttagcttatgtttgttttgtctctgttgttttttgtagatccaagggtatgacattaaggagctattgcaggcaaactagctctgagccatgctctttgtgctgtccgcatttaacatcaaaaagcttcattatgtgctcgatgttagtaagatattttgtattcgagaacagatttcatacttaatgcaatttgggttttggtagagttatctttattacaacatcatgacagtaatgtatgaactaatatggtagagatgaatctttttggaacaaaaaacaaatttatttacacagattacaaattatgtgtctcgtttttctttacctaaaaagtgaaatgctcatctctcaatcgagtgttattgaaaatcttaatgctacagaatcagaaactctttaatctacatacacaatctttcttagaatcgaatacttgtaaaaaaaaaaactctgcactaagttaggacactccttgtttgtaagaaagctgattcagaaggaccatcatgtagatcttgtgatggttcttgttgctaccaaatcttgattaacaccacatatgattcaatgatttcatcagaaaagatagtttcaatagctttgcaagaagtgagaagaagaagaagagattcttctttctacttactgtaaaccactcttttaacagcagttcatgaatcttttttctgatgaaatatttgaaaagcatatacacctgaaactcttagagtggaactataaaatcatggctccattgacaaataattaatcacgggtctaggttggcgcgagctgagcaccaacgcaaaccgagtggccaagtccgctgcttcctgtctctgtctacggcgatgcaggatactgatggctgatgccatgatgtagcaaggaagaagaaaactggcagctcggagtaagaaaagctgcaagatgattttgtggtttggagttagaacttatacgaaacttttccagtatatgctggaaaaaaggaagaagtagtaacttacaga

SEQ ID NO: 29438 - DNA, 938 bp, Arabidopsis thaliana landsberg
ttcgtttccataaacgaaaaccgcaccgctctttccagaaagctactactctctcccggtaattcatagacactgttagtgtttggcttcacatgttctattaacactcttttatgttttaggatcaatctctttgtttttttatgtattaagaaccttaaagacaaaatttcagacattggcgatgggaccaacagaatcggacaagattgctcaaaagatgatattgttctctttcaaggctcaacaaatccacttcctagtggagttccttcatatacagttgagatcttcaactcttgtgtctcggattgcaatatagcagagatcctcgtcagttgtggctggttcagctcagtcagactggttcgccctcgagttttctgtcgcctttggctacagcgattgtctggttaactatggtcagcctcttggtcgtggtcagtccctctcctttcaatgtgctagcagcttctcttaccctctctctgttgctcaagtctcttgcttctgattttagatactataccaagtttggtcatttccacaagactcaaaaaatgagaagtattttggtattgtacttcatgtagtggattagattctaacttcaggtagcagttgaacaatgttgctaatgttattgtcaagaaagagttatttaatttaatgataagccaaaacaaaccttcatagtgagtaccatccaaacagtacaagtttttttttttttttggcaaccgatattaagtagaacgtgccaaattatccactttaacattcaaatcataagcttataaaatctttctaaaccactcttattattttgttttaagaattaaaatttatcactgattcctatgatatttgaaatcatgcgaaaattataaattagatttatttttcacgattgaaaaataaattatcgatttatgtcg

SEQ ID NO: 29439 - DNA, 2262 bp, Arabidopsis thaliana landsberg
  unsure (1)..(2262): unsure at all n locations
aaaactattatcattgcatatacataatttggcctttgaactatggttttctcgaattatgaaaataaaaccaaatcattgaattggtgaggcccattggtgagtatatttaggtaacaccggttatttccaattatttgactaaaccgggttgagaagtttaaaccgtgacttaaccggtttcgttacctagactataaataactctcttctcctccactcaacaaattctattagggcacgccgtacagagtttactcactaaacagaggattttgattccaatccgaatcagcttgaagcaaaaatcgatccatggcgattctttggtgtcaacaacaaaagggtaaattctttaactgttctgaggattgtttatgagagtattataagtcactacatttggtaagcaaagtgttgtttctcaaacgaagtgacttatgataatctcatgaatggattttgcaactcttaaagagagcatagttcttgtggtgcggcttcttgatattaggatctagagcattttggtagatggttaatgtgattagggtaaggtagagaaaacattagttgatatgcagcagctaaagcgtgaaatggattcttggtttttagtatattatcatctttttgtgtgtttgtaatgcaggaattctcagccttatagtcccactgtcttcttgtgtcatggattagagaaagtgaaagggaaacaactaaataaatcccaacatcttccaccttaccggccttgaacattgatagctgttaaaatggaagatgctttgggatttattttgtagtctttccttctaaatagtgttgtatggtgatacagcacacgaaaatggtttcaggtttgtgtattacagatgcaaatgtttcaagcttctcacatcctaccttatattggaaggtggaaccctatgattcactatccatttctataccaaaacttgaccaaagaagctgtaactgtgttgatacttgttacaattgagtctttactcccactatatgtatctatgaaataagattgctttccaccgtagattgatcttcttatagacaaagtgatcaaacatagtataggtgaggtgaggtaggaaagatatgtgtgagaccttatcttgttgtagctgactttgaattttctttattctctaatgtattgataagtgtggaagaaacatttttttgataatcgaaacaaagtgatagagtactagagaatcatcattatccaaaccaaagcttatacatctctctaaacctttctagttctaacaagctcttttcttgctccacagtcattttttctctttggactagacttagactacttattgtatatacttacgataagattgctttggttgacttgttacttatcaaagtgttataattctctactttttgtaagcaaggttgctttccaaatgaagtgacttgtgatactctctcatttgttgataggtcttattatggttctgtttatttaattaatgacacccactttttgtcagctcttttttcaaaactttaacaaaattttggtagtagttatgtttatctgaatctcgaggtagatagattttgagattgaaaaagggtattggtccatacccttatggaaacagcagacatgcatgcaatcacaaacttccatttcttaagtttcttctcatctctccaccatgcatgtgtattatacctctataaaaaactnnnnnnnnnnnnnnnnnnnnnnnnnncctccacatcttttggcctgtgcatgagaatggaacatatctacaaattccaacattggctcttcttcataggtcttggagtgttgctgtctctttctctgtgtaagttcttgtctagaatttccctctttttctctctctttttcttcttcttatactatacaccaattccatatttgaatattgtcaatgttgcagctgtgaaggccaatgacttcgaaggttccaatgatagaagaagcannnnnnnnnnnnnnnnnnnnttcgtttccataaacgaaaaccgcaccgctctttccagaaagctactactctctcccggtaattcatagacactgttagtgtttggcttcacatgttctattaacactcttttatgttttaggatcaatctctttgtttttttatgtattaagaaccttaaagacaaaatttcagacattggcgatgggaccaacagaatcggacaagattgctcaaaagatgatattgttctctttcaggg

SEQ ID NO: 29440 - DNA, 1898 bp, Arabidopsis thaliana landsberg
gattcagttgacagatctgtagaggagtcaattcttgcttgttagaagctgttgaaaatctaggtgtagacagttccaagttagtttcttctgggttatgggttgctgtcaagaaacttgtggaccatggtagttctcgagttcaggatcaggcgagaaagctctttggtagctggaaggataaggatgattatgaccactctgaacatgacagtgaaagctgtaacaaaattcatgaagatgagatgagagttgtagcagcaagcatcgagagcagtgggcaaaaatctgctgttacactttgttcgacgcaaagtactagtgaaaaacattgtcctgaaatagcagatgaagccttgctatcaggatgctcagaaggaaacatcccagatcaagataagggtttgggactgcagaacgacaaggctgggtttgtctcgaacgtgaattcccactgctctaattcgatgactgaaactttcaatggttcttgtaccgatgatatcatgaaagaggttcaagaaaaactttctgtgaaggaaaaaagctctatgggggagacaagtggcccaacgacttttggtactatgcctactgggtctagtagcctactttatttagagcgtgatagtgctgaaggcccatcaaatgctccactggatgctgagatacccaaggaaaagcagatggcaaactattttcttgaaaaattgggtgaagcagggacatctagtgcagcaggacacgtagctgtgtcttctgattctattgttgccagcatggagttggagaaaaatagtcttttgcagagtagtcttgattcaaatgaggtgagcaagaatgtgtctgggacgatatgtgggtcgcacgatgtgagcgtagcccataatagcaaacaggtgtcttcattgactcatatgacggacaatcaagattctgacaattcatcaagattatcaggtggccttggtagaagtagaaaatttgagagtgacaatttaactggtcttgctgacaatgaaggaaaagatgatatgggtcattctgacaaaaagaggagagtaaaacggagaaaaaaacgcatctcttctagatcaatgaccatatcccagcgccttggagcaattgacaaaacaactactgatattgatcttggtattttggatgccttggaggtcgctaccaaagtcgcacaggaagtcgcaagagaagtggactctggagaaccttctcatagttcttcagaagaactatccgatgaaagcgggcagtctggttcgcaatactcccgcgatgatgatgtacatacaggttctccatctaagggattatcagtgactgaaacccattcctttgaggaacctcatgttggagatgatgatctaatggatgagaaagatgacaaacctgaaagtggtgatgttgaagaaagacacctagcaacagctgctaaatctgaagtaggcagagagaaaagcccatgtggctttgatcttaatcaagatatatgtcctgatgaaacagatgtcattatgtcctccacatctacaacccctgctcctatgtctgtttcattttctgtctcatcttctgcaatgcctgcagcagcaccgtggcatttggaaagatctcttagcgggaaaggatcagctgctacgagtgtatttcactcagctttacctcataaagttcctagtggggatttaagagaaaagcaggtgatttctcgtggtatcgatctgaacgtggctgaggtaggagatgatcaagttgaagatcttactccttggaaacagtttcctttctcctcatcaaactctaggggtggagagtcttcacatgaagccagtctgcgaggatcaagcaagttcaacttggatttgaattgtatgaacgac

SEQ ID NO: 29441 - DNA, 2822 bp, Arabidopsis thaliana landsberg
  unsure (1)..(2822): unsure at all n locations
tggccggtaatcctcctagaccatccacttttttctggcttataggcattagctcgacatagcccatgtgcgtgctttctatagccagaccatgcatggtcaaaagcctcttttacactttgctgcctagctgcccattttgggtcataatttgaaatacttgagccattagtggaacttgctcttaattgtccttcgtcaggtgataaacgaggtggaagcctaggtggctttctcaaaagtacccctagtctaagttccccaacaaaagagacctttcctttctgattaagaccagaatcatttggactcttactcatcagcattagacatgctactccaaagaacagtattaatataaggaacttccccgtgctacaggtagggtgttgttttttgtactaagagtaaccaagctttgagaaaaaacctataacacaagacattgcaaaagaatgatgtcaaaaaagaagagcaaactaaatcaactttcatacacgtacgaccaaaaacttcaagtcatccattactagattcatagcaccttctacatgtccaattcttactccttctaagcaaacatttctattgctcagattataacttcattttaggagtctcacagtaagaagcctaaaactttaatctgaagctagagactatataagatggaaattctatatcttaacctgaaagcatacaacttctatctaaaaactgaagctttagcggcagtttatcaatctagctttctataactcagcattacctcacaaaaacgtaatttcgtgaatccaaggtcaatttggacacaaagcaattcatctaaaaccaaagaagatgaaccagatacaagaaccagtgacatcaaatccataataaaggagaaaacttgggcataacccatatcagagatcaagatataacctttaaaggagatcgatgtctgaacttggcattgtcgtaatgaatatctttaactgaatatggaggnagatttcgacatgctcagatccccccgttctaattgaagatcggctttggggttcgtgttctgtctgccgccgatctaataatgaccggagaataagatgagatttcttcgggaccagagagattttttttttcagaagaataaaaaaagtgtttcgcagagacaacgcagagaagtcttcttctctgaaatattacggcagcttctttacaagcattgaccaaccaaactcaagcttccgatttctttctttttcctcttgttttttttttcttcgtcaaacattattaattcgtttcttctaattacgaattaccacaaaattttgttttcatccatttcctaagtaaattttaaatctttcgctttcacgacatattttttgttttttttttctataaagtaatgacatttcaataaacaaatagagaattttgaatggatgtagtggaaaagtggattaaactgctaaccgattacactaaactatttttggagcggataataaaccgtcgcgtaccaaatttttttacgttaaaaagtttataattaatccaccgcggaattgttctattttttttttcagtccgtactactgattatagtttatgaatggttaacgaaaagcggtccgtcctaatcgccgcaaccatttgaatcttttattagtactaaaagtttgtgattatgactaaaaatggtctagtttgaaaaattgttaatacttttaggcttatctagggtgaattagttaattttaaaaaccttaagcttgactcataataataacaaaatactggggctgaattagaaaccgtctttatacaagaactttcaattattattcacgcgtcctccttgtactcgtccaatgtaagagaatgaaaagactgacatatccattgagttctctgaggaatatcgtcgaacactttcactgcaacaccttccacaaaccaatctcttctctttcaatctccccaactctcaaatccgaatcacgagaaccttcttcgacccaagacccgtattcactactcaaacaagatccagtcgatatatgtctctcactctgggtcaaatcattctcttctcctccttctgctactttctcgaacctcactggctttctctccaaattcgatttatgggtcttagcttatcaacgaacttgtgctcatgtcaccggaactttcccaccgcgcaatgctattcatgccaatgccctccgttcgcttctctccctccaaaacgccgttacacgttccggtggcaaatttcggtggaacgataagatgaatcagtacgtgaggagcccaaaggataaaatctcaatgaatggtggagagggtatgtcgaaagggaaggtaaggaggatcattgagtctgaagaaccgatttttcaggatcgggtggttcatgaggttctgttgatgattcttgaacctttctttgaagctaggttttcgagtaagtctcatgggtttagaccaggtaggaatccacatactgtgattagaactatcagaagtaatttcgctgggtacttgtggtttatgaaaggtgatgttagtgaaatgttggatcatgttgatgttgatgtagtgatgaattgtcttcaaaaggttgtcaaggataggaaagttcttggcttgattgaatcttctttgaaattttctgataagagagtgttaaaaagggttgttgagaaacatggcaatgacaatggattggggacgaaaaggaggattgaacgtgaaaagagaaacaagacgaagaagaagattttgagtgatgatgagccgaaaccggagccttatgtggttga

SEQ ID NO: 29442 - DNA, 858 bp, Arabidopsis thaliana landsberg
cgagggtcttctgatctgattgtatcgaatgaaacgagagctctgatgagcaacaaattggtccgtttttcattttaaccgcgaccgaaaaaatgcttaaccaaactctgatctctctccgtttctttcgatcttatagcattctccctccaattacgttttggataatctcatcgtctgcggggatgattactatgagaacttctcctgtcagacttcaaagatgcttgtaatctatgagaataaattcatatatctgagcagaagattcgaattataaaagactacacctatacattgaccgtttacagagatggaatcatagaaacaaatagaacagtttgatttatttaaccaaatagttcaattaatggaagaggttcagaatctggtcttcggagttggttgaatgaaatttataattttgaaatctcttcggagttgtcatactatttagaaatctggtcttataatctgaacaatcctaatcccacggttcaacaaacttttgacatggatcaaacatataacaaaccattaacgataaaagactcaaatcaagcgaattaaaaagcaagactcaggtcaacaaaccatattagcctacgttgcatcacgataatgaagaataacttatagatccatccccttttgtctcctaattcttaattttttagaaagagatcattattgttctcggatggagatatttagaaaggcaacgattgtacgtctccgtagccacaacgacaaatacctaagtgccgatgaagatcaagaatccgttcatcaagatcgtcgcggcacaacaaaaaacactagatggacggttgagatcgtacctggatccaatgtgat

SEQ ID NO: 29443 - DNA, 2343 bp, Arabidopsis thaliana landsberg
ttaatccgctgtaagcatgtgatccaacaaccgggtgaacccgaacgctccgggtctgacgggcctttgtaccgatccatgtgagagttcaagatttgctcggaaggctcacgtcgcaggagaagatccgcaacctcgtcaacaatgctgccgccgtaccacgtctcggtattggaggctatgagtggtggtccaaggctctccacggcatttccgacgttggtccaggcgctaagttcggtggtgcttttcccggtgccaccagcttcgctcaggtcatcaccaccgcagcttctttcaaccagtctctatgggaagagatcggacgggtgagaataatttaagaatattatgctttaaaatacattttttaaaaaaggaagagaatataaaatttatgatttttctacgtgaaaaaacgacattgaaatggacattgtagaagactagaagtcatacagtagagtttgtagtgggacgctctatattttttttttatataaaattataaatcttgaatattatgattttcatttgaattatatctgactacgacatgagtctatcaaataagtccgaaacgtaagttagaaaaaatccaaaaaccgataatattttcctttagacatcaaatgcaaaaccaatatataaatttatatgggtactaccaaacttttattttgtaatgtttttgataaattacttagtgtgtatatatgctgtactgatatccacgatacttccatagttaatatgatgatgggcaagctagctataaccagtgaatataagagaatactttttaacatatggtttatatatcaagtatatttatttctttcaacaaaagcaaaggtgtgtggagaatatcttaatattgacatgatttaaaatgaataaaaggtggtgtctgatgaggcaagagctatgtacaatggtggcgtggccggtctgacatattggagtccgaatgtgaatatcttgagggacccgcggtggggccgaggccaagaaactcccggagaagatcctatcgttgccgcaaaatatgccgccagctacgtccggggacttcagggtactgctgccggtaaccgccttaaagtcgccgcatgttgcaaacattacactgcttatgatcttgataattggaatggcgtcgaccgtttccacttcaacgctaaggtaaatcttcttcacatattatatatatctaatatcgtatatagtaagaaaatattttgcaatttattatcaaatttatataaccaattttgcatgttttgtttcaaagtttgtatgcatgtttcatttcaaaattatatttttgcaattcattttgaggctaacttcttattgtttggtcgaaaaatgccaaaaatctttgaaatttagatattagacattgttatatatttgtaatttgtgtggaaataaaagagaacccgtgagtctctattttcttacaatttaagtggtttttcatttcaataaaaatttcaaatttcatttcgttatcaagaaatataaaacaaaatacgtattgaattttctgcttaaacatataaatatacttgctcgaattagaaagctctactttatgtcgttttctgttatttatagctccacgtaaccaattggatgtgactaaatatgcgttttcttgttaaggcccatcgtcttttatcttgtttcatgactagtttcgttaaattcagaagatagcttaaatctagatatatcccaatcgttagtcattagttatttttggagttccgtagaatatgcgtcacttcgtaatattgcaaaacacttttttcatacgactcaatttaaattcattatcaaataaataaaatatgtatagatttgtatgcatgtcacagtcagatacaaacaaaacatttgcctaatataaaacagctaattttaagacaatagacagcgtgactttgtgatgtgtcatatgcatagtcttaagtaatattggtggagaatcttatccttattggttcatgtggaccaacttggcccaagctcattgcattttatcttgttcatccaaaacatatactttaacattaaattatattttaaaaagattcgtttctcatgcataaataattcaaaacataacaatctaaacgaaaattctttagccggcaaaaaaaaaaaaaaacgaaaattcattattgatatgtataattcaagataatagtagtatgttttattacagatagctaataggtgcatgggttggtcctaagactttgggacctcaaacctaaaagaatattatatccatttagttaagattaaacaaataaaaacacaagacttaga

SEQ ID NO: 29444 - DNA, 2797 bp, Arabidopsis thaliana landsberg
gtgctctcagttctttaagaatgatcccacagtccgttaacagtttctacatcttcttggtcactctttttcttatggggctgaccataacttggtgtggaccagccattaactctccaatcttagctgagattgttcctgctaagcatcgaaccatggtctatgcatttgatcgtgcactcgaagtgactttttcgtcatttggtgcgcctttggttgggatcatgtcggaaaaactttttgggtttgacgcaaaaggaattgatcatgttaacgactctggtcgtgaggctgaggcactggggaaagggatcatgtggatgatggctctcccgtttggattgtgttgtctttgttacacaccgttgcatttccttttccggaaagatcgaaaaatcgatagaactactagttcaagggaagtagagatggcatgagaattaatgttatactcattctaattgcttttgttttagtagttctgatatttcttatttgagataaaaaaaattaatctacatattcaaatcctttttttggaattaatacatctcttaggaatttatatatttttgtgatagtcgatatattaaaactttattgagacaagaaaattttctaaaattatactagtacttttttcatgaattgtttttatgtattgatgaaatacacaaaatcaccaacgtgtaattcatatatggcagacgtctcgttgttaagcaagtattattatctggctataatctggtagtgaattgaaaaagaattgtgcggtagaggagttaaattaatatttaaaaacattcagaaaattcctaaaatctcttggtctcaatgtacaagagtagacaagacaaaaaattttagaagaagaaaagggctatgaaaccgaaccagagacagactacatgcagcgaggaaatgaggtttggccaacttggccacccatcattgcccttctgacattatactcgaacgtcttcgggttatccctcaacactgcagctgcttcatggttcagaggatcctcgtaattgggttcctatgtgaaacaaacaaagcaaaacaagtcttcagattagaaggcccaagataataacatcaatggagtatcatcggtcagggagaacttgttaccgtgaagagatggaaaagaccgtagataactgtgtttatgttgagaaccggtttccagtcttcacgcaagatgttcagacagacgtttccttctagatcgatattcggatgatacacctacaacattgacattctttagcattctgtataaacatatcagacaacataaaacgcttcagagactgaggaaaaaaagcctaaccttggtcttgcatttcactttaggagcttcgtgggggtacatattagagacttggaatgagaacacaaagttaccactcctgtttaggtataacaagaacgaatgagtgtgtttttgcgcaaattcagggacccaaaaacaaaaatgaaagatagagattttgtttacttacaagtaatatccttcatcaggtttaatggttacttcaaaattcatcaagtcattcttcccattcggaaaagatatcttacaagattttggtaagtttagctccgatatatctatgcacaaagtaaacagagatgatttatcagttacacctactggaagacaacatataaccctaaaaatacttgatagtgataactgtaaaagaacctaacatctacagtttgttcaacatcgaaactgagtaagatcaacagctacacctgatgaagaaagatcaaaacacactgagagagtatcaactacatcaactagaagacaacataaaacctctacaatgcttatagttctaacacataacgaaccaaattcaatagagattttacagttacaccaactagaagacaacataaaaccctagaaatctacagagaaattacaaattggtcaacattagacagtgaataagatcaaaagcaaaaaaaaaaaaacagagagaaggaagagaaagagaacctttgtgaagacgaagttcaccagcagattgcttcttgacagtagaagctcctcttccgttgttactttgagactcttctctttgcttctctttcactttgaataacccaatcatcgttcttctaccctcacaaatcaatcaacaacatcatacaattattcacacaagtttctttggaaaattcatgaattacaacagaacaatcactcaaaaccctaacgaaatttcattcagagatatcgaaactagttaaaaattgactacgaaacaaatcatgaatcttcttcggataaccaaacgatcggagattttatcaaatcggaaggaagaaacaaaaaaaaaaaactaagatcgaaaagtgaaaacgaagagatcggagagagcttacgagttgcaaattctttagatcgaatacaaagatgagcgaacctttcgtcttcactattgatttggttcgacgaggaacgaacgaacgtagctttctccgtaagctgattctgaaaaaatcacaacccttcttcaaactatatatacgatgaaagtcattttatttggtgtagacgaaactaatattacatgatgtagtttcggaccgagagattacggccttcgatccaagacctcctaatattcgagaaaaaaaatgaaaaaaataaatcattttgttaggcctaacgaaactaaatgggcctattaacatacccatccatcgtttcaaaagcaacttgtagaaaaactaaacttttgggctttactcacatatctttttt

SEQ ID NO: 29445 - DNA, 1917 bp, Arabidopsis thaliana landsberg
cattctctgctaataccctttgctgcagttttgaacagttctgtattaatttcactaatgagaagttgcagcaacattttaatcaggtatgttcgtgagtgtagttgaaaaaggtttattaattccatatctgattctcaaatcggctttttttcagcacgttttcaagatggaacaggaagagtacacaaaagaagcaatagattggagttacattgaatttgtggacaatcaagatgttctcgatctcatagaaaaggtcatttctgaaccgagaaaggacaatgttaacaaaataactccacataccggttggattttgttatctcactttatttccccttttattttccatctgcagaagcctggtggaattgttgctctcctcgatgaagcttggtaaagttaaagatcaaactagttccatatgaagcatgaggtgattatgttcttgatttgaactaacgaggtgtaatttttcagcatgtttccaaagtcaacccacgaaacatttgcaaataagctgtatcagacttttaagacacacaagcggttcatcaaaccaaaactctctcgaacagatttcgctgttgcccattatgctggagaagtaggttctctctcctttgaagaaaaatggaccttgtaaaacacagaagtttctcatgtcttctaaatctccaggttctatatcagtctgaactatttctggataaaaacaaggattatgtgatccctgaacaccaagatttgttgggggcttccaaatgtccctttgttgtgggtcttttccctccactcccagaagaaacatctaaatcgtcaaagttttcatccattggttctcgctttaaggtagggaagcttgttcatatgttcagcaccaattgtgtaaaggaagaatgtctaactactcgggaagactaaaattttcttttttgattaaaaaactaatattttcttaattacgagtaactgtaactagtaactattggcctggttgatgcagctgcaactccagcaactgatggaaacattaaattgcaccgagcctcattacatcagatgtgtgaagcctaacaatcttctaaagcctgccatatttgagaatgtgaacatcatgcagcaactgcgatgtggtgtaagtttacaaataatttcaactattgggttgttctagacataatgggttctaaaaaaaaatatgttaccaatttcctgcgattaatggctggaacgtatgtactaacgttaaacccttatgttatctttctagggtgttttagaggcgatcagaattagttgtgcagggtatccaactcgtaaacctttctttgagttcataaaccgttttggacttctatcttcctgctgctttaaaagggaagtaagtaaaagatcattctccctagctgattttatactgttttgtgagagtctaaatcagtagttacagattttctgacttctcctgaacagcttcgatgagaaagtcgcatgtcaaaagatcttggataacatgggactcaaaggataccaggtaacggtttctcaagtgtcaagcgaaccaattgtgtagtattagtgctgcaatgggatatggttcaatcatagcagagttgtgattaacccaaatgcaaaacatattttggtaatgcagattggtaaaacaaaggtcttcttgagggctggtcagatggctgaactcgacgctagaagggctgaggttctaagtagtgctgcaaaaaaaattcagcgacgtatacgtactcatcaagctcagaaacggttcattgttctgagaaaagccaccatttctcttcaagctatatgtagaggtgagccataaactaacttgctctaccgttttcatggaagttagaagggctttcacttgtatcaatgattgactgaata

SEQ ID NO: 29446 - DNA, 1869 bp, Arabidopsis thaliana landsberg
ccgagatcttaacaagacagcaaaaaggaaactagatgttacagatttgaagttctttccaagaaaaattagattaggaaaatgtataggtgtaccaacctggaatatctcgaccttgaaagaaaaaagttcaatggctttcaaggcttgattggttacatggttttgcagaaccaatatcagcccagttatggtttcttggctaagtatatccgctactacactgcggattgcgttgactttaaccatactagtaccaaaaaagacaatttttacctgaacaagcaaaatcacaacacttcttgaagcagaccctttaaaccaataacacaatgttactatatccagagaatcactatgagatatctgtcgttatgccataagactagagctgatgcaagaaacatcatgagttgaaaatagaagacatttataagtaacaaaaatcttgtagcaatcaatatatgaaatcgactagttgaaagcaggtgacaagcatgtctataagcatacaaaaagaggtaacatgaaccaaacaaccaacaagaaaaggggtaagattttcagcaaatatccaacttaaccgttcttttgcagttcaatctcattctagaattaaacatggaaacttgtagctatcatcagaactcgcacatttgacattgaccatactctaaagattgaagagatcactcaatgaattgtccgaatgttcaatagccataggaagagatctaagaatcactttgctagttgttaccagaaacatttcacattacaaaaattcagaggacaaacaaatgaggtatgctacttgataaggacaataaagtagtaaactttagtcatctgaatccacaaaagtagcaattcaaacttcaattagaagataagaaatttaaaagagtcacaaatttcatattccatcatcttcttcactgccaaacagtaaaccccacaacatgcaaagacaaaaaaacagctagaaatcgaaaaatcacaacgaatacgaaaatacttcgatatacctttttggtagaatcggagcgatgcagagcggagatgcgaagacgatcaacatcgggacgttcaccgtaaacagttcgaaaatcgtgaagggagagattgatatcttcgtcggagacttcgtagcctctgtctcggagcatctgcaagccatttcgccgcgcaagatagtatctatgactctcttcactcgatagatccacgtatttgctcagacacagaaccgaagctgtctctttccctttcacttccatttttgtctcccttatctgagcaaaagtcgtcgagtccagtgatgggatttaaagggagactaaacgttgtcgttttaggatttaagaacagaaggaagaaagctaatataggtgagcgagcaggtgacatcaatcaatcaaactacatttgtggtaatgttgcacatatttttcattgataaaaaataccttgcaaacaaaacaaatcattcggcgtattatgcgaattatcaatcatcatctaccattggatgtacttcatatagtaagaatcattttaattcaaaaggtcaagagcgtaaatggaacaaaagaacacaactcataagagtaaataataaaaggcttgagccaactgacttattcgaatatacattactaaccaaataccatgtttagtcaatcaatctatatcccctgtctcacacacatcttttgatcaaactgatcacttagagacaacacacacgacaacgcaccagtccattctcattgcatttaggacaccgcttagaccgtgcatcttgctcttcaaacactttggtgctaccatcacagttagtacaaggcacaaaccttgcatcaccac

SEQ ID NO: 29447 - DNA, 577 bp, Arabidopsis thaliana landsberg
ttcactttcacaagccaaatccactgcggcttttctctccaaactctcacgctctgccgctaaatactccggtgatggccaccaaacagcttccgccgtaatccgagactgcgtttcgaacgtcgaagacgcggtggacgagatgagaggatctctccgtcaactacgcgacatgaacggcagaggaggcggcacggcagctcggaggtcggtagaaacgtttaggttccagatgagtaacgtgcagacgtggatgagtgcagcattgacggatgaggacacgtgtacggatggatttgaagatatggacgaaggaggattgattaagacgaccgtttgtgatcgtctcgaggaagtgaagaggctaacgagtaatgctcttgcccttgtcaacacttacgccaacaatggagctccatgaccatgagaccatgaggccatgaggagttttaactttgatttaagtgtctctttatataatttatgacattgtggggtttaagttaaagttatgtgtcgatttcaacatgcgcgacatttgttaaagaatcacccgagtttgttctgtttcgagggg

SEQ ID NO: 29448 - DNA, 1265 bp, Arabidopsis thaliana landsberg
ccgaacgtcgcgactccacacaaccgttttagttccgccgtcaaaaccgaacgtcgcgactccacacatctgttacagttccgttacagttccgtcgtcgttccaaaccgccggcgttccaaattgtaagtgtagaatagggcttttagtatagaaattggaacggtttttgatttgaaacattagaattggttttcgttgtgttgatttgaacggtttccttgattgttgagtggttttgcaaggtaatcatgggtcgtgtaaggttagtcactcctagttcgagtgaaagtgaagacgagagggtcacgatcatccgtgaagcggatatgaaccgtgaagaagttgcagccgaggaaaacaaatttgaagacgaaaactgtgaacaagagcctccggaaaaccttaacgaaccggaagaagaaaagatttctgaggtatatacaaatttatgaaactttcgtgtgaatattgatgtagtgtttaggtacaactagaaaacaatgagtacaagttaatagtataggtctgtgtaattggtgcatggatatacgtgattaatcatacattgggttgcattagaaaattgaattctgaaaaaagttgataatgttgttctgagataactagtataactagtacaacgaaatattaattgtatggttgtgtatgaattttcagaaagttgatgatgaggaaccaatgcagtctcaggggatggaagaaaaccctgaagaagaggaaaaagaaggggaagaagaagaagaatctgaggtaaatggttatttatgtaaattgtgtttgaatattgaaagtagtgtatagggacaactagaaaacaatgagtacaacttaatagtattggtttgtttgattggtggatgtatggatatatacgtgatcaatcatacattgatttgtattagaaaattggattctgagaaaactttataacgttggtctgagataacgcgaaatattaattttatggttgtgtatgaattttcaagaaattgatgatgaggaaccaatgcagtctcaggggatggaagaaaaccatgaagtaaaggaaaaagaaggggaagaagaaaaatctgagataacattaatttctgaaaattttgtttgaatattgaaagtagtgtatagggacaactagaaaacacttaggacaacttaatagtatattttcaacttatgtggtgcatggatttatacgttaacgtgatcatacattggtttgtttgattggtgcatgaatttat

SEQ ID NO: 29449 - DNA, 3292 bp, Arabidopsis thaliana landsberg
  unsure (1)..(3292): unsure at all n locations
acctcgatttcaattgaaggtgtgctgttttctacttgtatcagacaagtggggaagtacgttacatcgtgtttaaagattttaagaatcctctaatctacgaagagaaggatcttgatattgcttctgtagttaaaggtatgcctactttattatcatatattcactacaaatagtctctacaatgtcatacttattgttccatgttcaacttaagagaaaacagaaattcattatgctacttttagcttgtgaatattcgtcgcttcagccttctatctcgtgatttgtgtgcttaatacatattctggtttctttttcttgcgctttgctgcagctcttgacagcctcctcactcaagatactgagaaatccaagtctgtcagacttttcacgaacacttggtcaaaacaagcagaggctatcaaggaatcacatttcccttctttctttcaggatttgttactttactttccaggtatgtctctttaattttctttcttttttggtctttttgaaatttatcaggaattttcatttttgtctttcacgctactctctaatattttgctcacaaaaatttggaataaaattttgtttttttatttaacaattgacattctctgtgacaggttgtatctctgcagacgaagttggagaccgtctgtttctttctgataccaaccatcatcgtattattattttcgaaaacagtgggaagattgtagacagtgtaagtgaactgaatcacatttggggaattataatctttattgactttcttttctgaaatcccttagaagggcattcgtagagagaaaagtgcatttgaagctcattgtttaacaaccctaaagttcaaaacaatgtttttatttcagattggttgtttcccaggttttgaggatggagattttgaatctgcaaagatgttacgtcctacagggaccctttacgacgaagcggaggattgtctttacattgtagattctgaggtatgactcctagaagaagatacacaattatgattactggttgtgccattgaatgttttcatgttaagattgtttttcctctttgtttccttccttttccccattctttgggctaagaatcacgccattagaagagcaaatataaatagccgggtcctggaaacagtatatccaaaggttattaagaaaactggtggcttatggtcttggataatggagaaaatgggtcttggaaaagatgacgatacaacagttgatgctgataccaaatcagaagaatttgatgcacgctctcttttgtttccatggcatatactgaagcgtgacgatgagagtcttttagtcattaacaaaaggtaaaaaaactatttaaagggattgcttctttatagtagtgatagctcggtctctttttccttcttttgctgcccctttaagttcgtaaccaaataggtttctcatatctttcagcttttcgaagttatggataataaatttagcttcaggagagatcgaagaagttgtggaaggttacatatgaattgagatcttcttttaccgttttgtattatttcgtttgttgactcattgcatctaacagatatttatcaacattttaagggttttcgaagataattgagatctgcggtcaatcaatcacagagaagctatcagtgttggaacatatgcctnnnnnnnnnnnnnnnnnnnnnactgcggctatcgcctcatttaaggagcagccaagtgcttcccttttgtcttcttttactaaacttggagacgacattgtcatgacagatataggtaaacgacatctacgcaactttgtttacatctttttcatctctatgcatcaactaactcattttgcctttgtacgttaagcttgtcagagggtgttgaagctaaatagagattctggagcatgctctagcattcaattctcaaacagtgggatccttgggttgccctattggttgttcattccactggagagagtttttaatctgttagtgatttctcattcattatcttatccattaacaacacttctcttgttctgaaactttctaattgatgttgtgttactttggctaaattataacagagctaatggagttcaggaagcacatctcagtcatactcaggaactccggttattgccaggtgcgattcgctatacagaccctaatttttttgctcatttactcatttgcttatgctagtcttgatgttagcagttcatcaccccagtcccaattagctgcatcatgaagatggtttaacattggttccagccggaattggtttgatttaattgctactttttcatttaacaggtaaaattagcatacggttgaacatagagattcctccatgcacggagcttgttgaaccgatacaagaaagctgcatatggcgacagacaagaggcgcaatcagtgaattctcgagtgctggaagtgcagttgaaccttcagaaaaggttatttaagagaattgcattcccgaattgtatggtttaaatccaggtagctcagaaattttgttttcataacttgcaggttggagtttcacaacaatggtatgatgaattagacagcctcgccaaagaaatagccaaccctgaagcagctgaggaagaggaagaagaagatgttaacccctctgaggttgacagagaagaagatggacgtatccacattgattgtcctgtcaaaacaagtcctggctcaagtgaggtacgcctaaatctcctctcaagtctcttttatgtacagaagccaaactttactattagaaaaaagtataactttgtcgactccggtttgtgcagcttattgtttatgcagctttgtatttaagactagcgagaaacgaagagacagaaagtgcgacccaggaagaactggcgagaaaaatagcaaagattttaaagccagtacggaacattacaactatgaaggaagatttgtttgtgaatttgttgtccaagtcaaagagagaattgagagacattgtcttcataaagccgatgcatgtgcggataaggttagactcgaaggatcatccaaaagccgataactcaagagacgtaatcttgactgactcctctgttgaggttgatgtctctctctgacaacgaataacgatgcttttgcagtccattctttctcaaaagtaccaaatggctactctaattctttttgaggtggtaaaaataagctcaataagacttgtataagtagtttatgacattatattaacgatggtccaagtttcatttggatttc

SEQ ID NO: 29450 - DNA, 3615 bp, Arabidopsis thaliana landsberg
ggttcatctaattgactaaggtaatgagaaaggtagtaatttacaagattaatgggaagattagaaatctcacatttataataataactatgcagcctaaatgtaagaaccaaatgcccagtaactaatttgttgaaactagcattaacgttaagtttgaatgctgaaacagtgaataaagatgtgatcatggggagttacgaagactattacctagcagggtaaccaagtgagagtccaggcgaaatggagactagagctgccaaagttgctgcttgcccatgtaaagaagcaagatcagttttcaatttgtctccctacagaaaatgacaatggcaaagtcattccccgtcatcaagttgctccagcttacaatagagactgtctatttatagagacttaaagatgaagaacttcaattagatgaaggccaaggacgtcataagcatatgaagggaaactatgatgtctttcatgatatattgatattcaatttcaccatattaattattagtaatagactttcttgttctgcatttggatcagaatgtcacttcacatcttcattaatattcggatcagactttctcgttttgttgccacactctcatacaatactaagatatgccagatcatctaatacccaaaatctcttgcttacttctgacagaatatttagtagaaatacatattacaaatgcagcagaccgtgcatgcatgtgtaattaaatatacaattaaaatatacatttcaaacttaaaagaaacttaaataaaaataaatggcatatcatcttactaaagaagaaaaccaaactcagttgacataaattgaaagtcatagtattaccttttcaaaggataaactttcccgtagagcattaagagttgttacagcaaaagatgtcaacccaccaacgcaggtaggatcaacctcagccaaagcacgtaaagttaaagcggcctcaacacgtacctaaaaaacaagtttaagtttgtaaatatgcatttacaattaccatcgggttgtcatttgacccaatgtacccagacattcatgttagcatgacagctaaaactaataaacactgcataaaaccgaatttgtttcaatatatcaagctactaaattcagaaaatcaatcagaaaatactgtgatgacggcctcttccaaccctctatttctatgcataaaggtcttatttacgtacctatagattactgtgatagcggtttattccaaccctctatttctattcataaagatgttgtttgcctagcttttaaagcagatgaaacaatttgacatccagtagtaggaagaaattcaaacaaacatatctttctgtgaaattactagacaaaaaaacacgtaataataatatctatatgctgaaaagaaatagaattctctgataaatgctgccaagaaaagtaaaagggatgaaaaggactcgtgttgagagcaactgtcaaacaatacatgtgaaagcttacaaggtccaaaaaatgtgacaatgcagcacccactgtatcatcgaaaaattccttgaattcatggggaacctgcaagcaagcaagaaaaaatcgagcttaacattttctttagggagttaaagaaaacagaagtttcatgacataaattaatcagaagagtttacgccagtagggcctcacctctcccagtgttttcaacgtgtatgacaaagcccgcaaagcaactattttcattgatggactggcatttgaagactgaagctgcaatagtttcaggaaaaaaaaaacgtaacttacttgattatgatgtagaaacattaattaaaatatttaaatatgtagctctgacttgcaaacctgctttccgagaaaaacggaaaagcttctctggcttggttccatcatttgatcaattacgccaacccgtaggatgtaaagaacacatgccttcaaaagtgagaatatagattaaggaatttgatcagcagaacatcactaatgttttcataacagttagcaatgtctcctctctttttataagctatgcagagaattgatatgaatgattcccaacgcagcaatagaggtgcaaggcgaaattttgaaagacagaagtatgtaagaaaaacttatgcacgaccaaatgaaaaggttgggggaggcattgcaagaaaatgaaagaagcatgacttaccagtgcatgggcatcaattgaggagtcaccccgcagcatgtccatgatgggcaaagaatagtcttgaagctcactatctgaatccaaataccttatcctaatggcctgcaaaatttagttcactttgtaagtttacaaggccatgatgccgtattggagatatgcgtgtatataaaaaaagtgaagatagtcacaagacttgacgaaaagattcactactagaaaaaaatgcaggtcttttatgatatggcaatataggaaatatgcagatataacccttgataacaactggtgtgatttcctaacaatgctcataaaatatgtaattgataataagtctcaatgtcaagtctgacatgcaatatctaatcaacgaacaaggaaaaaaataaaaaaaatctcgtttgtttacctgtaaaaagaacacccatgacagagccaaaccaaaccgtgtattctttgcccgagatccaaccgctgcgattttagtattattttatttataacagaaacaaaaattagtgcttcgcacaaagaaaaacgaaaaaaatctactacaaactttgtagcaaaaatttatatctatcccaagtctgaagagttaatgaaccaaaaattttcgcacagaaatcttgccaaaaaccaatctttcaagaggccgtaacaatatgctaatttctagtggcgatatgaaattactgtaaaagaacaaatcaggtatgttttgcttttactatgtgagccattataactgctttcttatttttactgtgcacgcctctatatagtggctagggactaaaaaggttctcccacaatttcaaaggctaaatagaaaaagtataaaacgggtggcaacaacatgattgcatttataatgtcatcatattgccataatggcttgcaattctgtcttcaatagctcataagtcataacactaccttttgtgaagggtaaaatcagatgcctctgcagaccaccttccagtttctttgctggtggaaatggacctttacctctaggttggacctagcaaacaaaaaccaaattccataaccacaaaattatgaagacaaggacgcaaattactagtaaaataagcctacatgcgcttcaggatgcattcctagtgcaagcaatgagcccaaagcctctgcaaatgcatcacggaccgatgattctgaatcttcaataccctacgttaacagaggtatgtatatattcagagatagacatcagcccaccaagaaattgaaagaagagcgatttaaaaacatacaggtttcactaacttaccttgacacagtaagaggctaaagtatcaaattcgctagtactaagaccaggacctaaaatgttagaaaaggccttcaaacaacgagcagcagcaattctcacaacgaatgatttatacaaagtgga

SEQ ID NO: 29451 - DNA, 3116 bp, Arabidopsis thaliana landsberg
  unsure (1)..(3116): unsure at all n locations
ttctcttgcagagttaggttttctcctgatcccacattgtaattaatgatgttgtacatgtcctctaatttatctgtttgctggcattcgaatctttgcagctatcttttcctacaaacaattgcctagttttctgataatgacggcagtgtgatcttaatgacacaatggacgccgtcacatttttagagtgctattagctagggaatggttattaactttctcaaactttgatcaaggaactatgttttgccttttcttttgatgtaagttgaaatgatacatattttctcacatatgggctaccaaatcttttcttatagttgtcgaacgtaactaaacatatgctgacacagttgtataaataattttacgattcacgtttctgaaaatgttagttagtattagcctatgataattaactatacttcgctttatgtaaatcaaaggccaacttttttgaatatctatatgtaagaataaattacagctattaataaatacgagatgtaacttaattcagaaatgttcacacacatatggaacaagaagatttatccctgaaatagtattcacagtttggatcttatacctttttatgtaaaagaaaagattcaaacaaaaatctttcttatacaaataagattcaatcaaacatatattcctggaagttttgaacataaaaaaatgatttacaaaaaaattctcctaatttattaaaactgaatatttaataacataaaatctcttataatttatgtatatacaaaacaaattccatgatattcatagaatctcataaggttagattcttattataaaaagtagacaatctctaataatttatgtgtcgtgatattaattagaaatctctaataactcaaataggatattaatctaaattcgttgacaaaaatagatagagaatcattgttattcaacgcccaaaaccaaagtcattagtcaatgtcactcgtgaaactatccaaagataagagtttatgggattcgctaatctattacattaaagccacgtgtcttaatcttagatgttcaatagacttgccacgtcacacattgtctctctcgtttctcaaatcgcgtttcttctggtggaggtcaaactttttgattagcaaataaaagtcacacaagcagaatccaaaaatgtaacaaaaaaaacaaaacttcacaaggcaaaaaatccaaaattgagttttttttttcttcattttttacaatggtgtctcggtttcgtcttgctctagagtacttctaagtctctctgttcttacttcgatttcgatttttattctcttttttttttttttttttgaagacggatttggttggtggtttttagggctgttttgggttcgagacgacgtaagaagatggcgagtactagtagtggtggtggtggtggtggtgataagaagaagaagaaaggtttctctgtaaaccctaaagattataaacttatggaagaagttggatatggtgctagtgctgttgttcatcgtgctatttatcttcctactaatgaagttgttgctatcaagtctttggatctcgatcgctgcaatagtaatctggtttgttctaaatttgatctcttttagcttcagcatcaaatttgagtatgtgtattttgagttggggatctttgattttgggatacaaaattgagatcatgtgtagcttcactaaaaatcgaaactttgcttcgttgttgcaataaagctatcatcttttttgatgggcgatgaccaaattgtgttatcatcttctcattttgcgtttgcgtttctgttagcttcactaaaaatcgaaactttgcttcgttgtagcattaaagctatcatcttttttgatgggcttatgaccaaaattgtgttattatcttcccatttgcgtttgcgtttgtgttagcttcactaaaaatcgaaactttgcttcgttgtagcaataaagctgttatcttttttgatgggttatgaccaaattgtgttatcatcttcccattttgcgttagtgtttgtgttaacttcactaaagaatcgaaagtttgcttcgttgtagaaataaagctattatcttttttgatgggttgtgaccaaattgtgttatcatcttcccattttgcgtttgcggttgtgtttgtgttagcttcactaaagatcgaaactttgcttcgttgtagcaaaaaagctgttatcttttttgatgggttgtgaccaaattgttaccaccttcacattttgtgtttaggtttggttggtttaatcatttaagatcaaatgggattatgggagagttattagatctctctcttctttccctttttgtatttgtttcttgttcatgtgttttcgtttctgcgaatttaatgcattgttttggttattttagaatgatataaggagggaggctcagactatgactttgataggccatccgaatgttataaagtcgttttgttcattctctgtcgaccatagtctatgggttgttatgccattcatggctcaaggttcgtgtntgcatcttatgaagactgcgtattcagacggatttgaagagtctgctatatgttgtgtattaaaagaaactcttaaagctcttgattatcttcatagacaaggccatatccatcgggatgttaaggttagtgaaagtgaaaaaaattcagcttcatggatccatgtatgtaatgtattcaaaatttgttgtttctttgcaacttaggctggaaacatacttcttgatgacaatggtgagattaagcttggcgattttggtgtctctgcttgcttgtttgataacggtgataggcaacgtgctagaaacacatttgttggtactccttgctggttagttatttaacttctttctttttgtattttaaccatcactcttagattcaatggtttacatttaacctctttgcttctgttttgtaggatggcaccggaagttttgcagccgggaaatggatacaattccaagtgagtttactttaagctcaaatactagatcaaacccctatattttctgcttgtctaagatagaaagtagaagtactttggtatgtatgtatgttaagacaacttgtc

SEQ ID NO: 29452 - DNA, 2340 bp, Arabidopsis thaliana landsberg
  unsure (1)..(2340): unsure at all n locations
agagagagagtcgtgaaatgtgagtatgtgaccattggagtcacctcaataagtggcgttgccgcttcttttattttacccaaaacaaatattaaaaagttcgtgaaaaagaagaattggtggaaatttaaatcctaatgatgttcacaagcttggtaggccctgttcgtgtactagtcgccagtgactagcgactgcgaccagcgaccatcaactgcgatcagcgacttgttctgttgttcgtttgacagtcgctgccaaacgatcaagcctcttagaaccaagttaatgtatttttttttgtaattgttatggattctcttgatgttgaaagtcaactagaaataaaataataacccataaatcgtgttttcaaccaaaaccacatcaaaataagcctgctaaactggtggttatgacattgttaaattttatgacagcaaagaaaacatggccgaataagagtggagattcacatagctcaaagacgagttcccaaaagttgaacacaaaagaaaaacctttctatttcaataattgcagaaaagattcacatattcattcttaatcgtgaatatgcagtcatcatgaagaatcaagccaactaaatctgatcccaaaagtgaccagcggagatatctagctagcaaccaaccagagctattatggaatcagattccgcacaatgggtacgcagacggaaatcaaaaactaagtcacaaccatatatttctctctgttgtggaaacgactctttggtggaggagattagggaagcgtgttccttggaagaagatgaacgccgtatgtgtctatctttggagatcactacttgtcatttgtctgaaattttcaaatgagctggagatcaattgtcctatggacaaaaatcaattatgataatctcaattgcttgctagaaaaatgtaacagaagaaagaaacatctaattgctaataagagatcagagtttacaccacaggggaaatattagattgtcgaagagcacgaagctgtgtgctttttatgttttcaagtaactgggttactgtgtttagatgaacaccgctgtatcgagaaaacgaaacttagggttagagagcacaacagctacaaacattcttcatcatcaaagggagtagtattctcttatcacatttctcattcattgttcttaaagctatctattagaattcaactctaagtgatacaagatttgatgatgagtgcatgtcaaagaagatcaaacctgtgcaatccgctttctatatgagcatctagagatgaaatcacttgaggaagctgcgccaacgccttaacaaaatgtaaaaaaaaatgcttaagacacacagtacttacttatgtcatcatacattctacaccataacatacatacctgtccagtggccttagtcagtgaagctttcgccaacagattcttcgggagctttgccaactgagcctacacacagcgaatactcataattagagattaaaaaaaaaacatctaaagctcatcctaataacctcacattgtgtttcattgtggtcttattacatgaaacaggaggagataactagtttccaatgaaataggacaactacgaaactgttgcacctatgtttgaaacaattcaccaaatccacattttctatcatcagaatcaaaccaaaccctaattattcaacctagatcctatttaatccaacggtgactaaatgagcacgcgttaaaagggtttgaagaagatatacctgagaagaagacgattgacgcatcagatgaagaaggttagcagtggaatttacggcttgtgaaatctgatcggcgacgacagnnnnnnnnnnnnnnnnnnnnnnnnnnnnnnnnnttgaattttccgatgccgtcgccatttctctctccaagtttggttggttctctttttttaacaaatggtaaaatataggtcttacattgtaatattataaactcttagtcgttcccctattctattgatttatatcacgttattcccaatatttctatttctatcaaattgacacctcccatatcaaaccggaacgataaaatgcaacttaattttttatgttatatatataagacatatatttaaaaatatttttagaattttatgaagtccacanatgaaaaaaggaaagtatgattggtactgaataatgagaatttaagtacaaacattacaacaatcttcaacatcttctatatgtataactataactataggtcaaaaaatgaccaaaatggaacggncgaacanagaatatatcaaaacctagaatctaattcggtcttggatctatatagatgattatcac

SEQ ID NO: 29453 - DNA, 2234 bp, Arabidopsis thaliana landsberg
gcaaaatattcattcatctatgacgagagatggtatatcacatcacaagccatccaaggtttagagacgtgggaacatacaaaatacatacataagaactactaaacaaatcattcattcacctatgacgagagatggtatatcacatcacaagccatccaagaaattgagagggacgaccatacagaaagcacacatttcaggccattcaaagagagtggaaagaaatatagccatcatagttcctcaggccatcaacaaaagaaaaggagaaacgcattcattccagcatcactcatccaaaaaggtaaaaggaatgccatcattaaccaatagacagcacacccataaattgatatgaaagaaaatgaagacgccaaacctccaacatgataaaattagaaagacggccaaatctttgaccagcaggagtggcaaatcaagaaaccatcttttgaacctcatgtccttatcaaactaccaacttaaaaaaatacattcatcctgtcaagaccatacacaacatgttcactccatctagaggaagagtaaagaaaatgaatttcaataggagaggaaaatagcgatgttcttataaccaattcccactataaaggcaacagcaaaattcagttctctgtacattaactccaactctaaaacaccctcaataaattctacacttttcaaacacatctaaagttctagaatacacacaagtagcgaaatctatttgcccaacataagtacataaaccctttcttagcacaggtagccttcttctgtgacagaatcgaacacagataagacgctggcaagcataagcaataagcccgaaaattgttgcaaacaattggaggccaatgatgagactggggttgcttcccatcagccttttcagggagacctgaaattttaaaaagtataattcacgactatttcctaataaaatggagattgacataccttgctgctgtccagttctcttgtccttgatcagagcaacctccagaacatttccatgctgttcgaaatagggacggatctacaatatgaaaaccaacagaaaaaatttagaaaaggttctcagtaatgagtatatagataacaatgatttccaagattaactcacttcttcttctgtagctgtccttggtacagatccaacaaaaagcttgactgtactgctacgatcagagacatctgcaaatcaaattaaccagataaggatacacatgaagatggcatatagttttgattatcacatacatgggaaaatcgaaaggatcccatgaaaaaccttcaacaatacagtaacataacaaccatactacctttcaatactctaatcattgattcccacaaaaataagagacactcaggaaccttaacagactacaagaataaatatacatagaagaaagaagagtgaactcatgcttaccagttccagtaaagctgccatggtctgagataggataccctcttttctgaccggaaagaggctgctggaccggcggtgtagtcggtcttacagaataatcagactccattgctttaccgataaatctcctcctgtctggactctctgaaggaggatacttcgcgggatagttataccgagctccaacaattgaccgtgtcccttctcctcccacaccaccgttaggacccattggacgaaaaccatcatcgtaggcaaaccccataggccgaaaacttccaccatggtgaggacccataggcttaaaatctactctatctgggggaccattcatctgccggaaacctccatctccgggaccatcaaaatccttaggagtgtcatcttcccagcgtcgaccaccattacctcctcctccgcccccaattccaattcgataattgctagggctgcttcccacgacgtacgacggtggcggcgaaaatcatcatcatccctcttcgaagcgtgaatctgagggacgagatggacctctgggatgggctcggtggttatggtaggaatcctcgtagccgccactctcatggcgatcccttcggtgtctgtccagcttgacgtagtggggaattgcgattccagtcgaagaaatcaaaggactaggagccctagaaatttgggatctgtatgaaaccaaagagagaagaaacgagtatcgaagatgatgaatttgattgaagatgagatcaatttagttgctcgaaattttgatttttttgtccgaatgtacagg

SEQ ID NO: 29454 - DNA, 2414 bp, Arabidopsis thaliana landsberg
actccggtacaatcaagagagaaccatgacatgtctcagcactctccatcacgtccggttagttggcaattttcatatttatagtataatgggccttcttggcccaatattctcgaaacattggactattggagtttctcgtcatcctcaaaacaagttattgggaggtgactcaaaatcacgaaatttcttgaaatttttccgagttaaaaagttaaagccttatttagttctccaattttattttcatttatatttctggctttcatcctaatgaatatacactagatctcacttgtttcttttcatgtacataatcattttgggggtggcacgaccaatcattgcttgagttgatcttaatccaaatcttaggaagataatgcgcaattaattgaatttttcaaccaacaactggacaaaaagactatcgccttgtaatgattgtaattatgatgcgtatagtcttctagatatcaagtatcaactatttatcattttcttacaactaacaaccaattaaaagccactcaacatactaacataggtttcttatacttttaaaattttcctttgtccaatgattattgattattatgattaagatcagatgattttctctatggataaaaaaaaacactagcaataaaataacaagaaaaatggtcatgttgggactgggtgggagtggaacgagaggccacggcacacaaagtcacaaagaaagtgtcattatccggtgcaccgtcccacatgcgattgctggtaaccacgcgtcaatcagaagaatggcatgatccttttttagattgtgctcgctaacatggaccctacaaggaccgaactaatcaatgtggttctcacgtgcctcttttgccaattttaacttttctaacgaaaaaaatattactctgaaacctccacattcaattgtgatatgaccggcgtctggccctcaaaccgaaaggctctcctctgaatcctttgttgctctgtcccacgtgccagaaatatcatcttaaatatggtggtctttcgcaaccctgaatggcatttgtggtaattagttctaaattacgtgagacaatgcaaagattttgttttgcaccatcgttgccgaccacatcaaacaggtcatcgctctgggtccactcaccgctagtccgctatacacttgtgggagaaggcttcttgtagtacagtttcgtcacggcgtcttattaattcaaagctgtgacgttatggttttcgattcggttaactattttaatgcaaatcttttgataatagctagagcctagagtatgtaaccctaaggttagatggtaataccaaatctacctaaatttttgttattttcggtttttcatgagatatatagactgtgtaatttaaaatctcaaaatttggtttcactttatgtttttttttttcttttttcgaggtaggtatacaagcatggaccttttgacattatttaaaattttcataatttagaatcttcatgttaaacgtgtatggctacgatcttcgaaactttattcggtttgtatgctcaaaggccaacgccatttattttctaattgatttttcccgttacggaaacaatctttttgcattattgaacttaattaccaaagtttatgaaaagaaacaataaagtctaaattggcctattttgatatactgatcacttacgcgaaaacgtctacattgttatctactagactagtcattaactcgaagatagaatttcatttcttgaccaaaaaaaaactcaaaagatagttataatcacagattcattattgacttttgcttttaacactgtagccatttatgtactatttatacaaatacctaacttttcaaatatgtgacctttttccccctacattttagcctataggttggatcattttgtcatattgcatcactgtttactagtaccaaacttaaatatcacacgagcagtaaatttgctatcaattttttcgttttcacaaacatatatctagtttccctaaccaataattaagttaaattgcattaggaatttaggatttataataaatagatatataacccactaacgacaaaagactatgtcttgctacgtctctgcctttattatcatgccacaagaaaataagaggggaacagagggagaaccccataaataaataaatttagagaaatatctaagtttggttcttccctgtgtctacccaccgtgatcatcataaaatggattgtgatttctgatttgtgagtctatctttctctactccattagcttcctctcccttggatggttacgtcactttctccgagcttacgtcatctatatccggtaatcaattctttttccttccattcctcagcagcattgcgtaatctatctggtgtgtgtg

SEQ ID NO: 29455 - DNA, 1675 bp, Arabidopsis thaliana landsberg
aaagtgaggacccctgaagaagatgaagatgaatgatgattgttgttgttatgaaagtgggtgagagagacagaggagagcttcgttgtggatgccaatggagcttcaaacagaaaataagttgacctttaaaaataccaaaattctatataataatgataatcaaagaccataatataattacgcttagattattatatagatgactccgtattttgaactttttgaattttagacgtataagaaatgtttttctgtaagtttgaaaactcctttttctgtttccaaatcacatttttttttatcgaaatctcactgcttttatggggttaatggaggacgaataattattttgttactcacgcatgcccgattattctgtgttctgcaattattttttcgtttaatactgaaagtaatctcttttttttttcgaggcagaggcatgtactttccatacaaaaagtaaaagcaaactactttcttcagaaatttagactacgtgaggctctgattataaaatctgattggaaaaaaacactaaatgaacagctttactctttaagtagaatcacatgacacatgttacttaattggtgatatttaaatttaaacagaaattaatatctagtgttatccaattaacgattttgaaaaacaaacaaaccaacaaaaaaatatgtatttcaaaactaaatctatatcaaccttaaccttcgacacatcatcttcacttttaattaatttgtatgaattatcaaaataaaaataaaaattaatgtgccagcaataaaataatcagagaacatatatgtaataagattacatatgaaggaagttagagagttaagaccaagcttcaacattgtacctccctgtcttctccaaagccttaagccaccgtgaagctacctcctttgatcctcctcctgtctcctccgacacaatatcttcgaaagccgacatcacatcacaaggcattttcgtcgacgagcccgccacgtaaacagcggctccatcacagagtaaatcccaaactctcttgctcatttcgcggatcttatgttgcacgtaaaccttctttggttggtctctagagaacgctgtgtaaaagccaccgccttttccttcagagagcatgcctccttctcttgcgtgagactcccagaaatcgcggtatagaaagtctgtgtctttgtttctgcaaccaaagaagaacatgacgggggcaaccgggctagactgagcttgtacggctctctcagctatgaacccacggaatggcgcacatccggttccgggtcccactaagatgagcggaagcgactgagatggagcaggaagggagcctttgtgaaaccaaaccggtatgtttacctctaaccacaaccgaaaacaaagaaaacatatcagaaatagagaactgagccattcacagttatggtaaagaagaaacaaacttctaaccttgttcaggtgcgaggcttgcaagccaagaggagcacagacctttccgagttctcttataaggcgtgatccatgatactatgcttacagtcaaatgtactgcggcagggtgggccaaaggaaacgaacccatccaaaaagctcttggttttagcggtgaaactaactgtactagccaatcaacagggatttgtacggaaggagggtc

SEQ ID NO: 29456 - DNA, 1790 bp, Arabidopsis thaliana landsberg
  unsure (1)..(1790): unsure at all n locations
tctgctccttttaaataccaaacactttttcttgcctagctagaaattaatgtgatagagagcgaaagaattaggtaaacacaaatccccaaaaccaattcatccacaaaccccaaaaaagtctcataatcctctttctttctttttgtttgtgttttgtgttggggaagtagaaaaaaatggctggattgttctatctaggagggagagatcacaacaaacaagatcattatcaagaaaaggatcataatgaagacaagagcaacaattatctctatctatacaaagacgagatctacaacaacaacaagggttttgagattttccctccttaatattttcaacaacaacagcaacaaaatcatgcggctgctccaacaaatctctactctttnggtatggncctcagtggtggtaacataaacaataaccgcagtactaatcggagtttgtacttcaacgtcgtctccgatcatgagccggtgagatcctcaacgggagggtttacggtaacgagacaagggaacatgaattgccaagactgtgggaatcaagccaagaaagattgtcctcatatgagatgtcgtacttgttgtaagagccgagggtttgattgccaaacacacgtgaagagcacgtgggtctcggctgctaaacgccgtgagagacaggctcagttagctgttttgccagctaagcgtataagagacgctaactcaaggggtggtggggatgacgatgatgatgacaaagaggacgagaaaaatgacagttgtggtggtggctcggctcttgcttgcacccgtgtggttaatgctagttcttcaggtatgacgatgagttttcaattaattaacatagagaaaaaatttcaacaaatctagaaaggatttaaaaacaaatttatgtgaagatctggttatgaatgttttgtcaagaaagcaacaatatgatttgattgtgaatatatgtccaccggattttgctcctttctttttgctgtttgattttgattgtgaataaatgtccaacaaaatgattttagtcactgttctatggtaaacctgacgacacaaagggtttagtcgatttttattcaatatatgatgtaaaaaataaacaatggttaattatgtcatgtgtttcaaagattttgattattggattcacgaaccaaaacgtttttgaattttatagtaattctttggttttatgaaattagggttagagactagtcacttaccaccggagataagttccccggctgttttccggtgtatgagagtcagctcaatcgacgatgaagacgaagagtatgcttatcaaacggctgtgagcattggaggacacgtgttcaaaggtattctctacgaccaaggtccatcgtcagatcaccaccgttacagctcaagcctcaatggcgaaacctctcatcaacaccatcttaacctcatggactcaactccttcagccgcaactacaaacgccgtgaccgccgttaacactaacaacggatctattgacccttcttccctttacactgcggtggcaactccgttcaacgcctttgtcgccggtggtacgcctttctttgcatctcctaggtcttgagattaaaacatctgaagatgttaaatcttttaaattacgtttgtgattaattataactactcttataactaccagagatctatctacgagtacgagagataatttatttgagtattttatattgttgtcggacaatatggtgactgttcgtacctagctagggtttgtgtctgataaca

SEQ ID NO: 29457 - DNA, 2634 bp, Arabidopsis thaliana landsberg
cctttttactggattatccggttatataccctgtttagcgcatggcttcggctttctagaggcggttattgagatctttccacgggattgaaacttcctctacgcgaccggccacgtgacctcgggtcgagagacactaaccctacaaaatcgaaccacaagtggacacgtcgcaagcacttccagcataaccgcctctataattgccacgtaaacattgaataaccacgtaatcatcgaataaccacgtatcttacaataccgcttatctagtgaaagaaaggaatgtgatctctccctctctcgctcatctataactagaaacttcctccatgaagattggaaccaagaaacaaaacaaaaaatcggaattttaaagaataggaataatggagagaagaacgttgatgatgattatgatgcttacgacggtggtgacgctgacgtggcagaagcaatgctatggatggggaacggagacagcagaggatatggttagaaacgaagcagagcatgctaaaaacgcagccgagaccgctaagaaaatggcgtccgatgcggctcatgacacaaaggacaaaaccgcctcttgggctggttgggtttcgacaaaatttccacgtaagcgttaacttttgtttaggcatgatcatacttctattttggatctgtgttggtttcttctaatggaaccattttctcatagtgtttgatttcaaattgtaaacgtagatctgagttttgttttaagagaaatttgaaatgtatatataaacgcatgttacgcatcatttgcatttcaaactgtgaagtgatttaagaatgataatatatagatgattgatccaatattgtaacagaggattgggaggcaagaaagctgaggcagaagaagcggctgaatctgcgaagaactacgcttatgacaaggctggatccgcctatgacaatgcgggttacgccaaggactttgcatcagacaaagccggatctgcttacgatagtgctcataacgcaaaacattatgcttatgataaggctggtgatgcaaaagacatggcctacgataagaccggtcaagccaaggacatggcttacgacaaagcaggatcagcctacgaaaaggccggtcaagccaaggacatggcctacgacaaggcgggtcaagctaaagacatggcctacgacaaggtgggcatcagcctacgacaagacaggtcaagccaaggacatggcctacgacaaagcaggatcagcatctgagaagcatggtcaagccaaagactttgcctatgacagggcatggtcacgcaaaagacgctgcctataacaaagcagaggatgtgattaagatggctacggatacgagtggtgaagctaaagatagtgcgtatggaacatacgaaagattcaaagaaggatctaagaatgctaaagacattgcatcggataaagctcacgatgttagagaaaccgcagggcgagcggtggactatgctaaagacaaagcaaatgatgcatacgaatcggggagcgaagcagccggaagattcgacgaggcaatgcataaggttggggagaggtatggtgcagctaaggattctatgtcggagaacacaaaagaagcttatgagagtgcaaaggagaaggcttctgatgctgctggtgagtacggttcatatatgagagaccgtagcgctgagctttagaactgaaaaaattataacgtatagccgtatagggtaagtttgcatttagatttcaaatcttcgtttgtacaataaatttcttatatatatgtgtatatcagcagtatatgtatatgtaagaatggtggagttgcttgtattagttgcaaaatcagattctcaatgaaaggcgagttgtttctttactctcgatctatcaacatggtagatcatcttcttttgtgttctgtttttgttttcttatcttttggttaacaagatcggaagaaaaggttaattgttttgtgccgagggagtgaaacagagagcattgttgcgaaacagagaaactgagtttttgcgttacttattgatttaatgttgaagacattgacataaagtacggaataattaagctaatacgtaaagagtgtgtatgcaataatgctcataatcaaataatctcataaagattaatattacatattgtgatcatagtaaatgacaaaaagacaaatcaagtaaaaacaacccaataattattcaatctcgacacaaatgatccatacatacagtatatcaggatcaaatagaacttaatgtagcattttaattttatcttccgagtgaatagatgcaagaaactttttgagacgcctattgtaaacacaaggtgtttccaattgtaccaaatggcctgccttctttatactctctattggtgcgttctcacctatttgtctaaaaatcataacggcaaaaattaggataacaccaaaaaatccttctaaaatggcaaaaattatacaatcataatattgtgaaacttactctttcatgtctctagccaattcgagatcaaagattcgatcactttcaccccacaggaaatgaatgttcttgatacacacttgaaatgctattatagagagtgtaaatcctacaa

SEQ ID NO: 29458 - DNA, 4784 bp, Arabidopsis thaliana landsberg
aagacaccacagggtcccagaacgaaagaggcaatgaaaaggacgagcacagtgttattgaaaaaccagagttttgcaaaatttagctgttggaacttgtcgtcgggtcccatttctatcctctttatagttgttttactcaattcagttccacagttttgcactgaaattttaaaagaaaacaatgcaacaataacaagtattcgatttttcttgattttaagcatgtatataaaccttatcaataagaaatagtctgatactaattgagaactccaatccgtaatatttagtataataccgaatctccgattaagaaataaacaagtaacgactatatatattaacatatgattaaagttgtagcagccttgttatattcttcgatcttttaaaatttaaagctgagatttagcaatggtggggttagcgtgaagcatcattaggagtgttaatggggtcacactcacacctatgtttttgactttttttaattacctttcgtacttttgttttgttttctatctttaaccttcaacggcacaattcttgtaatgagactagttctttttgtgtctgtttgtaaaaatatctctaaatctgtgacaatgaatcaaacgcatatgctacacagccaaacaatcgcagtgtgctgtgtaaagtcaacattatttgtatccgttctcacttgtcaaatcttggttagtgaccaaaccttattgaataattaaaagttctgaatataattcacaataaacaagtattacttaccattcaactaaccacacttattcacaatttcatttcatcaaatttaacatatgtaagaatagtaacccaaccaaactgaaccaaaagaattttggtcagatttgaactatatccaaaattgcaaggtaaatagctgaatgtatccacgattcatcacaacatccatagctccctaaacaaggtattgacttctacctaaacaatccataaacaaggaccagagaggtgatcaatagtagaaccgattcagatgtgatcactagcttagtttctagctttctaagatgttattaagttcctcgaaatggcgcaagaaagttgctgtttcaacctcaaaagagttagcaatgtaaatcaatcctaaagatagatgttcaccttaagaagacataacaaagtttaatggattcgttcttcaaagaaaacacaagaagataaggcaaagacaactcactcgtcaacaaatctacaaactttgaaagctaagatagatgagagattgcggctaaagtcaatgaaaggtaacatgatagcacgatactgtaaacctgaggaagttcaatcaaacaacttaaaaagccttcacaatctcaagaaaatagcgacaaaaacagtaaaaagccgagacaagagtcctgttcattcactgctaacctaatcactgctgctgattatgtggtggcatgccaggacgcggtggagcaaaaccaccaggagcaggaggcattccagggcgaggcggaggcggtccttgcattccatgaggtggaggaggaggtcctctcatcataccaccaggaggaggtatcattggcctttgcccatactgaggcggtggtggtccagaaaactgctgtggtggtggcctcataccataaggcggtggaggacctcgtcccataggaggaccttgaccaccaaaaggaggcggtggcaacatctgtcccggaggtcgaataatcggaggagctgaaagctgaggtggacgagagatctgaggctgcatcattccaggagcaggtccaccaacaccacgaaccggaccagataatccaggctgagcttgaactaacggaccagtaggaactccacgcccagcggcacgaccaattcctggaccagcaacagcagctgcagagccagctttagcacgagattcttcaggaggaggtggtccttcgacagtcattgagatcacttcttcacctcttagcaacactaagccaagcgtacggcgatcttcacgttcctcgttgatcttcttccctttcgctggtggaagcttacgaaactcctcgcaatcgccgagaacgaggttcatgtgacggtcgaacgccatgaacttcccaacgagctgtcttccgtcttggatcgtcactcgcatcctgtagttgatgaactgaagcatctttgaactcttcgacatcgacattcttgccgattgaacagtaacactcgctacaagcagagattcggcggcgaaatcgagtacgccggaggatcaaaatcgagcttagggtttcaaaaaactaaatcgagaggccaaaattgggggtttttggctgtgcaaatcgggaagtgggaaatttctagggtttataaatgaatacactcttgtttatgggcttactttcattatgggcccaaaaatattggacttgggctgcaattagttgaataggctacaatatttgttagtttgaggctccaagtttcactaagcttattttatggagcaaatcagcaaatgtcaaagtttaatcgggaacaaatgtgtaaagttcaacaagattaaaacaaatctgatacattgaataaggaaatattttgttattcaaaacacacgtgtattcctgaacttggcatgaactagcgtgcatcaggaatatgttcaggaccaaagcttgtgctctgttcaagagaactcttggagtccacgtcatgtctccctcctttccttgagttctcagttaagagacactcttgtagttcattagcaacctgggacatatttggtcttccggatgaagatggactgacgcatgacattgctaactcaagagccttccacaatgaactagagtcataatcaccgttcatacttggatccacaatatttttgatatctccattggttaacttaaatcccacccattctcctatgtgagacttctcacgagtttggtcaatcactggctgacttgtgatgatttccagtaatacgactccaaaactgaagacatcactcttctctgtcaaccagtttgttcggtaatatctataatacgaatgaataaaaaatttaccagatggaaagagaaagacacaacttaagttcattaagtattgttatagaccacttactcagggtcaagataacctggagatccagcaacatttgttgacacatgagtttcacttcccaccggaaaagatcttgaaagcccgaaatcaccaagcttggcctggaaattattatcaagaagtatattcatagatttgatatctctatgaatcattggtggtttgcagccgatgtgtaagtactccagtcctatataatacaacttataaaatttttatttcaaaactcaacaagagaagtgaacatctcaaaaaaattgcaatgttatctttttttcagaaacttcaaacgaaccttgtgctgtctctgcagcaattcttagcctattttcccaactcaaagggggcctagaattttctcctgtactcataaagatgtgtgtatgttattagatgacacacgatcattgtgtttataaacaaattaggtaatcaaggttaccagatagatgttgttttaagtttccattggacatgtactcgtagatgaggaccaagtgttgtccttcgtcacaataaccaacaagagttactaaatttatgtggtgtactctgagaagaaggtctacctagcaaaccacaagtaacccaaaagttggtaaatcatatatatacattttatttgaatatatgaataattaaacttaatgatagtgaaggtacctcagctttaaattgcttatatccttgagctgaggattcagagagcacctttacagctacttgttcgttatcatttacattaccgtggtacacgactccaaatcctccttcgccaccaggtctctcaaaattgtttgtaattaccgcaacctcttcataagtatagcttctcttgttcgccaccattgatgagcgtgaagctattatataccatacattatatacttaagtacaagtttgaagttaatgagttttaattagtcctgagcttacctttggatggcttcttctttctaagtaagagaatgttgacgagaagaagcacagctataataattcccacagaagcagctgatgcaagaataggtactagcaatttctttttgttattcccaggaccagtttcactttcgcatgatggatccaaacagaggttatttccattatacagcaacgttattagcccattcttttccatgttgagaaggctttgaggaattgagccgctaagattgttcccactcaagtttctgtgcaatgtatataaaacgttattagatgcatccatttaaagatttaaaaccaaactattcgttttacttctaggggaacttacatgaatgtcaacaacttcattttggcgagaaattcaggcacctttcccgtcaagttgttatttgacaggtccctataacataaataaatcatgattgtcaaacaaagatatcaaaatagtcaaatagatgttccctctataattatatagggagatatgtatatgagacttacaatttctgtagctggttaagatattgtatatcacttgttatggtcccatttaatccaaagttagaaaagtctatgcatatagaccagggcacatttaaatccccattccaaagaaagaaaaaaagaattgatttaaacaaaaaaacttgagtagtgtaatgatcttacatggaagtgattcttggtggaataggcgg

SEQ ID NO: 29459 - DNA, 1920 bp, Arabidopsis thaliana landsberg
  unsure (1)..(1920): unsure at all n locations
tgaaaataatcacagatgacttcatgcccctgtaagccgcaacgcctcagcgaataactccttgagagaagcgtttgaagccgcgatcctctgcgatgttatgtccaaatctttaccggatctgatgaacaaagacgacataaaacagttagttataatcagttggacggtttgagagtgagtgtgtttggtttaatctcaaactcttacggatcaaagatgagtccaccagcttctttcacgatcacaattcctgctgcaatgtccctgtgaaagatttgatattattatgccatcatcaggatctaattttgtttgtacaagaaagaaatcccctttttaaatccaagcaaggaaaaaaaaaagaagacaatttaccatggaccaccgaaaccgagctcgtagaagatatcaacccttccacacgcaacgccacagaggtccagtgcacacgaaccactcatcctaagggacctgacctgatgaatgaaggacacaacaatcatgagttttggcagagactagaaccaaattggtggagttccaaatatctatcgataaacttttaccttggttagcaaactgttgattctgttggttgtatcgtctaatgtagctttatctcgtttagtacccgcctatattcaattggtcacataagcgatgagaggaggcttcatagcaatctagttttagtagtctaacacaaaggagccagatttttacctctgtcacgagcaaagcggttaaaagttcgctttgagctgacactgcaaaaagaacattgtttgagttgaaaagaaggaagagaactcaagtctctgaacaagtgatagctatactccggatgccataaaaagagatcaagaaattttttattaggtctctagaacaagtgctaacctttgattcgctttccattcaagaatgctcctttcccttggacaccggtgaatagctgtttgatcattagatattatgtaagaattgagaaaaatcttgaaacatgcatgtacagagcaccatcaaggaaactatgtataatggtaagttgtaacgatcgaagaaacttgaaacaatggaatacacaatcttttacctcttccataataggattataaacaactccaacaacagggacttttccaatcgtaagtccaatggaaacacacacgaaagggaacctacaaaaaaaaaacagcatttgtttttgtttttgatgaaatgggcaaatcaaacacacaggtcattcaaatgggaattgaaaaataatgaaaatacccgtgaacgaaattggttgttccatcaagaggatcaacaatccaagttggttcgtcagttagttctgtcacaccaaatgcagctgtagtttcttctccaatgaactaataaattatagcaaaactctaatgatcaacgcgaggaagaagccaacaaaatgggaattcaaaagaagaaataatcaccaccttgtgattgggaaagagctgcttgagatgattaaacacaagttcttcacatcctttatcagtctctgtcaccaaatccacctaaaagcaacaatttaaggagccatagaagataatttcaaaaaaaaaattgacactcttaagtagccattcccacttattgagtgattgaaacattatctgagcggaggaaagaaacaaaacctggcctttgtgttcaacatgtttagtctcgtaaaaccctttacgaatgatctgcagaacgcaaaccaaaaggagccagattaaataacgattagccaaaatatcgatcaaaactcaaggagatcgaaagatagacctgtccagctnttttagcggcatcaatggcggcagccaanaactgatctagagaatctgcgtcaaatcaatgtcgcccgaaagaaatgaggaaccagggaatcaaaagaga

SEQ ID NO: 29460 - DNA, 1909 bp, Arabidopsis thaliana landsberg
aagaaaaattaaaagaaaactgttgaaatagtatatgtttgtacgttataaaaaccgatcaagaataaagatgacggttgtccaaaaaaaaaaggaccaagatgctgaaatcacaattcatgtactgataactaacacttcacagggacgcggttaaccgagtgctttgatatcttgtagttgtagataatgtcttgtttttctatatcattctctccaatttacttaaatgcatattgggcatgtgatcaagatgattagttgctcttttgttttcttctgtataggtctcgttccaatttcatcggatgttccgatggaacgattaattactcttctattgatgtttatatcggctatttggactaacaacctattttatggcaaatttaaaaacataagagagttgctatatcaacactaaccttagttgactcacatatctttttctagttcgcattattagtctccctacataaccaacaatctacaatgagaatatcaacgcgatattgatgtgtcaaccttatatttcattaacacacaaaaaacattttcttgattgccatttgttcgaaaacatatatttcttcatatatgtgtatttaagattggttggttcgaccttcaaaataatgtagtcatgaaatcgtcttagttttacgtttacttacattattttgtttctaatactctagatggtttacctaatgtctacacaaaacatttttttataattacattcagactacaagagagtattatattgtagtgtattttacatgaatttttatataatgtattcgatcaaaatttcggtttactagctaaacaaaaacaaacgaggcggtgttacttatcggaatatgctgtataatggattatatttaatcagagataaagtaaacatcttcagtattctcatgtaaaaatacaaaaaaaaaatcctcaattagtttcactagaatcactcatagtctttgtatggctgaataacgtatttaaaaccatgagaatccaattgttattgcggattttaataaatagaaccgaatctggaatcatcatgacttgagaatattcaagaagatctggaagaggtttagagtaacaagaaaaatactgcatgtaaagataagctaatagattagattgtgaagaacgcaaaggataaagggaagaatcccctctattcaagtgaagtaccttcctacaatcatcaaagcaacatacccccaattaaccaatgcatacacatgtatgagctatactcttctttcttttaaaaatatttattccacttttcatgttttcttagcttagcaagagagagattctgctcttgaatcttgatgggtcaaagaaggactctctaaaaaggaaaggtcaaagaactaataatactccccataaatttgatcttgaactagtgaaaagaaacaaaggaaaagctattggacccacctcttaaatcattatacctaatagtaataccacatgataacttttttttgttctctatcgccaaattataatgatatggtacacatatatatttccatggataatcacggggttttatagttcatcgaaatagatatgttatttgtatatatgctggcaaaacaaaacatgcaattgagtttcaaaaatataacaaatcagggtcagtcaatagctgattatttttgcattccaatacttcatcgttttgtagtattatgtagctgattatgtagtcatcatacctgaaaaaaaatcccttgaaatgcatatatgaaaagttattggttataacattgcattaacagtaacataatttagatataaaatactattatatatatatatatgggattgggaaatcattgagcacatttattaattaacctataaaaaatggggataa

SEQ ID NO: 29461 - DNA, 2626 bp, Arabidopsis thaliana landsberg
  unsure (1)..(2626): unsure at all n locations
gccctttctctgcctctctctctgcttctttgaatctcttctttcccaagtacacttgactcaacaacacatgtggctctcccacaaatgggttcttctcaatacaacccaacaatctctcctctgctctctccaagtacccttctttgcttgtgtcactgctcacaacttcccagtacatctcccttgcttctatctgctcttttgcatccaatacctggtccattacatatgaagctatcaagacactatagttacctaccactaccaataagtgtgaaagctactaaattaaagaagatacaatcctagacaccggaacaccaatgatcatgacatgagacagaaccaatttagctaactaagaataccttggtgcagaagctgaaaactggaggcacgacaagatctatatcctcatctctttccttcctcacttcaaacccagaaccaaaagcccttctcctctcttccatcaaaatctcctcttctctcacaatcgtactataaatcgctcccattctcgaattagaattcatccacagtccaggcttcccattcccaggccacaacgcagtcacgttgttccctctaaacatcaagtctcccatcatgattacagaacaactcatcttggaacccaaaaagctgatcactaaaatccgccattgtcattaacaagaaaacaccaacaactctcctcgaaacaacgatttcttcacctgtcttgatatgcttcacaacaacaccgttctcaggaaccaaagcattaatcttcttcctccactcttcatctccatcaaaaatccctttctcctttgcgttcctcaacgaaacctcagaacaatcaagatgctcaacgagctcacaatcagagtacttaaacaaaagctcatcgtgaatcagagtttgtctcggtacaacgcagaagagatggatcaacgactcggcagcttcaccgacgtgatcacggacgacgtcacgaccagtggaaggatcgaaaatagctaaattgacataggaattggagtaagcagagtggaatagaccacagagacagacggattcaggagctttccatagcttgaggatcttgtagatatcgattaagtgatctaggaagcttccgtgtttgtgccaacactcgccggcaccgacgcttttgaggacggcgattaacgacgggagtttggggtcgatcttttcaagctctcctcggagaaaaggtcgggctgattccagtacggcgtcgttcggggatggagatgatgatgaacccattttgtctctattactctctttcggttgatgannnnnnnnnnnnnnnnnnnnaggattaaacctttttattagcattaaaaaaaaaaaaaaaagacttaaacaatgactcttttaaaaaaaccattgaccaggaccaccaggttaatattttatgatttccctctattagatgaccaagcaacattgatgttcatcggcaaacagaacaagaactgaactcccccacttctcatagtgtttcactgttttgtaataaaaagagttactattaattttaaatcatacaagcatgcaactcactgagcaactcataggagtgtagttatatagtgaagattaattaactgaaaattacaaactaaaaattgcaattctttttaccacattcatgactgcatataataactttttttttttattgtaaggactacccctctctccattacttgagacaacaatctgtatcatagatctgaaaggcaacacaccaaaagccgaatgaaatgattgaatagctcgagaccgacaggtattcatttattgttgcgatactgtcccatttgtaacgatgtttgattattttagaattaatgtcatcttcacaacaacaacaacaaaaacagaggaaacagtacaagtgaacaatgaaaaaaataacattacagaagaaagattgggggaaagaaaagagagcagagaatcaaaatgactaagactattaccaaagtgtttgacttgtaactttcacaagggaaatgtaacctaaaggacaaaaataatgatagtaagcgaaacccatcagtagataatatatataatcatatattaaccttttccacattgaactgaacatattgccaatggcagcaatggcttcatcatcacagcaaatataataagtgtgattcttcataggaaatacggaactccagtccttggccctctcatttgattgttctcttctgtctctgtgaagaacttcacttccctttcctggtaatacaaacatttcaatcgatttcatcactaacccatgcaggaaggaggatcctagtagcacagacagcttgaatctatggtcaatgaaaatccactacaaatgcagaaacagaatctatggctcacacagatattcaaacctcattgcacatggcttacttgatttaaattctctaaattactttctataatcttcctagatccattaattcaaagaggcacatagcaaatcaacaagagtgtacatattttgatagagtagaatcttaaaagaaatgattaaaatcactgaagtaatagaatcccttcttgctgacagagaagattagagtattcatttaggaaa

SEQ ID NO: 29462 - DNA, 2860 bp, Arabidopsis thaliana landsberg
tgggacatcattgaatagtcttagttcagttactatgcggtggcttaatttccagttcttattctcgctctttttgtatttttgcatgggggcggcgctatggcatcagctatcaacacactaagtatcacaaacgtaagctcaactttcaatagcgaacccttatgctactgcaaccagcttttatttttcttctatttgatttacctttctgtttctgaaagtaccttgagccatccacttttacaatgaatacctagcaagtggagaagcatccccttgtgaccttttctagttgtccagctttttgcataatctcctcctcgtctttactcaaaattaatgctagtatctgttaaggataagctcaagtatggtatggcttgaaatttttagtgcatttgctttaattactcttattttttctttctctcagaaactaagaaccaatgggcacgtgatgaccctgcgtttattgtgatctgtagcctgcttcttgttgttgcaactgtagcctattgtgtcacgtaagtgttttgtatatttgaaggtttagagtatgagagataataattgccttggaaaacgatttcgttttctgattttcgttgattatgtctatacttcaggtatgaccatagtagctctcatgccgttgtcgtagtcgtttcagttttgctcacccatttcttaatcaccggagcagttatagctacatgctgttggtaagtaatttctattattgcataggcatatacatttgttggtgcaaactcttatgcaacttaaatgttatgcttgctcgatgtctgttattctcattcgtgctataaagactgttactacctttactactggagttgcttatctgatcttattattcttgttttgcttattatatcatgcaagacaagcactcttaagatttggtactgaaacccgtcttgtgaacattgctggttttgtgaataccactcttgcacaaacctgaatcctgctctatagttttcttccttgtaattctaccacagtttgagtcgtttcttatatcaaatctacacggtttctctgacgcaagatatggattatcaggtttttgacaaattcttaccttcgcgagcacacccccaacagtcatgtggtggaacaacgcgttgaatggtaagtttatggactgaatcttatcttttcaccttcacctcctttctttggttgattttttcctctagaagatgagttagaacctccaaaacagaaagtttcgtgtttgtagttcagtatccttaccatagtttctctttttttataatctctatctgtgtgagatgttcatgaattttcttttatgcctttctctgtaggctgtatacatttgatgttcactgcaactcgttctttccaatgtttgtgctgctctacggtaaacccagtttcaaatacattattcaattctccaacccctcctgaagttaagatctctgcaaaaagagatatattacttacagtttcatcttgtattttgcagtcgtacattacttcttatcaccgctcctgatagcacacggattcatccctttactgctatcgaatctgcttttcatggtcggggcttcgtactaccattatcttaacttcctaggatatgacggtgagtcccctaagatcacttgtttccttctttcactattgatccgttgtataactcttgaactaacaagaaagtttgttatgaatccatacagtgcttccatttttggagcgaacaacattcttcctctacccaatcggagttgtcattgtcctgtcccctattcgtaagctcaatcagaatcattggtttcacagatatcttcttcctgaaaaggcgtatacatcatcttatgtttattctccatttttgcagttatcttaagcggattcaacccgtcaagatatttcatgaacatgtacttcagccaaaggttataaaaaaaacagccacatcagtggaatccttagggcttttgcactgcacatacatcattaaagtaaggaacaagaagattgagagagtaatgattttcccttttttacccgtaacagatcatcgtaatgctcagtttctggtacaacttcaaaaggctacttaatagaccagtaacattttctaaacatgacccctcttagcaagtgctctgttaaatgtagtgtttttttggcatctttcttttgcggtcattcatacgttacgtgttgcgactgtcattgagtcataagtacaaaatcatgatctcgcagattctggaaagttgtactaaaggaaggaccggtcagatatttgatctgatgatcatctctctaaggttaatggcttatgttatctttggatacaaaatttgtatccaactgctcactctttttcatcttaaagatcaaaaagttgtttttgattgctatcaattttgcatctaaacgctgctgcatccaaccagattaacttatccacacaaacaatatctggtttaacaacatgtaaacgtaataataacagaaggtgtctgtcttgtaatttatctaacctcatcgacgaccaatctatttcacttgagttactggattgttctatctgttcatgtctagattggtgctaagtagctctttcaagcagaaaatttagttcaataaggaaaatatttacaatcagatgtgtacatatatctgtggaagataaatatgtgcaaagcagaacagagtatttagtattttaccaactactagacttaacctttgctctgaaaaattgaatcatgtgcttatacacatcttctttagcacttgagccaagtacgaagtcaatgtgaccataatcctcaagatatag

SEQ ID NO: 29463 - DNA, 2500 bp, Arabidopsis thaliana landsberg
ccctaagcgcatcgaaaaccgcaaccgacggtccaaccccgtggatagacgcgcatccaatgtaatcttgcaccccaagagaagccaattcaggctctggagactcgtcgataacaggatcttcaaatatggagatgaaagcggttctcagagacgaggaaggcgtgagattaggattctctatggccttgcacattaagaaattgagatctgacatatcagtgaactgcttgttcgagttcttggaggatgtgaacgagtcgtagcatcttttggctaggtcccagagcttttcttctccggttaaatcgtgtgtatgaaggatccctgcatggtagaaacctggaaacaaaataagaaatatatcaagttcaaatcatatgatcaatactacaacatccaaatcaaattgcatttgtccattgttagtgtaacgagtttgaaaatgtctagtaagaactacaaaaatgcagtcttgaaccgtatcatcactagctcataaaaaatttgttgcaatcatgagaagataatctatgaacatctattcctcatatatatcatcaaaggctatagtaatcccaaattttcgagcttaccaaagtcatttgaagtaagaggaggttcaagaatggaacgacaatccgaaagagtcaccacggcgtatttctctccttggtatggcggtagattcttcgaggaatacgcagcgattaacgccgaggacgctaatgccgcccataactttaaccctcttgccttgcatccctacaaatagtgattgaattgctccaacttttcagaaacaatctaaagcttttttagcacaaaccatcatcctcttagtcctttttgagttacaaactaaatgtagagcccttcaatgtatgcatatgtaattgcaacaatgagtatttgtagactatggattactcaaaattatgtacataacaataaaataaaagtaactattattttattttttacgtaatcctcgtgagatatttattttatattcatacacgcaaaaatggtaacaaatactaatacgctatggttaacacgtaagaatagtaattaacacataattaattaatcgaatggtgtggagagtaacttacagccacaagtttgagagtctgatctctatccaatttgagcctcaccagttgcgatctccggttcgaattctctgcgtccacgaaattcaaattcgaaaaccgaaacgcgttcaacgagtaaccaagcacgtcgatgccacgcgcccagaacggtttatcccctttcccactcggaatcagctcctctatcgccttacttaatcccaccgccgtctccgtcgccgccaccacgggaccgtttccgaaaccatcagccgccgtctctttcataaactctctcagaagcgtaaccgccgcagtacgatcgaccgccgccgtgttcagccgaaatgtgagtatccgttgctctccgtcgtcggttagatcgtagagactgacgataaacacgcgtgactcggatttgatccaacggtgtggattgatccacgtgtttttgttcatctcgtgttctaggatgattctgtgtggatcagcgcatggatcgtcgctgtctcggatgatctgagccgtagatacggaatcgaagggatggatttcgacgtgagaatcggcggcggacgtaacgacgaaggagaaggagttagcggatgcgtcgaaacggatgttggaacggagagtgggatggtaaatctggagtttgtcgagggtattttggagattttggagttttggtgttcgggaaagtaagagagctatgacggcgatacctgtgccgccgtcaatcgctctgcaccagctgtactcggttcctccgacgggtcgggtcatggatttgggtacccgatttggctcactcattatccttgagaaagaagagagattgttttcacttttttgggattttaagattttacttgtatcatatattgtcaggtgggtaaatatggggaagatacagtgacgtaccttttactcggttaagtgtaatttttccggtttatcaaccaaatagaaatgattttgcatttacgaatttagcgtctttaattttacgtagctcacgttaggcaatactatataaacctctccctataatttaaggtcaattaattggattttttttttggttttttggaaaaggtttaagtggaactatttgttttactcatgcatactcactcagcttgcaacatactgtatatggaatctacattaataaagataaaacacacgagatgctctttaagaaacaacagtttgaacgatatgattctatagatacccttgaagagtgtcaagtaatatctcttattcatatagatggtttggattttacactatagatagctctttaatcactagcagctagcgactctattgtcaaagaatccgattcagaaggcagaattttggttgacaagagatagattagcatcagtcaa

SEQ ID NO: 29464 - DNA, 1774 bp, Arabidopsis thaliana landsberg
tttcttcttcttgttctcctacttaactctttttacaagtatttaaagacaatttacaaaattataaatgataaagcaggttcttgaggaagaatcagagtgtgctttttgtatcgacatacaaagcagtggaagaaatggagaagaaagaaggttaggaagttgtgcctaatgacgtgttcttgtaagtatgtgcagcgaatcttctctttgtagtattttgtaacgagacctaagaccatccttattgatggtctcttaacataactcttatgttaagagatatgtcttataattaacaaaagtgacttaaagtctcttatataagaaattttgttagttataaaacatgtctcttagcataagaattgttttaagagatcatcaataatgatgctctaagaactattatactatgttccgtctcgattttgaaagtacttaaacgtcgttatcgtgtttgtctcggcgttttaaattccactgtattagtaagaatttatttttaaattaactttagtcatttttaattatctcttctcccttttcaattattaatgatcatagtaacttctcttgatttgtaaatatgctacatagttgatcttttgaatatacgaatgaaaacatattataatagtatgtattcaaaatcttttgagttttatgagtacagaactatatgtttaatgggcagattagtatataaaattaccagtgcatcagaaggaataatgatctactcgagtagtatatcaaaataatactattcaaatgtataccaacgacaatgagttcaaaatcatcaaaccccatgggatgatgagcaaataatatttttatcagctactctatacatcatttgatgataatatgcaaaaattgtataccaatgagttcaaaattatcaaaccacatgggatgagaaaaaagcatattactatttttaaacagcttctccaatataaatttatttgaccgttacggaaaggaagagagagagatacacactctttttcttttattattttccgtttatttgacttttcttctttatagatcgacctggtcccacgtaatcttttcaaacttaccgtttggattcgataatcaccgtccgatctcacatgaagcaacgtgaataaaatgaacggtttagatctatcgaccgtttatagcaatacctttctcctttataatctctatatctctctctctctgaatttcgaaaattataatgctcttctgcttcgtactagctgcttcagcttcttcttcttcttcttccttagattcaaaatctctcttcttctgagtttctgattttcaagtttgagaactactcttttccttctaaatctttgatttttttctctcgtgatttttgtggttcactgctaattgtgaaccaaagatggtgaaatcagcagcttctcagtcaccatctccggtgactataacggtgacaccatgtaaaggatccggcgacagaagcttaggattgacgagtcctatcccacgcgcctccgtcatcaccaaccaaaactctcctctaagctcaagagccacgcgtcgcacttccattagcagcgggaatcggagatctaacggtgatgaaggaagatactgttctatgtctgtggaagatctaacggcggagacgactaattcagagtgcgttctgagctatactgttcatatcccacctacgccggatcatcagacggtgttcgcttcacaggagagtgaagaagacgagatgctaatagggaat

SEQ ID NO: 29465 - DNA, 1495 bp, Arabidopsis thaliana landsberg
ctctccaagatagattgcgtgtactttccttgtgcttcaatcctcagttgcagatgtctttgcacctataaaaattgaatgaaatcatttactatatttatgggatacaaattgattttgtacaagcagttatcatagaatatctataggttaattaattacctctagctgttcatgcaaccttctctgcacttccatttgcatcctgatcaaaccaacctggtgtgagttgctgtaatatatattaaaatgaaagttgagaaaattaacgaaatctgattaaaatattactcattcatgttgcgactcatcatgccagaagaagaagctacgttgcgctgaatatccatggcagaagctacacgtacggtaaaaaaaattagaagaagacggttcaaagaacatatatatacattaatacatatctatattatgggtaacttttttataaaaaccctaatttgatagagaaaggaagagtggtcacctcttgaaccttcctttgtggagtgatctccgtactccttgtgcggctgctttccaagcctgaatttctgcacccatagatccaaataagttgttagattattatattatattattaagtgaaaaaaagaatagaaaagataaagaggagagaaaattaaaagcaaggaagaaaaaaaccctaatctatatttgtgtacatacctgaagatggctctttaggtggtaaagagtaagacccttcacacccataactctcataatcgtctttggggtcgcttctgcaaatagaaatgatcaaaaactttgaaaaaacacatttataattggttaaatggattgaatatatatttgtgtatgtgtgttcatactgtcggggccgccgagctgagcgacggcgtccacaaaacgctcgtggagttcgacggtccaacgcaaacgcggtttagggtcggtggtgaggacaaggcctgaatcgccttgaacgcacatagctctgttctcatatgaaccattcatacttgaaggtttcttagcatggaacattctctctctctctctctctctgactctctttctctctctgaaagaggggattcaagaaacgaatgtgatgcaaaaatgtgagagaatacgatgcgtttttgaagagatcagatgacggcttttttttctctctctcgtcttttttgttttgtttgtaaataaactatggttcagttaaatatgttttatcgttagcaaggaagagaactaaagtttcatactagtacgcacacgttcctttgtgaaaagatactgtcgctatctttttcatttgtgttttttatcctcttagcttgaatacctttgaatttctttcaatataaaatgtgtgtaaaagccactatacgtatacattaagtaaatcatgtctgtctcagatcattaaattactgcgcaaacttaaaataatagtatatattagatattaaaatggaaatcttggggaaattgaattttgaacatc

SEQ ID NO: 29466 - DNA, 1976 bp, Arabidopsis thaliana landsberg
aaaccaatattctagttactatccaacatcatagatcttatatctccaatccaccccaagaacagagttcataaaattacttatatgtaacttcagacaaaagtatggaatgcatatgtttgattgattacctgtatcactgtttttgatccaacaaaggcctttattttcttccaatcccggtcaaatctgcaatcaaatagacatgatcatatcagaagaagaagaacaaatctcaaagattctatatatcattaatcagataaatgaaggcagagaagtgaaatccgtgtcaacatacagatgaagggcttcaaggaacttgtcgtgttcttgctccgtccagttctctctagatttggtgatagtgtaaggctttctaaccttctttgttggatcctcaaaaaacgacatcgtcctattgctccgtatggaaaccggtatcgttgttgccgtgtggggaagagtattgaaacccggtagactcattttcataggcaaacaatgagcttggctagggtttacagtcaccataaaactcgacaacacacacaaagttcccttttggtttgaaacagagtttgtgacttgagagacttgtgtgagagtggtggtggtataagcgggagagggagacaaggttagaagtgtaatctcattcgaaaaatggatttaagccgaacacgtgtaaggagccggttgctctggttcagagcgtgggactaacaactacaagccatgtggacattctcctaacactcatgccacgtacaaatttaaatccacggcacataaattgccacgtggaatacgatcgtaagccagcaatcttatttacgagatagctgcctagctggggcctggttcgactaaaaatgaaggttactttcttttgtagtttagctcaaattttagttatgtacgatgatgtgttttatgtacgatgatctctaaaacacaaacgcagcatatacaaatacaatacacacacctatttcaaactactaaccaaacacacaatgctttcgagttcatcacgaccagacccagaaaacaacaacaaacgtccctctaagacaagctcatcggatgtttctgcaaaccgagaataaataaaaagaaacaatgattacagatataagttggttgataccaactacacaacacacgacacagtctcgaaacacaaaaattgggtgtctctgtttttcgtctgtgaatcctaaggatgttaaagtaacaaaagtaattaaaagagagaaactcacaaatggagagactctgtttttctttttaatcgatccaacgtgtgataccatcgtctcctaccattgccaatatctccacacgaacgtccaacaccgcctgcaacattcattacacaaattatttctgttttccaagaagtagggtttttcaatttcgggccattttctgtaaggacagagacttacagaggaattcctgcagttaacaagccgacattcgtccagagaaccttctagactccaactctcccacacgtcaaaactatggctagcaaacacaaactccattcttctattgatctgcacacacacacacccatgacacaaccacttttagattccataagagcaacattgagttaccaatggaagtaacactctctaatgtaagagctacctgcagtaacttcccaccagcagcaaatgatctcagaccaacagtgtcctggaaaacaagttcatgcaccaaaaccaatttataatggtctatctggcattgtaagcaagataaatgaaaagtaagagagagaaaaaggcttaccttgtttctgtatgcgataatgaattgtgcagcacgatctggtttggatacattggacaaagtatcgaggaaccagccaccgtttttctgtctttgcctggaaacgtggaggcccgagaggtctttcgcatacaaggctactacatatccatctttcagtagctcac

SEQ ID NO: 29467 - DNA, 2240 bp, Arabidopsis thaliana landsberg
  unsure (1)..(2240): unsure at all n locations
taaaacattatgcattagggattgttgtcctaggaaaataaaataaaaatccccacagaccaactaccattttaacttaaaaataagcttcgtccgcgacgaattgttttccatcctaaaaatagaatggtgtaatctgctaatggtttagttccattaacttgcaagttctattgaaagcctaaatgtcaataaagatattaaaattcggagtcaaaagacaaatgaatcaaaagcaacaagacaagtcagctccattcttcactacccatcttttacaataaatcatctctcttttcacaaatttcaaactactctcattgccctttagctttgttatagagccaacactacagagagactcacacacttgtttcaataattaaatctgaatttggctcttcttataaactaatgtctgcaggtcttcttatctctctcactcaccaccatcttcttcctcgattgtcaaaaccctagatcgaaatcttatctctctaatctgttgttacagttcgtagagtcatggcgttagcatcaaccacgttgccgacgaagtccggattatctctttggtgtccgtcttctccgtctctcgctcgccgatttcccgctcgtttttctccgatcggttctagaatcgcttccagaagcctcgtcactgcttctttcgctaacgagaatcgcgagttcgtatatataattcttccaattttgattcttgcgttgatgaatttctatgcgattgattgtgtgattgtgttaggtttgtgattgttggtggaggaaatgctgctggttatgctgctagaacttttgtggaaaatggaatggctgatggtcggctatgcattgtgaccaaagaggtgattcaaatcgatcccttagtgttttcttcatcagtaacactattggttttactttgtttgattgttggatttgtggttgttattgttaggcttacgcaccttatgagagaccggctttgacaaaagcttacttgttcccaccagagaagaagccagctcgtttaccagtaagctttgccaactttaatgttttgattcgatcaatttgagtggttcttttagtgctattgctcttaattggctacatgaacattatggaatgagtaccggtagattgtttacagtgttacgattgttactgatatgaagatttgtatgatttagttttgtgatctctgtttatattgagggtggtcgtatatgcagggatttcatacttgcgttggaggtggtggagaaaggcaaacaccagattggtataaggagaaaggaattgaggtaattcatcttctgatacatagttttgttttctaaaatatatgaatgtaagtgaagtgtctttggtttgattaactgtacagcttggaatgtacgtcggtgaatttgtggtcttctcttgtgtcttactaatgcattttgtttggacaggtaatatatgaagatccagtggctggagctgattttgaaaagcaaacactcaccacagacgcagggaagcagttaaaatatggatctctaatgatcgcttcaggcagtacagccagctggtgagtgtgagtatcctctttctagcaatgattgatcagacaacatcttggcacctatgctcgcttcaaccaggagtacggacatcaggaatatgtgctctgcataacaatggaagcaattaaaatccatatagttaacatatttacatgaaaacaaaacccatgctgatgtaaatgctattgtcaagtttcaatgaccgttccaaaatattctaattttagtctcgcagatctaaagaagcatgatgctctaaagattggctaattcagaatgttaacgagggagatgctaagaaagactcttacctcaggcgatccgctttctactagaacacctttcaacctgcctgtgttacgataattactcatcaaagttagttaatttgctaagctgtgtatttgtgcaaggttaactgaagtgagaaaaggctgaaggaattatttaccagattcaatccagaaggtagcgattttcgggtcaaagttcccaacctccactgtttctcccactggccagtatgaatcagtggtttagctacagtggaaatattgtttgagtaattggatggcgtcatatttaggtcaaatagatttaccattatctccgaaaaactgccaccacactnttcttgggcttcctcatactcgaatactcttgagtaga

SEQ ID NO: 29468 - DNA, 1264 bp, Arabidopsis thaliana landsberg
cgaggctggtccgctgaagaaggcggagtgagagagagctccgtcgtacaagtatttacatttgacacatcgtcgtcgtcatcttggggatgggtgatcttaccttgattgtagcggcaagaggacgaaaccgtcatttcagcgtctcttgacaacgtcggaggaggctgttgacgttgtctttggctttctctagtccgtcgagccatgatgacgtgccaatggttcttgacagcgttatcggtacgacctggaaagagacgagagatgatggaccatctgttgccatggatccgatgagctgctaacagcctaaactcttcttcctccgtgaaggctctcttgttaatccttgggtctagttggttaaaccatctcaatctacaactctaacctgcatatatcaccaatacaattaattcatatgtatatatatcaaagtatcaaaattaaaccctagctagttttgtatatatggacaaaccatataagatatatatcaattaccagagcgaccaggaagcttgagagcaatggcgttccaattatgaggaccatattgttcgacaagatccttgagcttctcgtcttcagctggtctccaatggcctcggctgcacatgatcatttttcttcttgacgccgatctatttaattacgtaattaactaagtataccgatccaaaccaatacaagaacaaagaaaaagaaaaacacacagaatctatatcaataacgcacgcaaaaaatttgttgtgttcatgtattttatgtacatatataagaaattaaaaccctaagttttttttttcttgggaaaaggttggggaagatgggtatgtgggaacaagaagaaagctgaagagcacctgcacgtatatatatacatagtctatattattgcgagtatatatataatatacattttatgtcttcttcttttttttcgtctaatatacattttatgtctttaccaaaagaaaaaaaaatatatatatatatatacattttatatgatgaaaattaaaataaaataaaacaaaatccgttagagagtcgggagggttcggacggacctctctaccggcgactgatgccaacgtcttccctaaccaacaaaacacccccttctacgtaatctgcttttttctttcctttattttgggactaggattttatttagttataatccctatagcatatataatatcgtagtaaatagacgcatagactagagattgcttggtgtgggcaggatttcgtt

SEQ ID NO: 29469 - DNA, 1636 bp, Arabidopsis thaliana landsberg
  unsure (1)..(1636): unsure at all n locations
ctatctcggtgaactcctcgatttcaatgcctgaaatttggaaggttagtgagacgaatttggaagcgagcttgtttgatagaatacagcagggaagaaagtgagttaccagtgtgaattcgatctttgatagaggtgtaagtactccacaacgttctctcttggggagtctcaaatgcattctcatccacctgattgcatcattcaatgttagaagctgcaagttttcacaaatgctctttgatcagacagaaacctcaagtacctcaactccaacaccaacatctttcccacggacaatgcgtgtgggacgagaatatgcttccactatcttcggaaacatctcacctttgcttagcttttccgtctgcaaggcaagcaccagcgatgttagcttctttggagcaatatcactatgacacagcaacattcactaggagaatgatgcccaaaggcttctcaactattacctaattccctagctaactgctattggatcatatcacaagtcactaaccttgtatgcagtccgtgctgccagacaaggattgtttccacgctctgctaggacagacctaactacttcagggcttactccgttgtcaacctgtaaaaaaggataaaacgttgtttcaagaactggacccgtaagatattttaagagctgggaaatcgaaaaagataaacatcacaaaagttgcacgaaccnnnnnnnnnnnnnnnnnncgagtaacaaattgatacacctagaaacaaataaaagagttaattatgtcacgaacaatttcagatggtgataacaagatttgatgccactcaattgattctcacatcttctacagtgtttgcctcaaccttcgtcggttgtacactggctgcaagttctagaacacgtttgaagttgacatttttatccttctcgaccaaaatctgaacctgtggcatacaaaggattacttggcatccataacctcatgcaaccataaaatgacatatcataatagctcattttcagatcagaatatctataaacttactaagccatatgatattcttctaaggccaaaagggtcatttgttgaacttggctggcaaccagcagcaaataaaccaacaaggctatccaatctacagtcatagggacaagcataggtgttagtatataggatcacaaattcgaacaaaaattatcatatcagaagcatatacaatttagctccgcgcaatccagatacaaggttttgtgttcacaggacgaaccgtttggcgtagaaagaaatgggagagacaacaaaactttaggctttcaatttacctatcacctattgccaaaaccattcctgcatctgtttttgggatgacgtctccagaaaatctaggaagtgtaatttccagcaaagcttctgctatctgcatcccaggaacacaattgtcatataataatggagcacatgtaataaatatataccacagtaggatagtagcttaaatctatgaagcaaagaagctgacacaagagcaacttatgctcataaccatacacagacacacttgaacaatccactacctgctctgaatagccatctctgagagcataatgacgagccattattcctgacagcgcagtaaattgtgt

SEQ ID NO: 29470 - DNA, 4139 bp, Arabidopsis thaliana landsberg
aggttaaattctaataattgttaaaaatgataattttgttctgttcatgcttactatacatgtccgaccgggaggggatattgtttataaaaattcatttagaagccttttaagacagaataaaagcccatttgctttcagagaaatcggtacacataatgtaaaccggtaaaaaccaacaacgatactaactaaataaaaatactggttaataatccggtctataaaccggtataaacacagtaacaaatcgaaccgggactccattatcaaagtattgcttaaggtctctcttctctatcgttcttttccccagaaccctaatctcccccaaatcctgattcaatcgtactcaaaactcacaaaggaaccacctttacccaaataaatcaatggatcatcaaaattatcaataccaaaatcctttcgagagacgacccatccttaaatccaaagctcctgctgtgaagtggatcaaagaatggtacttttctgattccatcacttatacgtcttttagattacagattcttaaaagtttctcctttgttttagggtaccacaagatattgttgctacaggtggaaagtgtcatctacacaaatgggtcacaggtgaaattgtgatgttttaatctaattttcatgtttgtgaatgttaaattgtatcattgtgttgttgttattaccagaggatacttttagcagacttaaagaaaaagagaaagagcctgatgttcctgagcctgaacctgaaccaactacagagattttgtttctctgtagttatgatggttgcgggaagactttctttgatgttagtgcattgaggaaacattctcatatccatggagaaagacaatatgtttgtgatcaggaaggatgtggaaaggtttaataatatcctctctttggtttggcttacacactcactttcatgatatattgaagccatcttgttttgttttttgtaacagaaatttctggatagttcaaagttgaagagacattatcttattcatactggagagagaaattatatatgtacttatgaaggatgtggaaaggtgattgattttgatcactctcactagcttagtttatttggtgtataattaggcaattaggcaaagggattgtgttgcgtgttttagtaactttctgtagttgtggatgcaggcattctcgttggattttaaccttaggtctcacatgaagactcattcacaagagaattatcatatatgtccttacagtgggtgtgtgaagagatatgctcatgaatacaagctaaagaaccacgttgctgcctaccatgaaaaggtatcattactcatttgattactcattcgatagagtgtcatgaaaatatgttttttttcttgtgctaagacagagcagctccttagtcagagtctagctccacgttgcttttgtgacttcactttgtgtggttagtttttacgcttgggtgtagtttttcgtagctagaagtaggcgtaaatactatcgttgaggttttagtaatctcattcgatgctaactttctttctggagtagagaagtctaattgattaaaagtcgcattttctactaccttcttactgtatctacactgtattagtaggttgaaagttgtagatgacgcatagacagaactttgcatcggttctatcatgtttacacccttatattatccatatttgtaagaatcttagaacttatctctctcaatttcacaacttgtttaacagaatggtggtggagagactcccaaatatacaccaccagcagagaaagtattaaggactgtcaaaacacctgcaacagtttgtggcccgtcttcggatcggccatacgcatgcccttacgaagggtgtgagaaagcttacatacatgagtacaagcttaagctccacttgaagagagaacatccagggcatttacaagaagagaacgcggatacccccacactgaacaagcacaatggcaatgacaggaatgagatagatgacgggagtgaccaagatgtttacaggaaacacgctagtaatgggaaaggccagacacataaacaacagagcagagctaagccaaacatgaggacaccaccagccaaagttggaaagaaaggttctacctcttcgcctgccaaagcaaggattgcaaaaaaaccatggcaagcaaaagaaacttttgaagaagtagaaagagaagaataagaagatagcgaggagacagaggaagatagagataatgtggaggatggctggaccgttggcgaacacaacgaagattatgaccacgattaacagaccgagtatgaagattagtttgagcttcgtttaagccatagaagaccattttggttacgtcccttctctttatgcaaaggtggctttttagtaactttgtttcttgactcttcttcttttcgtttgccttgacactcttcttcatttaaagctttgtacagtattccgttaacatttttgaaaaccttttcttttagttttggtcaactttttgaaagatttttttttaataaatttcaacattgaatcccaacataacttcaatgtcgttttcatgtgaaacaatgttggttttgaattgtcagtgtaatttaaattgttaaaaatgttctcttgttaggttatgatgacagtgaatgaagttatcttaattttgttggtacagtttttttttttttttttttttcgcaaacaatcatttcattaaattaactcctcaaatgaggagggttcatacaacatgaaagtaaagaagtacatgaaatgtaaagatagagactcaatgagttttccaaggagatgcactactttgaaaagcttgcaatggttggaagatcttttgatgtcttgtaggattcaatcgtgaaatccctgaacaacatgtggtcataaacggcacgcacgaatgacgcataagagcttttgataaattgcttcacggaagagactaaaggttgagaggctaagggttgagacaggttgctattgcaggtaaaggtttgcgaaaatctccaaaaataatcacaaggccagttttggtatttgtcgggcgccgtcaacgaagtcaccgcacaaggggcaactgacgatccaagagatactcttgtcatcaacgaaatccggtgcgttggagctgtttgtggtattggtgttcttccaaatctagagctcgagggttttggaggagtcgttataggtaagctttggttcatggtttatagtaaatcattgcggagccttatcttcaatgttgattcaagacgtgattggagtccaaggccaaaccagtcaaagaaacgagccattaaatttaaggaacttaccaaaataaacagaactagtcaaagatgggagttgggcctcattattaatcccagaaatgggcttcaaatttttgcttgctatgccaaaatttgttcttcgaatttgtggaccgagtccaacaatgataatgagctttaatggagaaaaggctggtccaacaagatggtactgaggtaaagagtccggcccactaagggtgatctccagccaaattagggttttgacttgcgtcgtcaaagagttcgacaaagcgagcgcatgctaaaatgatccaagtgctcccgtcaacatgtccgatagatcaagagtgagtcatgaattatccggttggtgcaattgggaagatggagctcttgccgttaacgaaatctggtggtgaggggcttctgaggaaggacgtacaatggcagaggtgaaccaaaactatgacctgagtgttctagtgaaagtgaaatcaaggttcttcactactatcacgttcagtctttgtactatggatatggataaatagggaaaaatgtcgtttaatacgtgaactttcaaaatgtggtcatttaatatgtgaacttcgtatgtggccatttaatacatataaaaccgttgaccggccattttatacaaagttaatcgttgaccaagccaaaattcacaaagttgatcgttgaccaagctaaaatttgcaaaaatatgtataattttgatgaatacgtgtaaatattttctgatatctttgatatttacgaattcatttgataatttttttcgaaattatagcttaata

SEQ ID NO: 29471 - DNA, 3033 bp, Arabidopsis thaliana landsberg
atggctttcacggctgctattatcggcatggatggaaggtataatcccaaataagcccattcactttgtatttccatcacactaccaggaatctttaaccagagcaagtacactagttgtgcatctataaaaaccactctcagatctcggcttagtgcttacttgtgttttcttgtctcagtttctaccgatgcagctttgatcccgtgaacggaggagagatggggcaactggaatatatccactttatgaagatggacaaccgcccgtgataagtcagactcatgcttcactcactcctctaagcctctgtacataaccatgtctatgtaaatagatttggtgagactgcataagatttgattattgcttattgctacttcgagtgaaagggcctgcattactgattgagactatgtgtacatagctacgtagcaagattcatccacaacagtttgcttcgaacactgtattatgtaaattttcagataacactatagaaaagtaataacaatagaaaaaacagttcaatcgaattcccaagaaacccgaggccttcattttatatgtttcttgaatctgggatgtcttatcatatcaaatacgaatcatctacaatgtttcagataatctcacaatgcagccatattgaatcgagctgttgctgcatcaaaatggaggatcaatggaaatggggacacttgggtgaggtaagcttgaaggtaagtcgattcctgacataaactcgcttccatataaagctgcaccagctccaactactgcaccagctcccactcctacagcaaaccctgggccagtcctagcatatcctcttcccgcccctcctggtactcctccagatgatgatgacgatggaatgttcgtaacattctctgaattagggatgtatgtaggcatgtaccctgagttcataggtggtggtgctggctgcattggtggaggatagtaaggttgttgcatttgtgggttggtgttgttcattggagggttaggcattgatgagtcattcacagatttggggatgtatgtaggcatgtaccctgagttcataggtggtggtggtggctgcatcggtggaggatagtaaggttgttgcatttgtgggttggtgttggtcattggagggttagggattgatgagtggtggttatatgatgggggaactgagaatgggtttgactggtccattggatgcaaatggattctgcgatgaaccagccatgtaatcctgtcctgaagtgttgttatctgagttgttcgagagcatgactcctccaaaatctcctgcacaaaagaagaagagaaagatggtgagcgctctccttcagacaaacccatcttaaaaacgctaagatctcgaaatcggatattcggaaacccaaatttaaggttcttcaagaattgagttacaggaaacaaaagcagcaccaccgttggttctttctgaaattgacacaacccattcacatttgcgtctattgttgttcaatttacatataatctgattgcagacaaaatgcaaataaactaaaggcaaaattcagagacattaccagtaaaacccccaaaatcctctcgctctgcagatatacgtatcgacacatcgacaaaaccctgaggcttgctcgagttcgtcttcctaagctgatagcttccagtttcttcaattacagctttcgaagaactctgttgttgcttatacttagtcagaaactccttcaaagaaacagtagcagagccatgaagcctcttccttaagaacaagggttctctgctataaacctcgacttgcaaagccaacttcgaatcctgaatcgtggaatcatcgagcaaagtagcaaactttgttctccagacaggattgtctgctcttgaagcatcgattgtggtgcagtatttgtcttctggatcaagccaaccaacggcgtaccattggtgtttcagtagagaggatccgattccaattcccacacggagccctcgagctgatatcatacagatttccacaaggatcttccccatggatttggatttgaactcacgagaagacaaaatctcggtcggacgatggactgaaagagtgtgaaaaataaaagaggaacaagaaattcggacaactataaaggtagataatgttccatctatttctctatatgttaaagtattaatttgtcataataagcttaacttaaagtatctacatatctgtgatgtcccaaaaatattcaagtttctttaacatttggataattttgcacccttggatagtgcaaaattaaatatatgaaattggccattcattattattatttttatttaaaagaaattttcattttattacattaattaagattgaagagtagaatgtaatattgattgaaacactgttctgttattagataccaacaaatcttgattacaatttttcacaatccaaaaaataatcctaattagccaataatggtccaaacaaatcaaacaaacaaacaaataaaatcaaatcagaaaaaatgccaaccacctcaaaccagtgatcatgccaaaaaaaaacacaaaatgtgttttctgcctagaactatgcagcaacacttgtgtttcttcttcttcttcttctttcaaccacacacaaacgctgaaatacataacagtcgatatcacaaaactactcctttcactacctcaatcatctggaccaactagagtgacctgcaggatgcgaaattgattcaaaatggttgcttaattacaccaaaactatataatggagtaactgcatattaaaagggcaatgcaaaacaagagaagatagaaggatcagaaaaagaaaatggatctttttctggttacttttactcacattacaatcatatgcatatgttcgtgcgagtactatggctgcattacgttcttgctctgactcgaaagttagtaagaaagttagaacctttctaagttgccagaacaatgcctttgcaggaacgttagcattgcctctcactccaaagagctgaa

SEQ ID NO: 29472 - DNA, 884 bp, Arabidopsis thaliana landsberg
  unsure (1)..(884): unsure at all n locations
ttcggatctttagtatgaatgtaatatcacatagttctggttttggtttttaatcttgctatattgaaatgacaatttatatatactgtatacatactaatatacacacatatattttaacatctgtggattttttccgaagttcttgatagtttaaactatttttattctttgacagcttcatgcaagaacctttcaaatctttgcctcttatttgggtcatcaatgaagaaactcttgctgttcggtctagacagtacaactcaacagggcagactgaactcctcactgactggaaaaagattttcagccgggcatcggttgtagtcttccataattatctccttccggtaagttttaggattagaaccacaaaaaagatatttttgtttctgccttgcagtaggtttctggagtggttttggtcttttggatatttatcttgtttcacctttttgcttcatgcagatactctacaccgagtttgatgctggcaacttctatgtgattcccggatctcctgaagaagtatgtaaagcaaagaatctagagtttcctccacagaaagatgatgtggtcatttccattgtgggaagtcagttcttgtacaagggtnnnnnnnnnnnnnnnnnnnnnnntctgcaagctctacggcctttattttcgggcaattaccttgaaagtgataattcccatctcaagatcatagttttaggtggagagacagcgtccaactacagcgtagctattgaggtataacaaggtctgctttgctattggtaaaatggtttgtattttttaaagatagagattacaaaatcactaaccttgttacttgtttttttttttttgacttcttagacaatttcccagaacttgacata

SEQ ID NO: 29473 - DNA, 2144 bp, Arabidopsis thaliana landsberg
gaaacagaggaaattagaatcaaattgttttgtaagaagaggagatcaagaaatgagagatctggtttgttgattcttattattacctggaggtttggtctggaaaataggttgttgattctgagccatggattggaactgattgtcggagattctgagcggatttgagttcaatgtatgtcggcgattagatttggtaatatgtgatatttggagtggatgatgttgtgggataaaggaaagagaagggtttattatatatgggcacgaaaagtctaccctggcggcgtaatggtcaatcaagcgagcctcatgtctacgcgtcgtcgttttcaacttgttccgggttgtttcgtcatccaaaaaagtgtgtaaacaacacttggaagtaacttattcttgtcttaacaaaatccaagcaataatcgacaaaagatgatgagaaatatttgaggttttgaatcttgattgttttctatcaacgaatattccaaattggatttatggttcgaaggttatataaggaaatggtatagttaagtttaagttatattgactttgtttgttttgggggtttgacctttgggattatccaacatcctacgtttcggaaattttgaactaacacggtgcccacttggcagctcactacttgtaatatgatactctcttaaatgcgtgtcttcttatgacttcatcttagaatatcatacttcatgtaaggattttggtatatgacattttataatgctcaagatataatcccaaaggtgcaagattagaatgaacttgaacttcgaatcaaattgtttgcaataactaaacaaattttgaactcagattcaatgttgttcaacataacattgatcatttttcaaccaaatgagcttcgaaagtttggattttacaaaataagagattaagggtaacaaacaaaggcaatttccttggtgctcatttgacacattttacttaagaatcatacagagtctctatgaacacaaatgcctcgtttgactatataaacgtcctcacactgtttccacgacgctatacccattatgacccataggcatacatgctctcaaatatacactggacccgtaattaaaataacattttaatacttaacaaattagcatgtcttgaccaagagactgaagcagccaaagttgtccagagcaatagctcaagtaggcataacctattactgtgttaatagattcacaaaggcgaaacaactattactaaaccttcatggattactcatctatataagttctagacatgtgttttgaattccccggttcatcatcggtacaatagtttcagaactaaaacgctatggggcattgaatttgaaactgtgatcacgcaaacttcttaaatagaacacccattagaacacccatatgacccataggcataaaagctatcaactacactggacccataattaaagaacacagcatatcaccaaatcaacttgaggcagcctagccacagttgtccagcttaagtaggcataatctgtcatgtgttaattgaattcacacagataaagcaactattactaaccttcatggattatacatttcggcatatcatcatctataccagttttagacttttgttatagtttcagtactaaaacgctatggggcaatgaaactctgatcaacaaaatttctttagatagcatttccacaggcttttcaatgaacatgccacaactcgagaagtgaggatttggtattaaaagccttaacttgcatcactacattattctatgataatagagccaataaagtaaaaccattctgtttgaccaatccagtcatatgatccgatgatcatagaggcaaccaatgatttggcattgcaacaccgattaaggaaacttctttagacatacctttcaatgaaaatgccaactcaacaagcatggatttagtactaagaaccttacttgtatcactacattattccttaatcacaaaggcaataaagtaaaacccaattcttaatcaatccagctaaattttcctatggtcataaaaacaaagaaggatttggcattgaaactccaattaagcaaaatttttttagagagcatttcgacaggctttcaatgacaatgccaa

SEQ ID NO: 29474 - DNA, 527 bp, Arabidopsis thaliana landsberg
gacctttgcgtctcttaccagcagaagaagtgaaagtttttagagggaatccatctttcactgtgagcgaatctcgatctctttataaggttaagctacagacaagtaatttgtttggttcagggattagtgatatgaatgctagagttcttatctgcttgatagacgaaaagggcgattcggtattacagacaatacctccaaatttgtcatctttggatccagaggttgtggaaaatggtgaaagcttcaggtttcagaggggctctcttgatgaattctcatttgaaggaccgaaactcggcaaaatcagagctttttgggttggtcttgagtctggttagtttctgttggcatagaacttgtcttagtacataaattttgtgattagagatacttagcttttcatatttaggtcaatggagagttggaagagtgagcttgtgggtggttaatcctcgtggtaaagaaaccgaggcaaaaaccttttgttaccgatatgattttgaagttgatgaactcttgct

SEQ ID NO: 29475 - DNA, 831 bp, Arabidopsis thaliana landsberg
tcgccaggaaacaactctatgatccaaacttatggagtaagtcttttccatttatctttgtatgtatccatgccccatacctctagtatccattcagggctaactctggttatagcaagtacgagacggtcctcaaggttcaccatctgagtgtccacagtgatctgcgtaggcggcactgggactttatgaaactcttctttgtgaagatccaaggctagtattctgtaaaccgtctgaatgtgtaaccagtagatagatccattcacgcataccgatttgcttcccacattgaccacataaggaggtggactcagcttccgccattcaccagtatcaacatcaagaacaccacattccaccacaggctcctcttgcctaactctccagaaagcaaaagacatcctcaccactttatacctcccattcactttgtctctaccaaaccccattacccagtttcccggagagaaagtcttccataatcctgaaataaagtttcgatttttttctttcaatttctaatggcaaaaatttctacttataaagtaacagattattagttattaccaattctaaatctgcagttatggttcaagccggaagggaatcgccggagttggctagtcgatgggttcaaaacgatgatccaatcttgctcggggaagcagatcacaccttggcaagtcatcgagggtcgtgaggcgtcgcagtgcagatagacaatctcttcgtccccttcaaaccgtgactcgggtaggagcttcctccgtccgccgcagtcgcagttgtaagcagctaagattctccggcggctgttttgaagactca

SEQ ID NO: 29476 - DNA, 2565 bp, Arabidopsis thaliana landsberg
ttattaaactcatatgaaaagtgctttaccaagcgcatctccatactctgtcctccaagtcccgagtcccatctaacatccttgacgtacattaacataaatatatcatgacccatattgaaaatctattccaactgagagcagaccagacgaatacaaattagtacgctgagcttgtgtcacacatgttcctagaaggaaacaatgaagaaaccacgaaatgccatatatctcaaaggaatccgagtcatataataggagagcattattaacctgaaattggttgacagaaacagtcttgccatattccttctctctgtaagctgagtaatagacaagggctgcgtaagtagtacttgaacccatgtcataaaatatgacatgtctcgacccattagcaaaatccttatcaatcccatattgcaaagcagcaccggaatgctcattaaccagggagaggacattaaccccagccaactgagaagcctggaccaaaccccgtctctcagcctgtccaaagtaaggtggaactgaaacaaccatatccttcactgggattttagcatggaactcagctagatttgaggcataacccaagatcatagctaacaactcctccactgagtaaacagtcgaaccgtcatcgatcttaataccaactgcacctctagaatcttctacaatatcaaaaggcaagtagacagaatcaatgaaatccttaacatgtttgaaaggttttcccaccatatccctcagttgtgaataaactttattcggataacgagccgttattcccgcagcctcctcgcctagtaaccggtctccagattgaaatgctactaaagctggggatttcctcttggacatctcattaatggctacagagattggactctgtcctcgtttcagattaactacggcaactttaacccattctgaacctagatctacactcgaaacagcagattccgatggaacagggactaatgagatcaatgacaataacaccactaaccagctaaatatcttccccatattccaatcgtaaactaaacaccgcgagtagagagcagcaattcctctgcagttatatagaagcaaccacattagaatcaaaagccctagaaacagaataaatccaacaaagttacatgcgattagatttcaaacttcaaatcgatcactgccgctacgatccaccgatttatcacctctaggaaagcttagacggagtataattactaacgcatatagaatcgaagacgaaaatgttatgattaagcaactttcaaagcgaacaaacagaagcattcgtagaaatttccgatgaagagaaagaaaaagcaattggagcaggtaaatttgaatcaaagaaacttgataaaactaagatgtaatctgagagagtgaagcggagataacgaccagtttccgatctccgatcgcattctccgggggaagtcgatttgcagattcaagtttttttccgtcaggttctggagaaaacttgaggaaagaaaagtaaacaaatggagacaagagtgcatttatataattattgagaagagacactgacgtggaataagattcagagataccaccaatgaaaatattccacgtgtgaaaactgacacgtgttgaaatgtgagacgcttcgtgtgttggtgattacgcttggtaggcctagaagtctggagtgtgttttggttaaatcccaggtgaagcttctcgcactactagagagtcttaagccttaaacactgattttttacaacttaaatatttataatatttttcaaatcgagttttgaattctactgaattttcatcaaataagccaatcttaaaatcggacaaaaaaagaatacttaaactttgagtgaaaccacatattttctgattttcaaaatgaaatacaaacaaaaggatgttaggaatcagatgaaaacttgattttacatttcaggaaatctaagggaatacaaaagaaaaccaaaaactagatatgaggtaataatataagacaagtacaagacaagagagagttttggtggtgtttcaaaatcagaaagaaacaaagagagagcttgggttatgtatgcctattcgatagaagtatctatgaacacttgaagcaacaagtagctacgcgggaagcctcctattcctctcctcgatctactgtgattgatcaatctccttacaacagctgaaacaacattaagactttctaattatatcctgaacattcttatgcttgcatgttatactattctcatacaaaaaaaagtttgtaatttgactttacctggttacagtaaaatctccagcgacctcagaaccaatttgctagtcagggaaaacttcgtcgcgctcattgtctgctgaagacaaatgtacatgtccagggctggtgctgttgtggttctcttctgacatgtcttcttcttcatcatccgttgaggttttgtcgtaagagaagggtctctgacaaatgcaagattgcgggtactcgtggaattcaccgcgtcctggtttgaactcatctggatcacccatgaatcc

SEQ ID NO: 29477 - DNA, 894 bp, Arabidopsis thaliana landsberg
ttcgattttctataaataggtttctgggaaaaccgggaaaaacatatccccttttttcgtgtcctgtgtagtttgctcggcatgtatattggtttcagtgatctggatctaaatttgaatcaaagtctctctctttgcattagttatttaagattcagtattggtggatctgtggagttgttgtttaaaacatatactgatctagagttggttgagtgtcatatgtaacatggatcttattgttgttcttggctatagaaaagcccattttgtgatgtagatggtggatttacaaatgcttgtgttatgctgcagaacattcatcaagggtatccgacagagaatttgttacgctttcttaaagccagggatgggaatgtccagaaagctcataaaatggtttaaatctgtttgctttcacctaatttagattgtctttgatgctttgtttcttgttttagctttgttttggggtttaaaactaatgactgcaagtgttacagttgctcgagtgtttggaatgtaggactcaaaacgagattgacaagatactaactgtgagttttctttcagcttttggtgtccagttctgcgattttctgtggccctttgatctcatttggttattgatttttgcagaaacccattgttcctgttgacctgtacagaggaatcagagacacacaacttgtcggtgtgtctggttactctaaagaggtactactattttgagtccctttctttctttaacttttttttttaattttaaaagcagatgtttgatccaactaaaaactttgttgaatcatttgacttttagggtctccctgtcattgccattggtgtggggcttagcacatatgataaagcctccgtaagcatctttattcatct

SEQ ID NO: 29478 - DNA, 1239 bp, Arabidopsis thaliana landsberg
  unsure (1)..(1239): unsure at all n locations
ctcctcttatcatacaactcctggtactgcggggggaactttttctcgctatcgcaccacgatccatgtagtttaacaagttaatgatacaaaagatcaccagttacctggaaaaacatatttaagaaggtaatgatgcatgtgatagaaactctttatagaaactaaaactaagtatcttgaacatacagaattcaatgcaaagagataaaaagagtcttaaacagaacacaaataaatcagattcctgttttcggtatccaaaattttccattttgcatcgcttttcctcggattgtgagtgggagaaagaattcaatggcaaacaaacagagaaaattgaaagagtaagtaaagaaaacaatataccaaacgggagagagagaggaagaagattcgacgatttctaagctttggacagtctctaactccgcaaggggagttgaagaagaagtagaataacatctcgacgtggtctccgtacaggaggatggcattttctctttggtcaccatttgatttctcaacgaatttttttagccaagaataaaagagacaaagaatcactaaaatcatgttatcagactcataaaaagtgaaattttatcagctaaaggaactctacacgtgaataaagaaatattctttgtttctttttctttatcctcctcctctggttttagctttactccaaaaacaaaaaagagaatcaagctttcactaactgggaaggtttccaacagattcttcttgaagtgtccccaataaaagatattatttctaattgtacaatttccatgaacaaaaaaaaaatccttaatttgaaaacacaaaacaaaaaaagggtcaaactcttttttgcctcaagcggccaaagagatttcaatgagaaaacactaaaaaagtcctaaaagaagacaaagatacaaaggagaaaggattcttctaacggctcagcttccgattctttttcagtctttctctcctttcttcttcctctaagagcttaagttctctttcatcttcctcccnnnnnnnnnnnnnnnnnnatttaacaaccaattcaatcggttagggatattccagaaacacaaattaatgaaacgtgtgataacaaaaatactcatggaccttcggctctctttcttttggatatcttcaaaacctgcttccatgtttatgtcatcatcggcataccgagaaaaccgcttgggtggtctgaaaattgtacacaaaccc

SEQ ID NO: 29479 - DNA, 3050 bp, Arabidopsis thaliana landsberg
  unsure (1)..(3050): unsure at all n locations
tatactatttccgtggacgctgtaaattcacaaagtggttatatattaggtgagctgaaaatatcatttgggccatttacttcatacagttgagaaaatattcaatttgacacgtttttttataatatagtagtatcgtgttttcttatttattagaattaatttctgtcaatataataatttgtggttttgctttctttgggtcgcatcaaatgttaggtgttttgaaattttgatgatattattatttttagaaaaaattgactggagttgaacagtaatgggccggtctcagatgttagcccaataggttgacagagaaaatgtatgatccatgagagtgactaaattaaattgattaatctcttgcgcacacctgaatcctcgtcttcattcgttccggtcgtcgtctacacctccacactccgacttggtaaatccccagactcatctctctctctccttttcttttgatttctagatttgctagtttgtttcgattgttcttctagatagaaattaacgagtgatttttgatttaaccgattcgcatcaatgccccttcttcttattgcgtcgatctcatggatcgggatccatcgttcctctatctgatttctcttgtgggaaagaatttcaagctttatggttttgtagtaatgaacgtttatcattttcgttcgagggaagatttttaatctttcgttatgcggattctggatattaggctgttatttttttttttttttaatcgattgaaggatgtcaatttatagattgggctgtagattgctagtttatgtcattgatattgaattgtaagtttttcgatcttccagtcatacaaatcactaattgcctcaagataggaaaatccattggcagtatatagatggagttcatatcttaagcacaggtttatatggtcattacatttctagcttttgtttgttaggactgattcatgttgggtttttggggttattctttataacgggtcatgcttgtatatatgtagtatcaatacatttctgatttgtggttatgctttgatgcaaaaaagatccaatctttcgagttggtagtgagttacatttgttacttttggtaggttgagaagaagaaagaagagatggcaggacacaaggttgcacatgcgacattgaaagggcctagcgttgtcaaggagttatttatcggtttggcactcggtttagctgctggtggtctttggaagatgcaccattggaacgaacagaggaaaaccagaactttctatgacttgcttgagagaggtgagatcagtgttgtagctgctgaagagtaattaagccgctcaataactggttcctgaagattgtttgatttccatttctgtcttttttttcttttttttgttgggttcttaagaaataaacaaatctgagaatgggatttgtaacaaattcagatgtgatgttcattcagacataatctcttttgttttgtttcgagaaattacaaaaggtgaatatctatgaaacttattgatcgaagttttgcacttgacagagtgtttccagcatttcaagtaagtcaaaggctttttttcatattattatgaatcaatgttttgtatgaaaaataagtttgtgttgcatctgcctttttttgtgctctctgtttctgcaagtgcactcgcatgctgcatgtggctagtgaaccacttttgggaactctgaaaaaagtataatcaaatgtgagaattcttgtggttttgttttctgtttgggaatggtggtgagagagtttaccagagaagtgatctcctgagcttggagtgaacttcatgctcaccaaactccggattaccaccacctgtgcctgtggatactttgtctgcagaatctgacccttctttggactggtcgggacttgtatctgcatctgatgtgtttggaacacagtatttttgaagccaacggtcagtttcccagagaacgtgcataatgctttcccgtgctgagtacccgtggctctcgtgaggaagaacaacaagacggcaaagagcgccgtggccttttagtgcattgaagaatcggtctgactgttatacaaagtaagtgaaatgaatacagttagagacaaccaatccagtgataacttggtgtgaaccaatcctttcaagtgatatcaatgaagtaacctgcattgttagagttcctgggttattgtcttcttcaccatgaataagtaagattggcttcttgattttattagcagacatgaatgggctcatctctacatagacgttagtggcttcccacagagttcggtcctcgttctgaaaatttacaggcatagttaaagaataaccaaaaaagcgaagtaaattaactatcaaaatgcagagaatgagaggagaaagacaattggtcttggcacctggaaaccaaagggcgtgagtgttctgttgtaagccccagatctggcaatcccgcaggcgaaaagatgaggagcatgagcaagaagatttgcagtcataaaagctccataggagtgtcccccaactgcaattttgcttcgatcagccaccttgaaaaaagaacaaacaatagtaagtttcaaaactgttgggtttcatacaataccgaggtgatggatttaggataaagcaatnnnnnnnnnnnnnnnnnnnncttcctctacagcagcttcggcacttgccaccagttgctctacatacctgattttttttttcagttgttcacattagaatctgtcaagctcaagcacatctcagatctgaaacttacatggtttgatgtcacaagttcccacttaattagtttgcttatgcttataggaaggaaatctttaaccaagacgatatcactggtttctatgttctagcaacaagctttacgaaagtaaatatcactttacctatcattagcctcttcatcaccttcaccaattataggtatagtaggtccagataatatagcaaacctgcacagtgcagacaaatccagatggtataagctaacactcgatcaacagctcagtga

SEQ ID NO: 29480 - DNA, 2525 bp, Arabidopsis thaliana landsberg
  unsure (1)..(2525): unsure at all n locations
attgaaattgcagtaagactttgatttcaaatttagtaaggacccaaaattttagactgcgtttctttcatctaccatttagactatttttggagctggtaaagaaggaatcattcatatctgggaccttcgtggaggaagaaactcttctgcttttcagagccgcaaagatgtaagtcttacaaggggcgagctggaattggctatggcagtatatttcatctgtaatatctacatgaatttaccttcattcttgtgttctctggctctgatcacgttatgatattggtaacgttcagatgagccaattgcctttagcatctctacatcttgcaccgaagctgcagaaaattgcatctcttaaggtaagctctgtcttttgttttccatttcacttgtttcatcgttcagcaacctttttctgcttctttggttttttttttttaaataaaaatttgcaatgtgggaatcatgttacccccgannnnnnnnnnnnnnnnnnnnactgaaattttggcagcatgagaataagtttccatgaatacttttcaggcacagtcagaaatcgttcccaaggaaatccattccattgatgtaaacccatcctctcctcatcaacttgcatttcaccttgacgacggttggcaagtcattctttcataacaggtcatttcattttgggaaaacgactaaagaatttattactttcatgttttgttttgttgatttgatatcatttatcattttcctttggtggatatctctagtgcaggtccggtgttcttgacatatataaatctgaagttactcatgtacattgccctcctccagcatggttgtaagtttataagcaaacttaggaacttcaagcttattaaattgataaaaggtaaaaaagaagcttgaagtgtaatggattttggttcactagggatggttccaacagttcagctgatttaatcttgcggaagccatcatggctgccaacatcatctgtaagccctacactttgtactaccattaacgttcataagtgaaaaatttctgatcttattttggcttattctataacttatatgattcatatcgcagatttatgtggttgggtccatgagcgagaaagggattcatgttcttgattttcatccaagctccaggtctccttgtcatgttgactacgagtaaggatttcttgaaaaatgaaaactcccgatatatatcctatgtcctctaaacttcatggccacattcctgatattgctaatatatttttgcagtgaggatacacagagaaatgagaagagagacaagtgtaatcacagaaacaagtttgtctcattgtctgaaactgtcacaggttgtgctgcgcatcctctcaacggcatgatcgtagctggaactcaggtattcaagtttgcttaaattatcttaatctattttaggtttttatattagttttagtagttctcggctaacaaaacaaaccagtgaaacaaatgggcttgttgtctggtagtagtagtaatagaatagtgtaattggcattgtgcattatatctggtaaagacaaattgtcaatagtgataagtcactatttgaatggaaatggtgattctgcagaattcgtctttgctgttgatcgctcagatgcattgctcatcttcatcagaaactgcagaaggtgaattgtagcatctactagctggactcggcgtaggtttgtaacatagaaatcagccacgagattatgtatgaatatataagttttgcttaaatggatgttccaaaaagagtatactcatcacaacattgaaaatgctctttcttgttgtatatcatacttattttgctaaattcgtttccaaaaacagtgcgactcaaaactacaaaatgtaaacatgcaacaattatttcttaagctcagaacgaacaggatggaatacaaatttattaaataatctcagaacattttatttctttctaacaagcttagaagtacatttcaatcggaatattaattccaaagatttttttaaaaaaaaaacattattatgtcctcaacccctatcgcctcgaagccttttagcgagctggatatccttaggcatgatagttgatcttttggcatgcatggcacacaaattggtgtcctcaaacattccaaccataaaagcttcagcggcttcttgaagagcggaaacagcaccggtctggaaccttagatctgccttgagactctgagctatctctttcaccagtctttggaaagggagttttcttataactaagtctgtggtcttctggtacttcctgatctccctgagtgccactgttcctggcttgtatctatatggtttcttaagcggcggagttgagtgttgccatactctcatggcgaagtgtggagccttacctcctgttgccttacgagctgtctggttcgaacgagccatagtaagcaaatcaactttgatatgtaaaaaagttttgatggtgaaagatatgtctgagagttgtgggtgaga

SEQ ID NO: 29481 - DNA, 1965 bp, Arabidopsis thaliana landsberg
agaaaccacgcatcctgaaagcagctctgtcgtaagccaccgccgcgtcgtcagcagtgtcaaacgttcctaaccaaaccctagctccgttgttcgccgggtctctaatctccgccgcaaatttcccccacggcgtttgtctcactcctctataatgctttcccttcgccgccgtcaccgccgccgaaacaggactcgtcttctccttcttgaccggaacagaatccaccgccgcgaaactctccggagtctcgatcttaacactcgggaaagagctacgatcttcgtcggaagacgaagaagacggctcccaaccgccgtgaaaggcgtcgttgaggataccgtaaactaacatatcctcagaatcgttttctttcaacggcaaatctccccagctctcggtgaagcaaggatacagtttgctaaagctagggtttcgtccgtacaccggtttaacgctctgaccggttacacaagattgagtaaccgaactcgctgtcgactcactgagtatcggctccgattctcctagtaagtgtcgtcgtatggactcaagaaaagcataatcagattgagaatccgccgtcatcgacataacagaaagagaattattaagaatgtttttttgttgtttggtttggttcttgttgagatttcaaaatgtccggtgtgaatgaaaaataaagaggttttgttgtaatttatagggagatattatagagtagattgagataaaaagggttcatgaacctggaaaatattgaattttgacaaagacttgtgaattaatattttaagcatgtagtgggtaataaaaaaagttgaaaatatgaaagtaatggaaatttcttattgctatgaaggttcgtgaattaaacacgtgcgttttatccacataagacacaaatgaaagtagccgtcaaggatgatgtcacgcaatctacggaagcaatgttgtgattggtctcgtctctctcaacttgtctttggctttttgtctttggatggctttagaccgttttgtcttttttttcccaacttgaaccgccggtttaccgaaacaaatctatgcaaaattagcttttattaatatggtttactgtttttgggagtatacatgtatattagttatagaaatctaactaatcttatttttgggagttggagcagggagaagagtaggaaatacgttccaaatgttagtacaaattaggaatttagagatttggtttaatgatcactctaaaacaaagactattgacactcctcaagggttcacttgaaacaattaatgcagctttttcatgggtttaatttgtagacaatatcacgtgaagctagccaccaatatttgaagtaccaacttgtagttagtgaagagaggccctgacaaacaactcgagttgagaagccagctgttcgaaccttttgtctttataagaaaatatgtacctctgtttagtgtgagaagtttgtaagagtgatgagagatttgtaaactttaaatgatcgaatttgagcaaacattgttgtcttagcgcaatttcagaaatattttcggatgagatggaccgtatcatcttggggcatgtagcaatataaactttaaatgctcgaatttgatggaaaacgtgattattgtttgttcaaacattactaagacttcatctctcgaggttttagatctcagaatgtacaaccaacattaatttttgtttgacaccagatacaataatgactacaaatatatattatgactccttaatgggcataatgacttccaaattcccgccgagaaagataggtcctgtatgataaaccaaaaattccaatttttttttttttaaaaaaaaaaaccccgcatgggaacttaacttaagaatggtggacataatataaattctcttatggccagcttaactaaaagttaaaaagtgaatgggtgggtcttttgcttttgccaac

SEQ ID NO: 29482 - DNA, 2295 bp, Arabidopsis thaliana landsberg
  unsure (1)..(2295): unsure at all n locations
tgttttcccatttgttttattttccaaaacaaaccaaaaccgatatcgtttgttcgtgaatcatcatcgtttaaattcaatttcgatagttttttgagaaaattgcttttttcataaaaatgggaaaattgagatttttttatgttagttaatggtagtttttaatgttgagtttgcaaatagtttaggttgaaatattcaggcaatcgtgttaactttgttgatcacctttattacaatgatgaagcaaagctaaatacagcaaaatgcaaaaaaataatatgagcctaagcagtgactaatgataaagcccatataggcccatttatcttattcccgggtcatatcaccatcttctgcaactgcaacatcttcccagcgtccattgcagcgacaacatttttccgattacgtctacgatggtgcttattaaatccctttaccgaactgcttcgacggcctccatcgctacactttggtcttctagatccgccgcctctagtcacttattgcgcaatcgtttcctctccacgcgaggattctttgctgtttcttcttcacctccttccaatcgaactcccatttgttagtgatttttaaatcgttgcctctttcgtttttccgatgaatgcaactgtatagttaccaaacattgcaatcttatcttccaaaatttcactctgtatagctttagaggatcctcgaattcattctgagatacctttcattaggtattattcgatttgtgtagagattgcaaaatcgttacctcctatttatatttgacggtgaaatgttcagatatgcagtatccttgtgcaatgtgcattggacaagtccggagatttagcgaagatgtatctcacatgcttgaaatgaaaaactctgatgttctgaatgcatttaaagatttgatggctgcagattgggctgagcttccttctgctggtggtcacgatgcgaaaagcgcgatatcgaaaaacacagaggacgaggcaggacaagaggctttgaaatatgtgttccgagcagctgaagctgtagaggaatttggtgggattctcacttcgattaagatggaaatcgatgatagcattggaatgagtggggaggtttgttgtttgtctcacttagtttggcgtttattgattgtttgatgtttagtgattttgtatgttgtgtgcagggtgtgaagcccttaccgaatgatnnnnnnnnnnnnnnnnnnnnnnnnnnnnnnnnnnnnttgactaccttgattcctttgaacctgaagaagtatatttgaagaagaaggttgagatggagttggggacaaagatgatccacttgaagacgagatgcagcgggcttggttctgaatggggaaaggtaatcaaatcagatctttctctttgattctaagaacctagactctcaaaacatgtactctggtgatttgcatctttgatagcaacatataatcctgagtttgcataattatcgactagttcaaccatctttctttcaaccttcatgcatctttaggctatctgaatcaaatcatatagaaatttgcagacaccaatgttttcattaagacgaaaccactgaaccagtacttgtttttctaatgctttgttttaatttcttctctaggttactgttcttggaacctcaggactctcgggatcttacgtggagcaaagggcataaaatggaaagagaagatcttagatacaagcaaaacttgttatgttgttaacacataatcaaggtcaatctgaccaaaagacctttaaggtgagtttgttcattgtttcctccaaacgaagctttcaaatttagagcttaacacagctccaacaattttaacaggcttctgttcattcattacagtttccttacatgagatatcttttgtttagctgcgggtttcctccaagaccaacactctgcaggtgactttggatgcggtggaagcaacgcagcttttcgtcccaaaccaaatggccatccttcgcaatgacagaactcttgaagcactgatcctttcctaatttcataaacgtaatgcatcttccattgattctccaactctaaacctttcaaacttgaattcctcgaaaactcatatgaatttcgtaactataagaaaattaggtcttataatgtatagtctgttgtggtggaagatttaatttgagtgaatttaaaccatcttaaataactttctatttcatcattttccaatataaagtaggatctgattaatggatgcatgaactttnaagttatctgtcttttgcgaaaaaa

SEQ ID NO: 29483 - DNA, 2537 bp, Arabidopsis thaliana landsberg
ttatcaggtgaaagcaacaagtacttgtcagaaagctgttactggcaagcacagacttcttcctatgattcactggtaagtaaatcagatcaaaagtaggcaaccttgaagaatctgagtttggaaccaacaactactggcaatggtcttattagaattgcatgcatatcaggaattcagctcaggtagccctgatggattggctctggaagatttgaatccatgcctaactccttataccaagaagaagcccaaggtagttgcttcttagccttgagagacaaagctcatgttattggttcattagctcacaagataagatgtgaaattaagctttgatatgtcctgcaggagtatgagagggttgactcagcagaagagagtttatcagggagaagcactataacaacaacaggcggtaaagtcaaatcgagttcaagaagtgtaaagatgtcaaggagctcagagggaaaggcagggcagagatcaatgtagatcaaaggatggtatagaggtgggagaaatgttttaaggtgaaaacagataatgcctcatataaggtaatcttgttccattttttccacttgatgtattatgtcacttgctgtcaacgtaaagagagtagtatgattttggtagaacgatctggagctttgatccaggattgagttgaataagagaagagtgttgttatatgtaaaatagaagtctttcaaaataagttaatggtgtacttagtaggtgaggagagaatatgtgtttccgttgcatccattcttctcacttgatgatgtcattgattaaattatcattagtagtgttgtttattagagagtctagagatgatgttgatactccatccctttcttcaagatacatgctttggcattttcaatatttgcaatatcattaatattggtaaattgggagacaaacattaaatttacattactcattttcctttccctcctccttattactcccaattttttttttttcttctcatgctcaatgtctccctcatttctgtcttagtttcctccataactatgattatttgtttaccatcaattttgacatcctatttttgattctcaaataaacattaacctccaacacccaaaatttcatcacaaagatgtcacttttacatttatgtatggaggttcaagtgatgaactagacatttatttaccactataattaacacgatttagatctcgttaattaccaaagatgcaataaaaacaattttcagagataccaatatattttagttattctattaacaaagttttcttttataaagaacaacattataacaaaaactttcccattgctataccgaaaattaactctaatactataaggatattaatgaatcaactaatggtgtatgcatgtactaaagaagaaagcaaagagagtaaccgtgtgtggtgggggctcatgatcgttagttattacgtctcctactcttacgtaggcctttccgctgatctctttctgaataattgtagcttcaccgaagttgcttgctttattatgctctagctcctttttaggaccaaaaaagggtactgacaaagtgaacgaacacagtactcctgtccacccagaaatattataaaaattaatacaatgggctctccctttgcaatattcttcttagaaatttcaatattgtacatcagatttaagaacttctcatagatagagactagagaggagtgggcaactaatattcaagttttcctttgagggaacatatttacaaacatctgagatacaaatctgttttgtaaaaactgtttcatgtttgtaagaattttgtgtttgtacataaataaagaagatgccatctctagaaagggaaagacaattccatgcttttacatctcattctcttctttctttactcttttacttcttttgaaaacacaagaaagataataaaaagaaaaggaaaaggttaataaagtatttgtttcactatttatatagtctgtctcttctctggtaccaaaacacaaatcttttccatgcaagtcacagtttttgtatccattatctcatcaccttgtttcaatattctaactaaaaaaaacaaataagttcaaagggaacaaaagacatgtgtcagttagtcagaggatattgggaggttccacgaacgtccttaatctttggatttttccgacttacgagatattatgtgacgcaaacgcgtttctcctctttttttacgattatgccatcccacccccgtacaaatcccctacgcgcctccacgcgtcgcttcctcactcccgtcttttccacacacgcgctagtcggaatatcttattggattaactctatgaattttcatatgaacaatatttataacattttttatttggtattaacattatataaacatgatatttggaaaagtctttcgtttgaaaaattcgtacgtgacaactaattttgtttttttttggatggtgaaagaattatcttggatttgaggcacacacttttgtttatggaat

SEQ ID NO: 29484 - DNA, 1943 bp, Arabidopsis thaliana landsberg
agatttctgtggaaacgaggaaggttgacttcacttactgttgacaaaggtaacttatatttcccaaagatggtctgaaagttttactttggcttgtgtctcagataagtaaatgcatattcttttttcttttcaggtgtggcaatagctgagttagaattctacacacctcaacatgtagcaagagccgagaaatcatggaaattgattgcagactcgttccaatctgtgttaggatgcaacgttgagatccaaatgaatcttgttatctctgcgtgttctccaccaaagagtgctaaagcagcagcaagtcttttctttggacttttcagttgttctcgtagaatgcttcacaagtcgtatttgactacaagaaccgactctgactgcgcatctgaaaagcctgcagttacaaattctctgagaagttgccaaggaaatgtcttgagggctcgaagtgttcgttcttcagccaatgcatcatcgcgtatgagctgttccagtgatcaaggcgatgcaacttctgctatgtgtactccacacattcctccgggtgaaaaaaggtaaaacatggttcatatttattcatttcaaaagtaagttgttttgtgatttggctagctactcaagtatactctgcctctgactttgtgcaggccagaagatgacactgatgtgttgtgttggaagaagactcccctaggcaaggtaaacatctcgactatgcctaagaattcggtttcagatctctgtctgtacctttttggtgtttctaatttgtgatgatgatacatgtcttatagggtcagagcgagacacagaacagcaagagctcacggcttatcggccgagtccttccctgcagcactgcagctaattaagggagctcgatgagggtaatacccattttgtggaagtggaaccaataggttttagcaaacccattgtttaggacaatgtgacacaaaaatgtatagttgcaaaatgtgtttcaagaccatattttagattagcatatactaatcactcctttaacagacctgaattttactgtctttggacccttttattgactgagctcattatgttttcacaaattatctcattcattaaaacgaatcagaataaagtgaatacattagtcttcaacttttttgttacaaaaagtggataatgtttaattttttcaataaactgatttgaaattagaaacataatttggataaggttttagtaatttgggataagatattgacagagagatatttataaattatctggtttcactattttggtaggaaaactccaaaattaaatccataaccctaatcgatatctctcttggacaggccagcacatgtaacgagcaatcgtgaccgttgagacagtaacacgtggcaacagtccttatgatgagacctttgatgagaatcagcagcctccatttctgtaagctttttgttcctcccaaaattcccaaatccatcttcttctccaaacaatcttctctcaaacattactactattttccaggatagcttacgcagcttcagactcgggttcttcttttcgatctagcctccgtcctctttcttcttaccacggatctcgcctgctctttttccgtacgacggtctgctttgtggatagtttggctgacgacgaggcgatttgaacattaacagttactggtacttggagtttcaaacatttctccgatgttttggttttggcatttagtcacgggaatgattaattgattgattgctgtagaaatatgtgaagaatgacacgtagaagaatttgatgaaaccttgggatgcataggcttctgtattatggattggtgattttagatctccatttatgtcgtttcacatcagtgtcttgtggttttagctatatgctgttttggttttaggttgatatttattggatggtat

SEQ ID NO: 29485 - DNA, 818 bp, Arabidopsis thaliana landsberg
ccaagtctacgccaggcagtggagctagaagccagttccgtgagctcctcttcccccttcgccggataagcacggcaagctcaccggatccctttgatgcataaattacctatgatttttcaaccacaaccctcagtctgttattttatgcatgatatgattttgagacaagttattatggccacccaagccgcttgccgcaatcaatccttgatatatttgttacaaatgatttgagaaaaggtgtgagttttcaaaagaaaatgcttttcaaaatgtgtatgatgaagggttttcacccttatcacctttgagtagggatgatcagggactccctggtttaggggagggcctaaggtgatggctcaactggtttaggtatgagcagaaggattgtccgctcacataaggactgatttatcatccttcactacctgtactcatgataattataaccactcgagactgtatggcagtcactcaatctgaactcatacggtccaaccccagggttatgaaggctggggagcaccgggaggataaggagggggaatgttttgtctggtttggacatggcggtggcctgactccttccggtataaccgttaaggttaggacgtgcgaggaaagaaagagattcggattcgggtctcacgacagtgagatcgcagaaaccagactagtgggtaaagtgtaccctctgcgcagagttcaacttattcgaatagtctgtgtcactggtatggacgagtctggtgtggtatgacaattaggtgtttgttttcaaaaaaagggtgcatttgagaaaagtgtttttt

SEQ ID NO: 29486 - DNA, 4147 bp, Arabidopsis thaliana landsberg
  unsure (1)..(4147): unsure at all n locations
accctccctctaattgagttttagatctcacaccaaactttttactcattttttcttttcttgtggttgaatttcattttttcccccgtttccaatttnnnnnnnnnnnnnnnnnnnnnnnnnnnnnccttgtgaactttttttcacttccttggtcatgtggtttatgaaaccactatccaccaaccagccatcttcttctttgatttttgctgattcttcaaatgcacaaaacaatatacgaattatcatcttcatcctgaagacccatatgtgccctttcatacttctttgaaagacactctcttgaaaaatgtccaactttcccacagttgtaacattctttttggttccttgaacctttttgccaataagccatcccctgtttcttacaaaacccacaccacttttgttcatcttctgctttaaaaccaggattccctccactttttctagcatgaaacacaccttcggacgtgttctcattccttgaagatacacgattctgatccgcttgaagagtccctatcaactctgtcacaggcagtatggtaaaatccttcgtttgttccatcactgccactatgctatcgaacctcgccgggagggatatgagaatgttttggacgatttgatagtccttcttctcttcaccatgaacctttaactgatttcctgtaaaaacattgacgttttcaccttaattcatcttcatatttacatactctcttcttaatgattgaaggtattgtatgggacggatttggagaatcccatacttggaagcggtttctccaaaggggtaaaaattccaaccagaagaaatgatatggataaatacatatcttctggttggaatttgaacaacctcgcccgtctgcagggatctctactatcctttgaggattgtgagatctcaggggttcaggtgccatggctctatgtgggcatgtgcttttcaacgttttgttgggtaagtttacatatatcactatctaatcatttttgtcattttgtttcctatttctcatctaaatgtttgatgttttgattgtaacagcatgttgaggacaatcatctatattcactgaactatcatcactttggcgagccaaaagtatggtacggagttccgggaagccatgcaactgggctagagaaggcaatgagaaaacatctaccagatttgttcgatgaacaatctgatctacttcatgaactggttactcagttttctccaacgactttgaaaaatgagggagtcccggtttatcgagctgttcagaatgcaggggagtatgttctaacattccctagagcatatcattcgggtttcaactgcggattcaactgtgcagaagcggtgaatgtggctccggttgattggctggctcatggacagaatgctgtggaaatatatagccaagagactcggaaaacgtctctatctcatgacaaaattctccttggagcagcttttgaagctgttaagtccctctcagcacatggggaagataatacaaaaaggttcagctggaagagattctgtgggaaggacggtatcataactaaggccatcgaggcacggttacggatggaagaaaaaagaattgaggctcttggaaatggtttcagcttggtaaagatggataaagactttgattcaaattgtgaaagggaatgcatctcttgctttagtgacttgcatctctctgctactggctgcaagaattgctcatctctcgaagaatatggttgcacgaaacacgatatttgttcatgtgaagggaaagaccgtttcatttttcttcgttacaccatagatgagttaagctcattggtaagagcattggaaggtgaatcagatgatctaaaagcttggctttccaaagtcatggaaggttgttcagagactcagaagggagaatctagtgggattatcgttaaggaaaagcaggtacaagaagaatgttttgatctgaatggtgagtgtaataaatcttctgagatatgtgaggatgcatccatcatggacttagctgcttatcatgttgaacctataaatcttgggttcttggtcgtgggaaagctttggtgtaacaagcatgctatatttccaaaaggtgcatctccctaaacccttttattagcttaaagaatataattgattcatgtgtcgaaagagcttaagagtcggtttgtttttttacagggtttaagagtcgtgttaagttctataacgtgcaagatccaatgagaataagctattacgtctctgagattgtagatgcaggacttctgggtccactcttcaaggtaataaacctttttaaggttcttattattagttggtgctacgcttggaaaaactaaaacctgccttacattgttgtttatcatttcaggttactttggaagaatctcaagacgagagcttctcttatgcctcacctcagaagtgctgggaaatggtgttgcttagagttaaggaagagatcatgagacgcagcaaccaaaaacaagatgtccatatgttggaaagcatcgatgggttaaaaatgtttggctttcgctctccgtttattgttcaggtaattttaagtaatcgagtcaacctaggtcttgtttgataccccgggtccatgatatttttcttacacagcttatgatcatcttcatctacaggccactgaggctcttgacccgaaccatggccaagtggagtattggaaccataagaatgagaaggattcgctggaaatgaaagattgcttcatgtcaaattcttcccagagcttaagcaaagcaagactttttggggttgatttgaattgaattcttgaagaggaacactcgtcaagaatgccagagacaatgttgttagacaggaactcaacaatttttctttaccctgatgatttttcttagaattgtttcagtacattgtttgtctcatcaggctctgatgaccaaactgtaatttgttgctaccattttccaaaatactcataagttgcatgatgtttgactttgaaagttgcatgatgtaacaaattctaaaacaccattttccaaatcctttgcgtaagttttcactttgtttttgtctactcaaattaaaatagaatagagaagcaataaatttttaaaaaactaggaaggacacaattttctaaagatttgaaaacctacgatttaaaactctcttttccctcaagtttgtataaattagtttccaatctctctaaactttatgaactatataaaaaaacaatattaattagaattaaataaaacttttaaaacaacacatgcaacttgagccgttctcaaatacaatgttgacatcctcaaatcgatcggtcctttatttcttagatcaacattgtgttacatttacacaaacacaagtacacaacatatctttattaaaattttcattaaaaaccagtattatatcatcgagtacacatgatgattatcgaaattaccatgagattattccaacgggataactaacattataacggcgctaacgtatacgttcacagaggtggcggtgtgaggaatggcaggggaggaaacgtaaagccagggaaaccaggaagggatggcgccggaggtgatgtcggaaacggaaacggaaatggtaaacgtgggatatttccagggaacggagaaggtacaaacggcggaaaaagtgacggtaacggaggaacaccgccaaatggcaagcccggtggaaacggtaggttgttagcttcgtcggtagtggtggtgactacttcatcactcggcttctgatcggtaagacgacgagcgacggttgtttccggcatgaggtggaagatcaagattagggttagggctacactgatgagtgatgaagaagccataatttgttttgtattttttgcttataagcttttgtgtctgttgtctagtgactatctagtgttagtatatataggcctatatttccattaatttattttttcacacccaacgtacttcttattgatttacaaacacaattaattggtgccaatagttgtataacatcgaatgtgccgaactcgaaaataagtaaactgatttaacaaatgcatgtgtatcgcatgttggctgttgcataatttccaatata

SEQ ID NO: 29487 - DNA, 459 bp, Arabidopsis thaliana landsberg
ggtgaagccttaaagcttcttttgcactgcgaaacagaaaatccatctcagacataacatcgttttcgatcttgtccccatgttttccaatcagtttcttctgctcgtccaaagccgcggaccaccagtgtttgttttgaattagataagcaccggtccatgtggcagagatagagcttgtatgttgtcctgcaaacaaaccagcaatgagcaaaccagtgacttcagattcagttggctctctaccgtctttgtactttgagtcgatgaaacattgtagcatgtcgatctctgatttgtcaccagagcgatttcttgttgctatgatgtttgaaaagatttttgcaatctttccgcgagcacggacacgacaattgtgagctggaaaggggagctttgggaagatgacacttatgggttgcatgcctttaataaggtcatggaacattggagcaacat

SEQ ID NO: 29488 - DNA, 2156 bp, Arabidopsis thaliana landsberg
  unsure (1)..(2156): unsure at all n locations
ggaagttttggaggaatatgatgcggtcggctttgacttataaggaatgggctcatgcggctaagatgttagagaaggaaacaccaaagatgaatgaatctgatctttatgatgaagagttggttaagaacaagcttcaggagcttcgtcatcgtcgccaagaaggctcacttagagacattatgttttgtatgagagctgatttggtgaggaatctcggtaatatgtgtaattcggagcttcataaaggtagacttcaggttcctagacatatcaaagagtacatttatgaggtgtctactcagttgagaatggtttgtaactctgattcagaggagctttctttagaagagaagctttcttttatgcatgaaacacggcatgcctttggtagaacggctttgcttttgagtggtggggcttctcttggtgcgtttcatgttggtgtggttaggactttggttgagcataagcttttacctcgaataattgctggttctagtgttggatccatcatttgtgctgttgtggcctcaaggtcttggccagaactacagagtttctttgagaattctttgcattctttacagttctttgatcagctcggaggcgtgttctcaatagtgaaacgggtaatgacacaaggggctctacacgatatcagacagttgcaatgtatgcttagaaacctcacaagcaatctcacattccaagaagcttatgacatgacaggaaggattctcgggatcaccgtttgctccccaagaaagcatgaacctcctcgatgtcttaactatttgacttcgcctcatgtggttatatggagcgcagtgactgcttcttgtgcttttcctggtctctttgaagctcaagagctaatggctaaagatcgaagtggagagatcgtaccgtatcatccacctttcaatttggatccagaagtaggcactaaatcatcatctggacgccggtggagagatggtagtttggaggttgatttaccaatgatgcagcttaaagaactgttcaatgtcaatcattttattgtgagccaagccaatcctcacattgctccattactgcgtctaaaggatttagttcgagcttatggtggtagattcgcagctaaggtatgtatttagcatagttgtttttgttggtctctgtttcttttctttgttgtaaccacgctactttttcgccttttatatagctcgcgcatctagtggagatggaggtcaaacatagatgcaaccaggtattagagctcggttttcctctcggtggactcgcaaagctttttgctcaggagtgggaaggtgatgttacagttgtaatgcctgctactcttgctcaggtttttatccaaaacccgaaatcttgaattttctttgattggtatcagagattttagacttgcctgagattcttattgggttgtgaattttgtgtagtactcgaagattatacaaaatccgactcatgtcgagcttcagaaagcggctaaccaaggaagaagatgcactngggagaagctctcagccataaaatcaaactgcgggatcgacgtgcgcttgatgattctgtagctattcttaaccatatgcggaggctcaagaaaagtgcggagagagccgccactgccacgtcttcgtctcatcacggattgcttcaaccaccagattcaatgcttcaagaagaatcccatcttggaacgtccttgccagagagaactcaacaggctcactggatgatctagtcactgacaataacctccacgcttcttcgggcaggaatttaagcgacagtgaaacagagagcgtggagttgagttcttggacaagaactggtggacctttaatgagaacagcttctgctaataagttcattgattttgttcagagtcttgatatcgacattgcattggtcagaggatttagtagcagtcccaattctccagcagttcctcctggtggctcgtttactccaagcccgagatccatagcggctcattcggatatcgaatcaaacagcaatagcaacaatcttggaacaagcacttcaagcataacagttactgaaggtgatcttctacagcctgagagaacgagtaacggatttgtgttaaacgtcgttaaaagagagaacttgggaat

SEQ ID NO: 29489 - DNA, 4536 bp, Arabidopsis thaliana landsberg
  unsure (1)..(4536): unsure at all n locations
aaataagacatggtatatgtaggcattgaagctagcacagattcaagcattgtggttttgcccgtagtagacaagaagcgagaagaccagctcaaagagcgctgccgtattctttcaatgatctggttcaacagatctctctttctcctacaaaacatctcaggtaagcccaaatactttcctagctctctgtaagttgtatgccaaggatttgctgagcttccaatttgatggcatggggtgttttcccagaaaaagtgatagctgactttgccttgttaatcatttgaccagagtctgatcgacagaaaaatatcgtgtcgtcaacaaaaagaagatgattgattttgggactgccttttaaaactcgaagaccaattagcactccatcctgttgggctttcttgcataaccaagaaagtacttcactacaaataatgaagaggtaaggtgagagaggatctccctnnnnnnnnnnnnnnnnnnnnnnnnnnnnnnnttgggccgctctgttgaggagaaaagagtaagtaacagtagttacacattgcatgatccagcttatccatgcttggtagtggagtgcttcatgtgtaataaggacattatcattaatcgctctttttggcacaaaagctgattgggtttctgagattatatcttgcaggaccggttgcagacgccttgagagcaacttggagataattttgtagaaaactttgcacaatgctataggtctgtaatcaaccatcctttcggggctttggattttaggtataagcctgatatttgtttggttgattgttgggtgcagattggcagatgaaaagaacgactgaatctctagcacaatgtttggacctcagtctcccagtgagattgaaagaagcttggggaaaccatcagggacatgggccttatgagcatgaatagagaaacaagatctttttatttcctccctgaaggcattttgatgagaagttggttcctttcagggtatatacatggtttaatggcttcttttatagtcgcaacatggtctccgtcttttgcagtgaacagggtttggaaatacttagagataaccttcagaattcctgcctcttcatagataggtgccccatcctctctctctagaactgagaacttattagtgagtgttcttcctttagtaattgcatggaagtaacccgaatttttgtcccctaaagcaagccataattgtctacttctctatttccaatactcttcccctctcttgtaagccaggaaaagattgttattgatggtagagatcaggtcatggttgtgttcttgactagccattgcttcctcaaattttgcggttttccttaataagtctttgactgttctggtgcttttcttgggtccaggtaatgatgtccaagcggcatcgattaatttattccttcacatccccagtatcacataggttccaagccgcttgtataagggctgttacttcttcattattctctaagcgtctgtcatatttgaacactccttttttctttttctttgatagatcaaagtgagtgagaagtcgtatatggtcagatccttcaaagcgaaggtaagcacaacaacttgcagggtaagtttcagcccatgctccatttgacatagctcgatttagacagcagtgcaccacatgatcatgcctctttccacgccaagagaagaaatttcctgagtgtcttaagtcatataagtcacattccgccataaaggaagtgccttcatgtcttattgggcctctaaaaggccccgatccagactacctaagtctggacaagatctctcgacccaaatcactaagtgacctgaccccaaccatttctgaggttcattcgctagtgtaatccgtttcatatgattctgactcaatatttgagacaaatagagtaaacaaacaataagatactttattaattgagtaaaagattcgatacaacttatgagtttgcaaataagctattacaagtcatataatcgacccctacactatccgaactatcacaacccatcatcccggccttgagtctcttgcgcctaagccaagtccttcccacaatcaccgttagttcctgaaagtcatagagccataagtactctcgttcacttagtaatatgcaagtccatgcaatgctctctaatccttacactactcgatccgcagagaggaatcagagtggggaagattgcaatgatctctaagacccgccaatcctccgccgagccgcatccccgcctcagccgatgcctcgcccgaactgagtcttatgtaggttgcacatgacccgaatactaccaagccctctagtcgatcctttcaaggatcccgactcctatatcgcatcctagaatccttactctcaaagtctaggattccttaccttccttcacgattttcagttatgccgagcccttcttctccttcgccggccatagtccggctaccgattccttcgacgatttattctcccaagagggcgagagtttaatggtgagttttggtgttttctgtgtgttgtggtgattccaaaggtcttggacgccctcccttatatagggtacgatgggatgcttcccgaagcatcacatccgttccttgcacccttccgaaagatcacatccgttccttgcatccttccaaaaggtcacatccgttccttgcatctaataggcgatgcaaccgttcattggtacccgctcgaccttacaccttttggctcgagtgtcagctgaccggaccacccagctgggtcagtacacgatcagctcaccgagttcagtcgagctgtcggtcagctcatctagctgagctagctagtcttccagctggtttagctcacctagcttagctagctagttcatcctagcttgtctagctcacctagctggttcagcttgaactttctcgtttatccgactaagtattttagtccgtttcttgaccatggtctagttttctcctaaaacaacctggcctctttatgaacgcgggacgcggtcgttacagatcccctgttactgaagcctattctgtaagggaccctctttgtctcttgacctttcaccttagccaaatgagttctttgatgatgcattgcttgattcacgttccataactaatgaatgttaaacggattggtagatttgaaaacatgtgtaggtcgagcataagagtcggattgattgattgatgagacatggctactgtttttaagtagaattcgatcttgcagctgagaactttcaacttggacattgatttcatctagtctatctggtgctttggctctgagtccccgctttcaaacctcacttccagcttgttcttgattgtttgcttgagggcaagcaaagtctaagttcgggggagttgataagtgtgtattttgcatgttttgagcatccatttttcatcattttagcatcatatcatcactgttttataccatttcacatcatttatcatcactttgcatggttaggatagttttgcatgcatgttacatatttgtgttgttttcaggtgatttggagctgtcgacgagctaactggaagaagcggacctgatcatgacaaaccactcgacccagaggtcgagtaggagcttcaagatctcaagagaccactcgacccccaggtcgagtagaagacaccaccactctatcacatcactcgacccccaggtcgagtgtcttcatcttcatctcttaacgtccactcgatcacatcactcgacccccaggtcgagtgacttcatcccattgtcagacctctactcgacctcatcactctacctggaagtcgagtatcaccatcacaccactcgactgcatactcgatgacaagcttcagagccttcttcattccgcactcaaccagacactggagcacaaggaagaaaagaagactccagctattcactcgaccactcactcgaccacatgggtcgagtactgttcttaatccgtcccaatacttcgtcgttttgagtattagggtttcggaatatttggctataagtagcatgtacttcacattttcgcagacaagaagtttttatctagttttatttccgcagaccttgtgttctagactttttgtaatccggatttctctttatctattcagtattcagtattcagtttctgttcttgatttcgtttactgtttttcattctgtcatcatcctgttgttacattgttgttatcatgttttcaatttgttcaacgtttatgttttctgcaatgatgtctgagtagtgaatatgtttctaggatgggttagagtagtgtaaattctcagtatgtaggtgattgagtattggttgatagatcccttttggattagttgttcttaatgcctattgctttatgatcaactggaatttagctcagacattttcgcgtctaggtattgtttcctgttagaagaacaaaggcaaaccctcatccaaactttagcttacctcaaacctaaaagaaagaaaagctggttagtg

SEQ ID NO: 29490 - DNA, 3303 bp, Arabidopsis thaliana landsberg
  unsure (1)..(3303): unsure at all n locations
aacagaacaatgtcgtgtgttttctttttctttggatagtctaatgtgtatctctttttttcttatgagaatttttgggtgtacacatcaaaaaatgacagatagtagaagaagtaaacctatgactagttcatgtcagaattgtaatacattgctattatttttgaagttttcaaatctaaaaaaaaaaaaattaatgctttgttggtgataataaatgtgacacatacccttgtgtttctcttaatctagagaaacaaaatctgacaacacttaagtcttagacattggcaaagtcaaaaagaaccattcacaaatccaatttactagtctcacttactaaccagacacatgaaaaacctaataaagaaagctagagaaaaagtgggcatatagatctaataacataggtctcaatttcgacgaaagatagacgacttttatgaagatccaagtaccgtctaagagagtttcaaaggtttaaaaagagtaaagactaagagtttaatacaaatatacggaagtaggaccaatttaagatttaaattccatgggtccatagtcgtgaaagagtattataaatataacgaaaattagactagtatgactctgaggacttatttgtaatttgtcatcttacagagagcattaacggtcataaaagggaagttggcatttaatgaatgggggcttttgttggagaggggagaattgaaatagtgtttctttcgtggctctaccatctcctctcacctacatcttcattgatttcaacttactcattcttttttttttttttttgaaggggtctatctttaattatggtcattattgcgaattatgcgtttgatgagttagtgggaaaattcaaataaagcacaagtgttatgtaatttttagctattaggtggtactatgtatgaggatttgattgatgacaatataattatgaaatatagtgtcattcaaattttcaaatagcttggttggactattcaaaaatatgacaatacttttcagctgcaatgaaagaaaaacaatcgtacaagtttctgtttttttttttctttttcaaaaggatatgtcataaattcataataagtaattacaaaaaaactcattccactaacttagttccataaaatcgttacgagtgattattgctgattaagtgagtatacacattatttgggatagaattgctgagtatactccaactgcattaacccaccagagctttttacgatgagagaagcttaattttagggacatggtggaactggagaaaaatacctgggaacagtgtgagactttgaatttaattagctcatttaagtgatctgaactaacgacatgtgtacgaaattaattatctgtttctttatgggtcaaagattaaaaatgctgtgcttctttctctatcagactatcacatggaaagacgaaacgaaatgagagtttttattacctagcagctcacagttatacataattaaattcatagaccgacaaatcacagatttgagaaataagtaaacaaaagtactgaagcagcgagcatttgaaactccaaagaccacaaaagatcacagttagggacaaaccatagctaaaacagagtcttctttaaaaacaatccgatgaagaaaaaaagttgaaaaacaggcaaaaattttacagatggaagacgataactgatcgaatcatgcaaaggggcttgaggacattttttagtagtgtgctttgttgttctctatcgatttgttgctgtgtctgttgttgccaaatctaacaagagcatcctcctgattgctgctgagcgagagatgcatttgcattggaagacttgagattgacatcaaccatatcctcttgctttgttgaagacaatgtctccattcccggcaaagctgctgctatcttgcggaagagcgcctagcaatacaaaaaggtttgaaatcataagaaaacaagatttgcacggagtgatagcgttatggatttgcggtaattgtttagagagtatcagtgaaagatccatacaaatgaggaggatgtaataatcagcaggttgggttaaaaatttataagtctaggttaattaactattgaatattgatggaactaaacaaagttagggcttagttgaactaagcagcaagtttttgttgtgcaagaaaccctcataaatgtgtcaagccaagatctttgttaccttaatgttgaagcccgctttggcactggtttcgatgaacattacattaagttcgcgtgccttagcttctgcttcctcnnnnnnnnnnnnnnnnnnnnncaaaatatttaatacaaaggcccaattggcagtaacaaatgtagtaggcaccatcaagtgtcaaagcgtgttgactataaagaaaccctgtaaagatatgcagttgagcaccaaatgattttccatttattatcttgtagggtcgtttggcaacatactcaataccaccagaaaagtaagacgtggtttaacaacagtttgtacttgagtaaaacaaaaaagacacccattcgtcttgtcaacatacttacgaaatcagagcgtgtttaaacaaggaggactaccaaatttcagtctcaattgctattaaacagtaatttgcacatcatggtttaacaagaaacaagtagaggaagagatggtagatcattattactttttgtccactagatcagttttgtttcccacaagcacgactatgacatcactaccacgttctgtcctaacctcatcgatccacttagtagtgtttaggaaggactgcctgcctatatgtcagtggaaaacaaaataaatctcgagtttcacaacgcacaatggatcaacataaagaagaaatcgaaacgcataaattcataagattactgaaaaccacatccccaagatctcagatatgggaaaatattcatgtgtttgagagaacgagtgaaggtacacatacttgcaacatcatacacaataacagcaacggaggaatccctgatatagctcggaattagactcctgaatcgctcttgcccagctgtatccctgtcatatgatttcggctctcgatgttaatcatcaaaaaatgatctgcaatgttattcttcagtattcgaaaattgaaagaggctcaagatcttaccacaactgaagtctgaccgttcgatcttcaaggtacattgtctttgatagaaaatcaataccaattgtggcctgatgattatgaaacaacataaaaactacttagaaaaggaagaacattccgtaaaatgacgataagccag

SEQ ID NO: 29491 - DNA, 1388 bp, Arabidopsis thaliana landsberg
gcttggattcctcactggactagtgcctcgtgaaaagtctatggtgttcgagaggatcctatttcgtgcaactaggggcaacatcttcatacgacagtctgtcattgaggagtctgttgttgatcccaactctggggagaaggttagttgcttatgttctactcctagacatataacgtgcagcctttttctattgtaggacttcagtgtctttcatactgtttatagtttctatttccccataggctcatgcaaaataacgtttttaattctttgtgtaattcttacgttctcatattcacatactatcatatatcatactatcatatacctcataccgagctacctatccaagatattttctacatggaatcctggttctgtcagataaaatatactcattctgtttgcctttgctaggaattgacttttgatctaaactaatgttacaggctgagaaaaatgtatttgtcgtcttctattctggggaaagagcaaaaagaaaaattaataagatatgtgaagcttttggggccaatcgctatcctttcagtgaagatctgggcaaacaagctcagatgataaccgaggtatgtattatcattcttgttcatgttcttagtgggaggtgtagtaaatatttattattgtttgttgtcatagacccttacttccctggatattttttctttgtacacggctttcttttgacatgagtcatacttactaacaggatttttgtattcgtttgcactcagatgtccaataaacgctaatccatgagaatataatgttttgacttttgatcattgatgttctgaattagttagaaatcgtttagcatccatgtcatgatgcatcttaggctagcaattttatgatgatactgtaagctcagaaactgtttgccatgtttaacttcttcacaatgtttcaggtttctggtcgattatccgagcttaaaaccacgatagatgctgggttaggtcagcgtaacattcttttgcagaccattggagataagtttgaactatggaacctcaaggtattatcctatgtggatcaatgttggggagtgttgacctattatttccactccatacaagatgacgtcaactatttatttaccctttgcaggtacgcaaagagaaagctatctatcatacattgaacatgcttagtcttgatgtgacgaagaagtgcctcgtggccgagggctggagtcctgtctttgcatcaagagaagtgagttgttcattttgttgcactgtcaattgcaatattgaataacacattccttgactgtgagttctattgtttttttatcgtttacttagtataatggggttttgttgtgcagattcaagatgcattacagcgtgccgccg

SEQ ID NO: 29492 - DNA, 2202 bp, Arabidopsis thaliana landsberg
  unsure (1)..(2202): unsure at all n locations
atataaagctatcaaattgtatcttagttagatgttcaatattctggttaagatgcaactgtaccaacagtattcatgttccatagcagagagcctgaaaggttgaatagaacaaagggatatgaaacgagttaaagaagcgaattaaaaggcccatctttttatctgtaggcccatacgaattacgattgtactggttcattgattcaaatactaactctctccttatccgaagttttaaaagcatcctaatccaaaacggtgaaataatgacgattaaaaccccaaaaactctggcttggtttccactccaagggtaaaatacaaaacaaaatcaacgaaactgccgtacaccgttgacaataaacaaaggaaaagtgtacattaaagaagaagaagaagcttcattgtacgcgtcacctacgcgaacgaggtggagacacgtgtccttcctaccactttccttttgaaaaacctctctctctttcctctaaactcttttgacccttgtttcgcgagctgttttgtacgccattagattgaaccctaaaaactctattattggattggatcatcatcgttaaagctccacgccttgtcccaatttcctctttggttctttccttctggtaagaatccgctctctttctctctttcttttttcttcatatggtacgtcatcggcgacatcaattggctcgatttgattcacctgtagctatcaatcaatccctgatctgtttaggtttgatctcctctgttttttcctagggcttgttattgttgtttctcgaaaaagaagaagaagcgatggtattgggattttagggattattgcgatttgttgtatatatatatatagaagctgagggattttgtgttgtgaagaacatcgaatcctgtttttttccgtaagaaagttcttagatttctccaagtgaaagaagatgtcatcagctggtgttgcgttaagtccggttcgtagcgagccattgattatgcctctggttcgtgccaattcttgtcttgattcttatcctgacgacaccatcatgatttaccttacacttcctggatcggtgataccaatgcgagtgcttgagtctgattccattgagtctgttaagcttcggattcagtcttaccgcggctttgttgtgaggaatcagaagcttgttttcggtggtcgagagctagctagaagcaattctaatatgcgtgattatggtgttagtgaaggcaacattctccacttggttcttaagctctctgatcttcaggttcttgatgttaagactacctgtgggaaacgctgcaggtttcatgtcgagagagggagaaacattgggtatgtgaagaagcagatttcgaaaaagcgtggaggctttgttgatcctgatgaacaggagattctttacgaaggtgagaagttggaagaccagagtcttattaatgacatttgtagaatcgatgactcggttttgcatctgcttgtgcggagatctgctaaagttcgagttaagccggtggagaagaactttgagttgtctattgttgccccacaagcaaaagataagaagggtcgtgaagctaagagcattgtgccaccaaaaaagctttctttggagccggtagttgttaactccaaggctaaagtacctctggtggttaaagatatgattcagtctgcttctgatggacttaannnnnnnnnnnnnnnnnnnnnnnnnnncgaaggtacgggaggagcttatttcatgcagggtccatctggcaacaaatttgtgggtgtgtttaagccaatagatgaggaaccaatggctgagaacaatcctcagggtttaccactttcgccaaacggtgaaggtttgaagaaaggaacaaaggttggagaaggtgcattaagggaagtcgctgcatacattttggatcatcccaaaagtggaaacaaatctatgtttggtgaagagataggttttgctggtgtacctcccacagctatgattgaatgtttgcatccagggtttaaccatcccaaaggaatcaaaaccaagattggatcacttcagatgtttactgagaacgatggcagctgtgaagatatgggtccactttcatttccagtagaagaagttcataagatttctgtgttggatattagactggccaacgcagacagacatggtgggaacattttgatga

SEQ ID NO: 29493 - DNA, 1124 bp, Arabidopsis thaliana landsberg
gaattcccttagtgattagtattagtggaacggacggagcatatggacagatggaagatgacgagggatcatcgatcactgttcccaagatcggtggccagatatgctcatattagggaagaatagagatgataccatatcataaaatgccaaaataaaataacatttacaagaaaaattaggatgaaaaaatcctatagattccttaaaagttcagagcttgcagaattaaaaagaaatgttttgttcaatgttaattgacctctaaattttgttatatctgaattccgtaaatttaaaaatgattaaatgttcacgtgaaattaataaaattagaaaagaagattacaagtcatagaaaaggaagaaagctgacgtggaccactgccttttgctcgccattggatggatggcagaaaaataattgtaagtaccttgtaataatatcgggttatgatatactataaaacattatcataaaacgccaaatataatctcacgaagagccgagctattacttataacttgtgtttttttgccttttatcttacaattatatatcagtacatgcataatgaattaggttttccattgtgtcaaaaaaaaaatatatatatatatatataggttttccataaacaaaaatctaatactgtatataaaaacacgcaaaaaagttggcggatgcaactgtgtgagaaacaaaaagaacgagtataaagatgcaacttatttaccgaacaaagagtaaaagaatcacaaacaatacgtagtgaactcaagcagaacaacgatgtgatcatatcaatgcagaaactctagggtacgtgatttgaataatagactaattatagtgaacagttaccatacaacatctaaagataaatcgattgatgttttcacattgtgactatttgatatcaaatggcctcgtcatattaaattggagcaagagtcgtaatcgatccaaaataatgggattgattattaaacaaaatagccgttgaatattaataaaaagaagatatagatggagataaaggagagtgtgttttaggggtatgccatgggtgaaaaatggctctttgcgtcgtccaaaaagccgctctataccaaaggggctc

SEQ ID NO: 29494 - DNA, 2460 bp, Arabidopsis thaliana landsberg
  unsure (1)..(2460): unsure at all n locations
agatctgacgtaagactctattacggggctaggaacctgaataggatggcttaccaggtttggttctttctctcagttgttttgcaattcatgatgtcagtagatataaatgtgtgtgcttgaattataaaaatcttttgatgataagcgtaaagcctatctctcgctctcattttgatctacagaagaatcatcttggaaacgctcttgattttgtaggaaaagtttaaagagtgggaatcagcgggtgtcaaagttgtnnnnnnnnnnnnnnnnnnnnnnnnnnnntggaaaggggaaactggatatgtgcaggtgagattgagaaacgtgctccttagtcaagtctgctgtaactcaatgtggatcaaactaatatatacataatgtgttgtataggctgcttttgcaagggctaaacagctatcagctcccaaggccacgggagcggtgctgtgcggacagaaacaaatggctgaggtatgcactgtttttgtttatgagaacctaaatgctttagaagatgtgtatctttatcattgtttcgatttgtattgttgcaggagataacttcaatgcttgtagctgatggagtctcaaatgacaagctgctcaaaaacttttgacagatatagttcttgtattatcgtataattttactgtttcttcacatcattattcttttgatacgaaagtcctcttcaaggcctctctaattcataaacacacagaattttgtagtcccttaaagattaatactactgtgttgattgtcaccacaacattcttttttgattagtgatcatgttaatgtccatgctctatatactttgcatatttcttctactttcaatagaaaatttctacatataccaagaagatttataccaaaaaatatcgtgaattagacatgtttctaattaggaaaagttccacaaaataaatcaccatcgttgccacatttaattaacgcggaaaaaagcttaaaagccattgatcgactgtattaaccactaaataagactgcacgccgttttcatagaagatcacaggacttggtgtcgttctcacgatccttcacgatcatcttctcttagtcaataaggatccatcaaggaaaccaaaaatcgaagaaaattagaaaaatcggaagagcgatcgaagaggattttgaaccgccatggcttcttcttcgctctctaatctgatgctcgccattcatgagaagaagacgagctccgttgatctctaccgtcctctccgcaactacgttactttcacctactctgagcgcgaggctcagcttatagacgacgatctcgagaccttgaagcagctccgatccgatatagaacgcgtttccgatccttctccagctgctcggcgagaccttctcatctcctattacaaagttctttgtcttgtggagacgcgatttccaatttcccctgacaaggatcatgtcaacgccgtctctttcgtatggtacgatgctttcaagcaaaagcataaagctactcagcagaacattcatttggagaaagcagctgttctattcaatcttggtgctagctacagccagattggactcggtcatgaccgcaccaccgtcgatgggcgtcgtcaggcttcacatgcgttcatggctgcagcaggggcgttcgctcacttgagggataacgagtccattaaggcgacgatcgggccgagcactaccgtggatgtgtcggttgagtgtgttggaatgttggaacggttgatggtggcgcaggcgcaggaatgtgtctttgaaaataccattgctaaaggaagtactcctggtgtctctgctaaaattgctaggcaggttagtgtcaaatcatgattgcatctcttttagaattagatttaatagattcttccatgattgattatgagtatatttgttattaacgtgcttagtttatggtgatgcatctcgattgaatttgcgctttgtgtctgcttgcaatcaggttggcatattttatgaggaggctttatctgcgctaatcatttcgccattgaaggatcatttcgacaaaggctggatttctcatgtgcagctgaaagcagcactcttctatggtgaagcttgctttagatatggaaaagagttgcacgagaaagaggaaattgcagaagaaattgcacggctgaggagtggagccagccgtttggcagaagcaaagaagtcgacaaggggagctcctgctcagcttatagaagcgatgaacataatagagtgtagcactaatggcaattaggatagtgctgtcaaggaaaacgacagagtgtacctcatgagagttccttctccttcttctttgtctccacttcccgccttctcaatggttaagccaatgaacatgactgatattttggatgcaagcaaggaaaaaatgttttcaatccttgttccagacagcagtgcaaaggctc

SEQ ID NO: 29495 - DNA, 1933 bp, Arabidopsis thaliana landsberg
gtgcctttgattctataaccaaatctgtgcaaatatataaagcaccatggtatattcaagttaaacctagatttggataccgcggtctgctgataggtaataagtccgtatctctttctctcatttgctttcttgtccatcacatggaaagagaatgtaatcatgtgctggctattacttactacttgttccatttgcagatacatcaagacattatttaccaattgatgttattaagcaaataatcgaatccatgtcctttgccaaacttgtaagcttacatgcttgttttttgaggatacagaaagttaaactttctttcaagatttatctgatatctaatttcttcccttctgtttcacatgggcggttattgtgaggtagaatgtcctgcattggcacattgtagacgagcaatcatttcctcttgaaactcctacatatcctaatttgtggaaaggagcttattcgagatgggaacgttatacagttgaggatgcctctgagattgtcaggtaatcgcttgaagccttgaagttttttatgttagagaagtatcttatttattccaaccctccatgatcatttgatcatcaactattcttttacttactaatatgtgttttttttcctttttgtgtttcacggcctgtttttgatttccactgtgaaggtttgccaaaatgagaggtacttatttattaaatatggagcctaacatgatttttatgtcaagcaattctgaatagtttaagctgagaatgctttaacagatttctattttaacgacctgcttctcatggttgagagattgattacaggtattaatgtcatggctgaagtagatgtccctggccatgcggaatcgtggtaagattaggaagaatttgaaattgttcctctcttaatgtcacactattgatagtcaagattgtaatatcccagtagcataggaccatacctttctaagatttgaaaaacacacaaatgtggatatactttgtgttactatactcctaatgcttagaggaagtcatggtgtaagggtttaagttagcattttcttcatggtcatgttttttggggtattttatagttttcactttgattactgatacaactatcctctttgagcgtaaggtttgtttccaatgcaggggaactggataccctgatctttggccgtctctgtcttgccgagagccccttgatgttactaaaaactttacattcgatgtgatttctggcattttagcaggtctagttcaagtagtgtacacatttgaagcatagctccttttctagtgttcgaatccaattagtattcaatcttgtaaaggaaaagttaagcttatagagatccggtaaaaggttattaggaaatgtattgcatcttaaattgtgtattattatctgtatgtcctatttagattctcatattttctcttgtatcttggtttgtaacagatatgagaaagatattcccatttgagcttttccacttgggtggtgatgaagttaatacaggttagttgtttaacacctgaaatccctgcttccatttctcatttgtgtttgcatctcttaagttcttcactagtcggtctcttgtctggcagattgctggaaaaacacaactcatgttaaagaatggtacactcatgactctcccactgttatcttgttgatcattatatgagctaatactatttgagttagttaattgatatgaaaactcttgcttctttatcaccttttgcttgatatgttcaccattctcaactgcaggcttcagggtcgcaacttcacgactaaggacgcatataaatactttgtactccgagcgcaccagacagctatatcgaaaaattggacacctgtcaactgaaacaatctttgacaaagattgcattatctgtcaagttctcgagtt

SEQ ID NO: 29496 - DNA, 2619 bp, Arabidopsis thaliana landsberg
tatcctttatttttcataatgattggcagcaatagagcgacgatccatcacttcctagtcaacgaaacaaagaaattaacggttggtttgttgcgcaaggtatcgtaacgttgacatgcatgatatatatacttgtcaaagagccgatcaataatggcttctccaaaatgagcaacaagcatcggttcaatgatggatcttgtcatattagccctcgttttaaccacttcaaatcgacgtgaatggtccacatcatcatcatcatctttcacttcactatgaccagttttgtatgaaaagagaagtccaaatattgtctcaaaatttttgatctcgaatgagccctcgttctcgataacttccttcacctcactttcatcaggactgtaatacggcaagttgaaagattccaaatctgattccttcacaactccctgcacactcaaaatactcctccagtatattattataactacgatcagaacttttaggttaccaaaaaaataaagaagtgtgactgtagtaagtacctcagacaccaaatcgaggagggaatcagaaaccaacgaccaatctttgaaacactctttggataaagggtccaaagtttttctgccaactaaagtgagagccatgcgtccactaggcattgtctcttccgcacgcattcttagaaacattgagaaatctttcttaaactgattccaataactctcgtacaaatttggagggcatggacttctaagatacacgttcttcttattttcctcaagcccatcaggaactttagaaagccaatggagacaaaaagatgaatggacaaaatgaagagatttgcttgggaaaagccttgtgtagaatgagcctgggcatcctgagacatagcaatttcctttaacattcatcttcagcttctcgtggaaggaagggatcaacttgaaagttgtgttgaagtcgttgtctggaagatcgttcaggcaacaatcgatctccggtagattttgaccattttgttggtatgttgtaatgattgtgttaacgatttcggacataaccaagaatgtattttctccggaagagcatcccaagtcagccactttgatgcaaccaggaaaatccattttcactatcatttcgtttacgcttttcatcacctccggttttgcatcagaagtaatacttttctaagaagttaaaaagcgaaattttatcacactttttaacatttgttgattcaagctctttgaatcaacaaaagaaagaaacaaaaaacacacacacacatttgataccagaaaaaaaaaaaaaaaaatctagattaatttctcctccatctttataaccaaaacatactagtttatcaataaaattaaacaaaaacaaattttcattatttttaatatcaaacaacattttggtaaataatatcatttgacaattcaattttaatattatgtgtaagaattccactaatgaaatgagcactatcatatttaataaattttgagaattctattatacaactatatttactttaaattaaaaattattatttgtaaaccaaaaactcgataaaaaaaactcgactcttgatctaaccaaaatatagattgaatatattatcattttcaaccagaaaatgtaaaaatataatttaaagtagcgtgggacattatctactaaatatagatcagagaaattatcattcagatcatctaatagtatagtgaattattgatatgcaatatataattgccgaagcttaattatggttcatagatatgttatagagaagtacatacctgcgcctcggaattatttgcataactgtgttctccatctccacccttcatgctaacaacacccatgatagagtctctaaatatcacaatttgatttgatcagatgtaatcatgaatatcgacattggggtacatatatataaacacaaaaggggtgaaaaataagatctttaggaatacatgaattattgacaagacatatggatcatggaaatctttgaaagttgtttttattaatgaagaagattcgtatgggtcaacaaaatgaaagatatggaaggacctggtgttattccaaattttttcctctttattttgccgacaaaacaaatattgtaaaacctttataaattaacattgtcaagactgatattttagaattattaatgtaccaaagaaataatttgaaactgaaaaaatatgacgatttatcgagtaaatttttagaggttatgttgtaatttgcttcctttaaagtttctctttatgttattaaacttatttgctaaatcagattttgtggtgaagattattagatgatttcagtatatgtttattcaaagatataatatttaatatatagtacactaactatacaatagatgattgaaataaatttgatacgacaaattttaccacattttctttgcgacatcgcataggagtttgaatcctaatttattttcattgtctttatgtaaaaatttatctctttttttttttttgaaagttacatttgtattttataaaacatgatatgaacgtccaactttaaagttcagatagaaggaatgtcaatcatacagttggaaatgcc

SEQ ID NO: 29497 - DNA, 2197 bp, Arabidopsis thaliana landsberg
tctcatgggcctatctacgctttatcaccagagaaaagaagggtcaatcccttactatacccagacgcggacgctgagaataaaccccctccttctactgccagtaacattagttgctctattcatctgacgtacattaaaaccctgacaatatcccctcccttcctgctcaccaccgagcaccaaatatagccacagattcagattcaagacacctgaagctaacaaagacaaaaatcaaactacaatagctgaaaattcacagttatagcattgacacatacaacatcttacttgctaaattgactggaaccaccactaagtgaagaaaaaaaagtttagaggatcttaaataaatcacttaaactcaaaagcatggatcaacttcaatcatggaggagatctaaaacgcaaaaaaagagggagaaaaaacaaaaaaacaaaatcttagtagagatagtgtaacgaaacgaaatgagattggatctgtagccgtaaatttcttcagatatagaacactagtgaattgataaagagaagagattatattagaagatctacaaagccattttcgaatcatgagcaaacaactgaacaagagtttaaacatgcataagctacttcaagccaccgaaagaatacgaatctcaattcaaacctcgtcttcttcatcgctactactctttgctggatttttttctcgggaaaattcgaaaaaaaaaaaagtgaattcacgcacctgagagatcagctcgggaagagaatcgattactttttggtcagcgccggtggttacgatcgtcgctttctcgttcgcgtgaatcaataggcgatgagaaagagaacaagtgaagaagaaggagagagtaacatgaaaaattaaaatgatcaattaagttcagtaaagttactgatagtgattaaaactgataacgatgtatttgcgcattatagagacagccgcttgtgacacttaaaagttttctctaattatataattctgcgtatggaggagtgtgctattattaactttgtttaaagcagattttgagagaagagaatgtaataaatagagactagtttttggattcaattatatattgtaaaagctaagaccgtcttttgatgaaacaacatctcttaaactatctcttctgcaaaaaacaacaatacaaaaaaacaaaacaaagccattgaaccaagctcaaactctttttaacgcttcttggaaacaccaacagtctttccacggcgtccggtggttttggtgtgctgtccacgtacacggagaccccagtagtgcctcagaccacgatggtttctgtttacattacagtgacaatctcagtcagtacaaacaaagttctatgtcgattatcagaacaacaagagagaaacaaaggatgcatcagtaaatcattacactacagattaggttttgttgccgaaaatgagtgtatacatgatttaacacaagagttgtgtacttagcttcttccatatagaaagttatgatgggcatcattatactattaacatggtatctaaaaactacagaggagagtgtctatatgtgttgtttgttacctgatcttcttgagacgctcaagatcatctctcaacttcatgtcaagagcattggaaacaacttgggagtatttcccatccttgtaatccttttgtctgttaagaaaccagtctgggatcttgaactggcgagggttagcaacgattgtcatgaggttatcaatctcagcagcacttagttctccagccctgaatataccagcaaaggaaaaaacatttaaaaacacacactagaccaaacttcttcaagaatatcaatctagagaagttctatgtgcaaagaaaacctaaatatctgatttcctagaaatcaatcaaaccagatcgagcaggtacaattctagtcaaagagctacattttctactaacatccaaaacctcgcaagattcataatccttatccatagaattcctaagtaactgaaagtattaagaaccaagctaagaaacaaacctcttgttcatgtcaacatcagccttcttgcacacaatgttagccaatcgccttccaatacccttgattgaggtcaaagcaaacataattttttgcttcccatcgacattagtattgagcacacgcagaatatgctgaaactcctcgttcgcaact

SEQ ID NO: 29498 - DNA, 1276 bp, Arabidopsis thaliana landsberg
aaagctcaagccaaaagagcagaaactcagtgtatctcatggcatacttccacacaaaatttaaacactaaatgaggaaaataattataccgtgggaggtagaaagcttccggctttatcacatcccatagaatcaactggtgcatcttcagaagatctcatttgacgaataccctcgagcacttcgacccagttttcaggcggatatcctggattataaacataacaagttactgtgtgtgaagaaatctgtaaagtaaaaaccaaaccaaccctatcattaagggactcggtgcatgataacatacctgctgttttgactgaagtcacagtgatgctagtttccgttgacctgcctgcaaaagctagataattaatatctcttgaccgtttaaagaatcttcttgatgatagaacttttcctaccaacttctattcagattaaatctgttgagacattcaagtgacaagaacatatcatgcaactagtttagaaagtagtcaggttctttggctattttttcaacctggtgattgatattaagtttaatgaatggttgggaatgtgaaagttgtgagtttataaaaggagacttactagatgaaggagatccaatagtctttttgtaagcaaaatcttctatatcgggtaaaccacacagctgatgcatcattagacatgaaaagatggaagacattacattaagcaacacataagactctaaatagtaaaatactaacacaaggtcatatatggtcatggaacaaatggcaacactaatcaaggttttctctcatttgctgaagcacagggcgaacaaatttaaaaacactaggatcactaacaacccatagggctgagtcagattaacttaaaactcaagacatttggacaaataagacaaaatctgagccaagtaagaacacactttagagaaattatcacacttgagagataaatctccagaacccagttctacaaaatgctaaactctcaattgaggaaacttactttgtgggtattgactcctttgccggaatatttctccagaggctcaaaaggttcctgctttagcctttttttccgggtatacactcgagtctccgacccagaagctccataggctagttctagtgaaacatactagtcacgctaatagcaacacacaatctccaaggaatttgaacagacagagcgagagagagaaaagaacctgagttggaatctgagagggggtgttggggttctaaagagatgtgcttagaacaagataca

SEQ ID NO: 29499 - DNA, 2465 bp, Arabidopsis thaliana landsberg
gtaatgcaactatatgaacactctgttattgtgaaatcattttctgaaatttttcatttttttgttttttttaatgccttaaatgattacagactcaactcaagagtatatacaatgcaatacacacttcctgagccctcccccaaacttaaatcacacagtccactgtgtgactaaacttagaagagagtactcaagacaaatccaatcacagaaacaaaatacaaaacaaatcacaagagatgatataatacaatggtgaagtgaggcgcttaccacagtcgaagaatgaacggagttggtcgtcaatggctgcctatgattgctcccaggccatagacgagccgccatgttcagtatcagctccagtatgagtatactcgacctcccttcttctgctgcagccagcaccgcagtcgagtgatctcctggcgtggataagctaatacatggtcgagtatttttcattgctctatggtcgagtatactgctgtactctcagagccagaatccacttcactcagctctttatacttatctcctgaaaacactaaccaaatgcatcaaaaacaacaaggaaaaataaagatatgtacaaagattgacaagggatttgctcccaagtgagcttattttaactctctaagcttgacttctcatacttattaggcttagggtgggctgtgagaggaaatgaggtctcctctccttctttagtagagtgattatcatactcattagggtttcttgacaggtctgcaattgggtacttagtggtcatgtcctcacagtaagcttctttttttatcaagatagtcttctcctctagaccattccgacgtgaattcacatccttctttgctgacaagtatagtggctccatcgtcaggggcgtccttgatattgagtagtacttggtttgcttttccattgagctccttgatttgttcctttagctctttcacaatatgtgttagctcttgtatggctttgtcttgccatttagatctctccttgagttctaaccaatcatttgacatctgagtgcttgccttgagttgtttggtcgagcatgagctttcaggacaagttggaggcttcttcaagttgttggtggaattagttggtcgagcatgtgttgaacttacttcattagctttcatgacctttgtgtcagaccccatcaagcccttgtaaacctctgagccaactactgccttgtgtgagtctaatgacttcttagaactcaaagtttcactaaggagatacccacctttaccactcttgatcaaaacagtttttgaattacttgcttcttcaagttccactagcagttcaccagttaactgttccacttccttaactaagaaggtttgttcttctattgtcggcttcttcatagcatcattgatatcaaacttcatttccaaattcttccccagattaagatcaatctttcctcgcttaacatctatgattgctccagctatagccaaaaaaagccttcctaatatcaagggatcttttggttcttcatccatgtttcgcactacgaagtctgtaggcacctccacatttccaatcttgataggcaaatcttctaataaccgatcaggtagtctaacagacctatctgtcaagatcaaggagatattgcagtatttatacttgttgaaacccaacctcttagctactgagagtggcatgagatttattgatgctcctaggtcacaaaggcatttattgaaagtcaatgaacctagagagcatggtagagtgaatgaaccagggtgtcctagcttttctgggacatcgttctcctgtatgatggcattgcactcatggctcagaactgttgttttctgaacctcttgaattctctccatgatcaagtctttgaggaacttttgggaatccgggatatgcgttagagcatcagcaagaggtatccttaattcgactttcttgatgttcttggcaaacatagctctatacttatcttctacctctttcttgtgtcgaccaggaaatggaagtggaggcttgtaaggaggaggaatgaatgctatctcattgtttttagcagcaactagttttagagcagcggatgatgttaatggattggttggtcgagtatcacggtcgagtatgggctcgagtacttcagttggtttgtcaacttgatcttcattgagactaaaatcctccccatcttgatatgcactgtcctcagtgactgacttgggtctctctctagtggataactctcttccgctccttatgttgatagcttgaacattaacatactccttgggattctgaattgacttccctggaagtcccgtaactttgggagcagaggtacatgcggattgtccttctaagtatctgactttggaattcaacacctccactatggtattcaggtcattgcagctgcagtccatcttctggtgcaattcaga

SEQ ID NO: 29500 - DNA, 2252 bp, Arabidopsis thaliana landsberg
aatccatttcttgtaataatatacaccaaaaaacaactcaggtgtactgaggcagatataataagctcagtctcaagtagatagatcatcattctggtttctcacttatttacatacaacctttgaaggaggatcttcaccagtcaccaacacgaccatatccactcaaaaccaaaaccgagagccccaagaaacccaaacaggatctttagattacatgtttttgtccctaattatatccctcaaataaactttttttcttttaacaatcagagttccttctcttttgtatcctaattctattcacctggagtaatagaattacaagaagagaaacaaaagaacaaaaaaaacaaactgaaatccccactccaaacttggggcaggactgtttttagttgttctgagaaaaattacctgacaagacttttgtcacgactgccaaaacagctcataatccttactatacaacgagcggtcttgtatctccaggtttgctacatgtcgatttatgagctgcgattgcattatcttacacacgaccagtcctgctgggaatatccaccattcactttcacccctgcatcccccaaaaaggtacagacatcacaaacccaacaaacaaaacataagattgtcacagagaaaggtacaactttgcatagtagtaaaactcacatgtttatattccacggctgaaatgggattttcttgctagctgatgattcactatgataatgaacatatccgcagagaaaagccacaaactgtcacagaaccaaaactcgtcagataatgtgagacatgcagcatgttctaaagaatcaacacccataatgtccacagatataactattatattcatcctcatgtgaactgaaccacattgcatttctccacataacaagttgtcaacaaagaaaacttaccacattgactaaggacatgaagttccacaatgcgtaaacacgtgctaagccagcagagcgtctgggtccatgactgaataaggcattaatcccagcggggaatggcagaagcaagccgagaggtaatataaacaaagccaaaagtacatccagcaaagaaatcgaatacagctggaggagtgtgagcaagactagactaaaatctcctaaaagtaacatcgagataactaagccaaccatatcctgcaataccaaagacgataacagagggaagagacattaaaattctagaaaagttgaacgtcacaacatttaagaatacattcataccataaagattttgattgggttcgtacctggtggcccacaggttttgtgttgtgaactaagaaagagagaaggaaaaacatatctctcttctctttcagactcggtaagctgtcaaggtcgattatccctccatagttctttctgcgtgtcgtataatcctcggtgtttgagtggggttggttgaagagcctactctctctcaaatgtggtggagaattttctttatgtgcattcacgccataactagaagttacaaaaccaagacatcaaaaagcagcataactagatacgaagtgcactacgaaaacatgataaacagtgacatcacaaaagaaatcttaaatttctagagtgatcaagaaagaattgtgatcatcttgtttatctagatttctcagttcatattttctattcaacctaaaccagcatagcacatacagaagaaagaatggtatcatgactattgttaccacgaaatggacattaagatagaatagatagacagactgcatgcaatttctcattcatttaccgtggctggatttcagtccatgttgtttcactgacacactgaggtgatgttggttcacaatcctcaacagtatgaatcaagagaccatattggcagtaaccacaagctgtagtctggaaccaggccagatcaacccgtatgccatgtgtttccagagcgggattagcatgagtttctaaccatctcagaacagaatgaaatgttgatctcagacgcccacggcgaacaagacgtaattgagcatttacaccagccaccagtctataccaagtagtaggcgaaccaagctgagaaagtaaaacaatgagaaagaatcgatacaacctttcatttaactgctgaaactgcttctcgttaactaaggaaccaacctgactcatcagactggtaagaatgttgtcattttgaagtgagaaaggagccatgtaactgccatcaccaccaaacaatatgggcattgg

SEQ ID NO: 29501 - DNA, 3377 bp, Arabidopsis thaliana landsberg
cctgtctatgatactactcctgacaagcgcgcctgctggtatatgccttgagaaaattggaaacggttcttacctcaacatggttcctcaccctgatggctccaaccgtgcattcttctctacgcaacctggaatagtattcttggctggtataccggatcaagattctggcggggttttggatgtggatccatctagcccatttgtggatatgactgatgagattcattttgatactgagtttgggatgatgggaatggcttttcatccaaagtttgctcaaaatgggcgttttttcgcttctttcaactgcgataagtccaagtggccaggctgtactggaaggtgctcatgtaactccgatgtgaactgtgatccttccaaactaactcctgacagtggatctcaaccatgccaataccaaaccgtaatagctgagtatacagccaattctacctcgtcagacccttctaaggtatatactctccttgaccccttttcagtatctaaaacttttgcgtttgtcatagagccccaagcttttttttctcgttgttcaggcaaagaacgctaagccaacagaagtcaggaggattttcacaatgggacttcccttcacatcacaccatgctggacagattctttttggtccagatgggtacctatactttatgatgggagatggaggtggaggagcagacccgtataatttcgcacagaacaagaaatctttgctaggaaagatcatgaggcttgatgtagataacattcctagtgggtatactttggcttttgtttatgtagttactgaatctgcaacatgtgatgcattacaatagcattatatgagtgtcctttgtcatttaccaagatccacaaatgtcttcaggtgcttctgagatctccaaaatgggtctatggggaaactactctataccaaaagacaacccttttcgtgaagacaaagagcttgaacctgaaatatgggctgttggattgagaaacccttggagatgcagctttgattcttctaggccttcttacttcatgtgtgctgatgttggacaggtaagcttgtttcgacaatgagtttttctttttattttgtttgcaccgttcttgatatgtttgttgcttaataggacacattcgaagaggtggatctcattagcaaaggaggaaactacggttggcgtgtttacaaaggcccggaacttttccatcctgagtcatcccctggaggaaacacatctgttaaatcactaaacccgatttttcctgtgatgggttacaaccactctgaagttgactcaagcggaaaatcagcttcaatcactggaggatacttctatagatcagagactgatccttgcatagctggaaggtgagctaacacacacactttctctgcttccatatttcttgttcgtctcacaatttatatggtaacaaaacatctttgcaaaaataatgctttttcttttgcaggtacgtgtatgctgacctatatggaaatggcgtgtgggcggggattgaaacgcctgctaatagcgggaactttgtgaccaacagaacaacctttagctgcgccagtgactcacccatgaaatgtagtgattccccgggaacttcagggctatctctagggtatgtcttctcctttggtgaggataacaacaaagacatctacttgctcacaagcaatggtgtctatagagtggttaggccgagccgttgcaacttgacttgctccaaggaaaactccacagctagaagaaaccccggtacctcaagttctccttcttcttcatcgtcttcttgttataagcatataaatggtttccatggaagcttggtggttttgtttgtgtctctgtctttgattctgctaggtttattaaactagtttgcaaaagttgtttcttgtttgtgttgaagattattatgaaattgtatgttcaggatgttttgagagaacacaatacatgtatgatgaatgagaccaacgatattctttcacaaatatgttcataatctttatttgtacacaaatccttagattatagtagtgaagggtgatcataacgacacagaccattcctaagcagatagaggctttccttagaaatcatctgatctggctgttgtaattttccctcaaaggccaatattactagtaattagcccacgaattgttttttgctctgtgttgatcatgttgtgaaagacaaagagaaaacaaatttccatttagattaagaaatgggtttatacatataaaaataaagtaaattccctacgtgttcttccctactccatgttctctccatttctttaacagatcagaaggctgcagaccaatcgaaccaagtcctggctctctttctctctctgtgtggtacgcttgcaaaattttcctggctttctacagcaagcttgatggcatattagatctcagaaaatgcaactgtttcctcaagtatcatcatctcatgttacaacactcaggcttgttctgtcttaagagcttatcccataagcatatcatctgtcttggcgactggtaatgagctgtgtagtagttctcaacacaaccaaactggcagaatctcagactgtgtctgtaatccactgggtttgttgtgttcttgaaatgctcaacccacattcccacacttacgtcctccatcttgaacagctggtatatgtgaacaacagagaatgagaagtggaaagaagatgatacaattggtttgactctctcttttgcttacccgtaatttatgtctctcaaacttgtccacgatgaagcgcgcaatgtcagaagatagaacatatccgggtccatttgcgtagggaggatagtcctcctctggccattcctgatataatccacaagatatatacattaataatgagtgccagtcttaaagtattcacagaactgacacttaaaagcgccgcactagttcatccaaaaggctgcatataaagatggagtgtgatgcagaaaaaatgtacctcatatgtgactgcccatttacccccacggagaggtttgtggtaataattcatgttaccaatgtacaggcttctaccttcgggtacttttttcacttcattgatcaccgcgccaagttttacaaatgtatcatcgtcacacttcattatgtactttgcagagaatgcaagagcctgtagcaatcgaagtcaacaaaaattcaacaatcaactccacagaaacactaaatcaggaacgattatgcagaagcatgacctatataaaatatgatactcactccgtgttcacatatggcaacagttttcagcacgacaagatcatagctatccatgtaaggaacaagtacaatgtcccc

SEQ ID NO: 29502 - DNA, 1746 bp, Arabidopsis thaliana landsberg
  unsure (1)..(1746): unsure at all n locations
ttgttgtccaccagcttcagaaaaggcttgatactttctggactgtatgcacatcttgcaaggttcagtatgagtatctgcggaagtatgtgaataagaggttgtcatgtaagaactgccgaggtgcatttattgctgtggagactgggccggctcctgttagtgcatcacttcagtatgcgcctccatctcatacaacaagtaatggctatggaggtcatggctatgatgctgtttcacgcatgcctaccaattccacttatttcttaggtcagtatccagcacatggatatgaatatgttacaaatgagtcatatgactggagctcatatgtgggaacatctcctgngaatctggagtcaaaccgaatgtcttcagcatccaacggatatccttataagctcaacaatggagtagtctgtaaaggaagaaaaaaagtcaaagatgggtctaacaggacaagctcgatgaaaggaacagcctctgatctgatatatccaagcccacccaactggtctgctgatccttaagtgattaaagccagcagacctgataagaagaggaatgttggttttgggtcatctggtaatggatttgatgagaacattacattatcaaatccagaatcgaaagcaacaaatttggatgcaaagatggaacatgacttcaaacatcctgggaagagttatggtttaatgagacggtggtcttctacaacaggattggatacacggaagctactgattcacaaagctaaaacagatattaagcaaagactagagattatgagattggcttcagaagctgctgcgacagctacagaggacgcgactccccttgatgaagtaagtgcgtccttcaaggtgggggatgatgtatccagattaggaaaaaatgtttcttttggtcatccacctgttcggaaaataaacgggccaataacagttccagactccgacttccatgactttgataaaaatagattagaggagtgcttcgaggctaggcaaatatgggcaatttatgatgaagatgatggtatgccacgcttatattgcatggtccgggaagtactatctgttcaaccttttaagattgacatagcctacttgagctccaaaactgacatcgagtttggtacaatgaaatgggtgcagtatgggtttacaaagtcgtgtggacatttcaggatacgaaactctgacatagttgaccatgttaacattttttctcatcttttgaaaggcaagaagacagggaaaggtggttgtgttcgaatcttccccacagctggggagatttgggctgtctacaagaactggtcactgaactgggacggatcaacaccggacgaagtgaggcaccaatatgaaatggtcgagattcttgatgagtatactgaacagtatggtgtgtgcgttacccctcttgttaaattagagggctacaaaaccgtgtatcacaggagcacaagggaggacagtaagaagtggataccaaggtgtgaaatgttgcggttttcacatcaagtgccgtcttggtttcttaaagatgcaaccagcggctttcccgaaaactgttgggacttagatccagctgcaatccccgaggagctgcttcacatcggagcaggaaccaattgatttcagtgaccctgtaagagaaagatggtttcacttttcagattgagaccaagtgtaagagttgttgtatcacgaagattgtggagttttatgaggactatta

SEQ ID NO: 29503 - DNA, 5009 bp, Arabidopsis thaliana landsberg
aggatatatcatacattaatgagttacattatcccgaaaacaaaatcttgaaatttaacattgataatttggacattactcgttatgtagacgtgtggaattggatagagccgttgaaccatcaagtgggtcttcaagtcaacgaactgaatttgattttacactcatgcgtacatcggccacaattttattcacactctactaacacatctggtgtccactttttttctttctctggattgatgtgctaaattttttgttggaattcatttattcaggtatttttttatatatataaattagaataaactaatttaaagaaagatatagcaattatgtttcacattttaacattctcaatcatttataaaactaatgtggtgatgaatggtatatatatatatattttttgttgtgaactaatggtaaatatttaaaataagacatacgtacataaatccacgggctcttaaagtcatgatgcggttaataaatgttcacataacggtaaccaagtggctcaaaatcatgaaacaacgtcacataatttatcttataatgtggataattagtaccgcattatttgtaagaaaattaaattaattatagattcacagctaagaaaatacgaaaagacagctcaacacttttccacttctattccccactgtctatataactctgataaataatctctgatctctccatctaatatctctttctcaatttcggttccactttcctttcgtttgcaaaaacccatcccatcaaaaataaacaagagggcctaaagaagaatcctaaagactttacgggtcttgtttaggataaaagaaatgcctgccggtggattcgtcgtcggggatggccaaaaggcttatcccggcaaactcactccctttgttctcttcacttgcgttgttgctgccatgggcggtctcatcttcggatacgatatcggaatctccggttagtgtctctctatttttcagattttacatttccaccccaaaagtatctatgtagtcatcaacacacccaaatcagaaataataattgtcgtttttgatacgaaaacattagagtacccaccccatattttcactttagtcatgatgatacacaaggctcaaaattacagaatcaccaacaatattgcaagtctttaaaattacaaaatcgccgcacatgttttaaaacagagtcatgtaaaccctcatccatgtctgataaattttctctgggatatctgttaatgaatttaaaatatttacaggtggtgtgacgtcgatgccgtctttcctcaagcgattcttcccgtcggtgtatcggaaacaacaagaggacgcgtcaacgaaccagtactgtcagtacgatagcccgacgctaacgatgttcacatcgtctctatatctagcggcgctaatttcgtcgctggtggcttccacagtgacaagaaagttcggacggcggctctcgatgcttctcggtggagttctcttctgcgccggagctcttcttaacggtttcgcaactgccgtttggatgctcatcgttggtcgtttgttactcggtttcggtatcggcttcaccaatcaggtcttattttttatctaaatattacattttttacctcatacttttgttttcttcaaaacagacccaaatagctccataactcggtggaaactgttatttgattttgtacccgtaaagtttacagaaaattcaagtccaaccttatactttgctttttacatagaaacccctatggatccgttaattttgtgttgagactgttgtctaattttatgaccttaagttctaaaatattacaaattagcctcaaaactttctaaattgttttcaattttactataatttacagtctgtgccgttgtatctctcggagatggcaccgtataaatacagaggagcattgaacatcggattccagctctcaatcaccattggtatccttgtcgccaacgttttgaacttcttcttctccaaaatcagttggggttggagactcagtctcggcggcgccgtcgttccggcactcatcatcaccgtcggttctcttatcctcccggacacaccaaactccatgatcgagagaggtcaatttaggctagcggaagcgaaactccgtaagattcgtggcgtcgacgacattgatgacgagatcaacgatttgatcatcgccagtgaagcttcgaagctcgttgagcatccatggaggaatctgttgcagaggaagtatagaccacatctaacgatggcgattctgattccggcgtttcagcagcttaccggaatcaatgttataatgttctacgcgccggttctgtttcaaacgattggatttggtagcgacgcggctctgatttcggcggttgtgaccggtttggttaacgttggagccaccgtggtgtcaatctatggcgttgataaatggtgaagacgatttctattccttgaaggaggattccaaatgctaatttctcaggttttgtatttcttcatctataacccgatttctggatttcggttatggtcgataagtaatcaggttattgtgtaaacggtttaggtagctgttgcggcggcgatcggagctaagttcggtgtcgatggaaccccaggcgttttaccaaaatggtacgccattgttgtggttttgttcatatgcatctacgtggcggcgtttgcttggtcgtggggtccactaggatggttagtgccatcggagatttttccgttggaaatccgatcagcggctcagagcataacggtgtcggtgaacatgatcttcacgttcttgattgcacaagtgtttttgatgatgctttgccacttgaagttcgggttgttcatattcttcgcgtttttcgtggtggtgatgtcgattttcgtctatcttttcttaccggagacaagaggagtgccgatcgaggagatgaatcgggtctggagatcacattggtattggtcgaagttcgttgacgcgagaagaatctaacgaaagttgttatctagttaatcaaatcaaagaggctgatagtactaaagaacaatgcaagtctgatttgagttatgaaattacaaatccaagtgtttgaattcttttcataaaagcttctatcatttagtcagataaggatcacccttaaacttagcatacgaaggaagatcaagagctttctctgcaacttccctgtcctcgtgaatctttgcaatgagactctccagtgaagagaaattagcctagcaaacacaaacaatatgagcaaacaaggaatattgcattacacaaaggagtcatatgaagaatgaatgatgataacgttataataacctcagggcgtatatagccaacgataataagacgtagctcttctccgtagaaatcctcagtgaaatcgtgaagcagccatggttcctatataacaaaagctaaagttaaagaagcaaccactggagtaagaattttgtttgaactttttatgaactcacaatagttttctccttgttattgaaataaggattccaaccaatgctcatgaccattttaaagacacctctctttgccaagcctgcccaaccaaagtacactcccgaaggatgttccactagctcatccgcataatcctttgttgacaagttagctaaaaacaaaacaaatgcagcgataagaaaagaagccatatataatgatgtaaaagagctgagttcaatgaggtttgtacactgaccggtggggattccgagtactttagagccacggccaaatcctttgatgactggacctccaatatgccatggatcaattggtaaagtgttctctatccctgcaaatacaaattacaaggtataaaagtctcattaccgagatgaacatgttatcaaggaagaggagtattgaacagagttcatgagtgaatttttacagtcttggaatggaggaagtccccatttttcaagtcttatgtcgagtagagaattgatgacttcatctgcagatgtataaagatgtgtttgcttaggcagagaaggaacagcaatcacttttgtcccagcagctttaccagccataacaccaggcctaccatttcaaacaactattagtgagaatgaataaaacacacaacagcaaaacgatactctagaagtaagacttacacagaatcttcaataaccaaacagtctgctggatctttcttcaatcttttcgctgcttcgagaaaactttttacaaatatgatcattgtcattaaccagacattgtttaattggaatcaatagatgaaaccacaaatgggtgataagagatggatcttacatatcaggagaaggctttcctttagagacttcatcactaccaacaataaccgagaagcattccttccaccctacacaaaagtgaaaccattttcataaaacaagtttacctctatacaagcttatgcattgagtaacaacatttcatataaaacaaaccttcatgatatgaaattttggattcaatatttgctcttgaagaattggaagccaaagccacaggtactccatgacacttcaaatgtcgaatcaacctattggcaccaggaagagatttgattttgtccatcctacaaaaccggaggtaatcaacaatatgaagattacaacaataaggacaaaagatcgatttttttttatggtaacttactgagcagagaacaaagggtagaattcagaattgaattcatcaactttacaaggaagttcataatcttcaacaatagtagtagcagcttctactggagttttgccaactattttcaatgattctcttccgtcccactgtttaccatatttacacaagtatttcctcaaaatgtcaccaacaacaccatctacaatgaatttttaaaaaacatcaaattcgaattccaagatatataaacagaaattgaaacaatctattgaggttttaagttacctgtgttgattaaggtaccatc

SEQ ID NO: 29504 - DNA, 1780 bp, Arabidopsis thaliana landsberg
catcgatttgtcttcgaaccgtcttgtcggtcccatcccaacgactctctctaacctctcctcttcattggaatcgttgcatctcttctctaacctactcagtggcgatataccgagtcaactcggctcacttgtgaatctcaaatcgttaaaactcggagacaacgaactcaacggaacaatcccggagacgtttgggaacctcgtcaacctccagatgcttgctttggcttcgtgtagactcaccggtcttataccgagtcaattcggtagactcgttcagctccagactttgatactacaagacaacgaactcgaaggaccgattccggcggaaatcggaaactgcaccagcctcgctttgtttgccgcggcgtttaatcgtctcaacggttcgttaccggcggagctgagtcgacttaagaacctccagacgctgaatttgggagataacagtttctccggtgagataccgagtcaactcggtgatttggttagtatccaataccttaatttgattggtaatcagttacagggtatgattccaaagagattaacagaattagcgaatcttcaaacacttgatttgtcttctaataatctcaccggagtgatacacgaagagttctggagaatgaatcagcttgagttcttggtattagcgaaaaatcgtctctctggttcgttaccaaagactatatgttctaacaacacaagcttgaagcaactgtttctgtctgaaactcagctttccggcgaaattccagcggaaatcagcaactgtcagtcattaaaattgcttgatttgtcgaacaatacgcttacaggtcaaatcccggattcgttgtttcagctcgtcgaactcacgaatctttatcttaacaacaatagcttggagggtacgttatcttcatcaatatcaaacctcacgaatctacaagagtttactctctatcacaataacttggaaggcaaggtacctaaagaaatcggatttcttggtaaattggagattatgtatctgtatgagaatcggttttcgggtgaaatgccggttgagattgggaattgcacgagactgcaggagattgattggtacgggaatcgtttaagtggagagattccttcttcaattggaagattgaaagatcttactcgtcttcacttgagagagaacgagcttgtaggtaacattcccgccagtttaggtaactgtcatcaaatgacggttatcgatttagcggataaccagctctcgggttcaattccttcctcgttcgggttcttaacggcattagaactgtttatgatctacaacaattctcttcaaggaaatcttccggattcacttatcaacctcaagaacctcacaagaatcaatttttcaagcaacaagttcaatggttcgataagtccattgtgcggttcaagctcgtatctctcgtttgatgtcacggaaaacggatttgagggagatatacctcttgagctaggtaagtctacgaatcttgatcggttaaggctggggaagaatcagttcacaggaagaatccctcggacatttgggaagatcagtgagctttctttattggatatttcaagaaactctctctcaggaatcataccggtggagctcggtttgtgcaagaagctgacacacattgatctcaacaataactatctttcaggggtgatacctacatggcttggaaagcttccattgttgggagagctaaagctttcttctaataagtttgttgggtctctccctactgagatt

SEQ ID NO: 29505 - DNA, 1953 bp, Arabidopsis thaliana landsberg
tgataatctattgaatcgtttagaacaagagtcaactttttaaagtcattttatagaatctgagtctactagtcgttgaataaatattcttaaagaaatgatttttataatcttcttctcgtcgactttatttattatttagaatcttgtatttgtttttataacccataatctagaatttgatgatttttcaggtataaagttttgtaatttacttttcaggagaaaaaaatgggtcaagctttgggttgtattcaagttgatcagtcgaatgtagcaatcaaagagacttttgggaaattcgacgaagttcttgagccgggttgtcactgtttgccatggtgtttgggaagtcaagtcgctggtcacctttctttacgtgttcaacagctcgatgttcgctgcgagacaaagactaaggtctcttgacacttcctcttgaatcaataccttactcgttctgtgtcattgaaggttgtaatggttttgggttactttgttgtttaggataatgtgtttgtcacggttgttgcttccattcaataccgtgccttagcggagagtgctcaagatgctttttacaagctcagcaacacgaggaatcagattcaagcttatgtctttgatggtttgtttcaatatccttcctttttggcttcttgatgttattgtgtttgccttaactaatcgatccaccatttttgcatagtgatccgagcaagtgtacctaagctggatctagactctacctttgagcaaaagaatgacattgcaaaaaccgttgagactgagctcgaaaaggtaaactactttccagccatctccttgagcaataattttgaaatttgtgcaaaaaattattatacataggttaagactctaactgctgttgtgtatataataggctatgtcgcattacgggtatgagattgttcagacactgattgtggatatcgagcctgatgtgcacgtcaagagggcaatgaatgagatcaatgctggtacgtttaaatcttgctatacaagttttcgacttttgtttgttgagaatctcacaatgttctgtttctggtgtaaacacagcttctagaatgagagaggcagcgagtgagaaagctgaagcagagaagattctgcagatcaagagagccgagggagaagctgaatcgaaatacctttcaggtatgggtatagcccgtcagagacaagccattgtggacggtctgagaaacagcgtgctcgccttctctgagtctgttccaggaacatcttccaaagacgtgatggatatggttcttgtgactcagtactttgacacattgaaggaaattggtgcttcttcgaagtcaaactcggtgttcataccgcacggtccaggtgctgttagggacattgcttcacagatcagggatggtcttcttcagggtaactctgctgctgagtagagaaatgtctcaaagtacaaaaaggctttttcagagttttagagttgtgttactacttgctactcagtttatcttttagcggtttgctctatatgggttcttaaatttcttatcgtttctctcttctaggcttgtggacttgatccattttcttgttttatgggtttgaggatagagtttgggcttgaaaaatatttgtgttattttgggttttaatgtcgttaactcgttattaatgttttaacagtggttaaagaatttgttaacgagaatcctgattttactgaataacaaccagattgttaacatttaataaacatttcaatttaataaaaagaagcaaacaataaaataacgttataagaataaaaggaaaacaattaacttgataaaacaaaaagtagctactttttaaatctctacgataccaaaccactgagatctgtgcttcactatttttcagaaataaacgatttcacgatcttaacgttccaaactcatcgatcag

SEQ ID NO: 29506 - DNA, 1507 bp, Arabidopsis thaliana landsberg
agagagaagctgaaatggttgaccgtgccgctgctaagaatctcctgaatgaggatggactccaatttgaaggagaacatcatggagagtttcaggatccaccacctcctgaagccattaatcgtcctactgctagtggaaagagttgtccgtgtagctgctgctaatgctgctcatttagccgcgttgaatgctaggcttgcgcctgttcgacaaactctaggagatcacgatgctcccaatcttgaatttttccgagacaggaaccaacacctcactatcaacaggaatgattttgagatcaagatcgggttgttgactcttgtgaagcataatcagttttatggtctttcctgtgagaatccggtctatcatttagataattttgaagatatatgtgggacaacgagaataaattgagtgtcagatgatcttatcaaatgtagactatttatattctctttggcagacaaagcccacctctagtttcagtcattggattctacaaatttgagaaattgagaagactacaaagctgaatttttgggacagtatttcacgcaatctaggacggctatcctgagataattctaactcaagcaggctcagggataattccaacctcctgcaggtactgctcatgtgtcttcatctggaatagtgagattaaattgatgatgtagcagattgtttaaggccaaaagaagaatgttgttgatatcaatgtaaaggtggatatcatgtacaatgatctcattgggaagttcacaacgctatcctcacatgtcaagactcttgagaatcagttctcgcagattgtttctgcctctatgcgacaacctggtgctcattctggaaaaaacaaacccaagggaaaagagcagtgttatgctgttatgattcaggaaaagatcctagatagattgatatcaccaaacaggtggaaactaatgctattgttgttgagacacttgtggaggacatgactttagaggatgataaccctttatttgtggagtcaccaccttatgttcctaagctaccatttataggccgcaagagacagattaaaaaacagaacattatgcacgctttgatgagatcatgaaacagttatatgttagactccctttcttacagttggttcttcatgttccaagctatataagttacttgaaagatatcttgtccaacaagaggagcattaaggaaggggttaagttgatttccaggagaagagtatgcttagtaggaggagtctcagagacaacagaaggaagctcaactcactgatgtaatagagttgttagcagggaaagaaatggtcagcacttgtagtgccatccctccagctactattcccgagaaactcggtgatccaaggagttttgttttactttgctagattggaaagtctatgtttcacacacgtctttgtgatttaggagctgtagtaaaaaaaatgcctctttctttgtcaaagcgcctggcatccaaggttcgtcct

SEQ ID NO: 29507 - DNA, 834 bp, Arabidopsis thaliana landsberg
taataagctttaaccagctctttttataaaccggcatcactggtacggtcaataatttgtgtcattgcattgatcagccaccagtaaccggtaaaggcattgtagctttgataccatccaaaatagtcttagagtttcctccacatttcattgtctgctccaaaatattcactagttgcatgaatatttccatcctcgtcacgtcgcgactcgcctacaatccaatatcgacccggtttcagtttaaataagatacattctaacacaatctcatctttccaagttaaacaaacttgtgtaacttatataatatacctcaacagtgaagcgagcccaaatcttgtctactcgagtttcgatgactcccttcaagatcgttaaccctaagcttctgatccaatctgcgatttctagaaagaatcctcgttgctcgcataacatctgttacaaaaccagaaaacgttcgatcaaaaccgagatcttgagtgttttttattaagaaccttaggcagaaatgttacctcgacttggaaaatgcgaggcgggtttatatcttctacgacaattggacacaccatagactttgaccctacttcgaaagcccatgttgctcccccaccctcctctttcatatcttataacaatacaacaaacgttagatcaagaatccatgagagacaccaaaatattattgttttatgttataccttggattccccggtttgcttcatcttattagaatgcttggagacatttttgcatgaagagcatgtgcttgatttgtcgttcaaggagtgcatcaatgctacacttgtttaataaaaaccacatgta

SEQ ID NO: 29508 - DNA, 2480 bp, Arabidopsis thaliana landsberg
ctctggctacactcctcctggaagagggctttcgagatgaagccgcattagtgctttctcctccggaaaatccaggtcagtagagaaaattgtactctcttttctgccatatggtctgagcgagtgcatgttgtacctaagatttgatcctcatggtacattactttttttttttttttttttttttagaagcggtacattgctttattaaacagtactttgacagctttgatgcgaaattttgtgataagtaatgtttgtgttactttttcagagtcgaattttccctctgctttttcttccaaatgttagttatgttatttgcatccaattgtgttgctgtgttgggccatatgttataagattgctaactacagttcttttctcttagtgtagatcctgatacggctaaactgaaggcatggtggaaaaacagaaagatcaggatgaatctttgtcagatctatcattcagagggaatgctggaggacttcgccaatacagcactggaggtggtacttaagtgggtttggcggcggacggtaatatccctatatctaactggattggaatgcgtttctcatattataaacatgcaaacaaaattgtgaacactgaacataaataattactgcttctgaagagaagctacttggatccacctgaacatctagcattttgttagggtttttaccatttgactacaacagaatgtctttcttttttataactattttgtatgctggccttactctgtatttacactcggcctgatgtacaacttaggtcaaggggaaaagaaaacgactggttctttcagagcatcaaagaaacaaaaaacgccgacgtcctagagatgctcaagcttcccagtaagtataacatatatcctccataatcgttaagcattgtcattcttgtctgcatattattattaacttttgttccggaacatgttgaacaaggttgagagggggaccaaaaaagtggcgcaaaatcagggcaacgttaaatgaaacaagaagaattagagaacgagctgctattaaagctcataacgaagatgtctgcagtgaatctgaggtatttatcaatttgaacacagtttcacctatccctggtacctgataaaaacttgtacctgaagacttttgtgtttcaacctacccaaattgggttacatattgtgggtgcagcctggactgttttttgttggtttgtataccattattgccgactctttcctctttggtttaattacttgcttttgccttttatattgactgggttatcctttgacgttgctactcaggaagaagttatcaaggatgaagagtatcaccgtctctttgtggatgtaattgactgttcccgtttactattatgtagtagattgtatattgttacgtttatagacctttttttgtttgcttatgaccgtgtgacatcattaatgccatcttgctttatgtttgtcatgactcctaaagttgcttgtcttgtagttgtgcaaggcattggcatccctacagagatattgggaagctctggagatagttaatttggctcggagattggatgctaaaatgctgcctgttgagacaaaaaaggagcttcagtcacttggagctagtgattacctaacccaaccttgattagtcattgtctttaactactgggtttatacctgtggttaacaacgctttcttctttttacagaaatatcttgcgatactatggatccaaagcagtggtttgactgtgtaagatctgtcattcagcaacatccatatcgtttgaatgcctggaactgctattacagtgtcatttcgaggtagagagcggcatttcacttggaaagtattgtaagcatgttttgtttacgaattgacattatgaatatcatattattatgtacagactagggaaaagagcatcgactgaagctaagttcatgcatcacttaaggagcaagtaccgagattgcgtaccccccattcttattgctggtcatcacttcaccgtgacaagccgacatcaagatgctgcaagagaataccttgaagcatataaattaatgcctgagagtcctttaattaacctgtgtgtgggtacgtatatattctcatattgttaactttcactttctcaagttttcaaaatcagttaaactaaaatgtcacctcttctttctttctattcaggagctgcgttaatcaacttagccctcggttttcgactcaaaaaccgacacgagtgtcttgctcaaggctttgcatttctgtacaacaatctcagaatttgcagtaacagtcaggaggcgttatacaacgttgctcgagcgtatcagcatgtaggactagtgactcttgcagcttcatactccgagaaggtgttagcgatttacgaaaaagaaaacacgatgccgaaacttcctaacgaggatccgattgttcggaagagcggaagcctgtgactgc

SEQ ID NO: 29509 - DNA, 4607 bp, Arabidopsis thaliana landsberg
tattcatccccatattatagattaattaacactaccccctattttgttagtatgtatgtccttagcttttaggaaaatttcaaattatatatatttatcatgaaaaggttaatttgaattttatgggtatttttaaagatggtaattcatacagaccactgaaaattagaaataaatactcacatgcatacaaaaatcggaaggacgtgaggagaggccattgtgattgatttgtattttgtaatataaattacatgtaaatttttcttaattaactagaatgaggtatttattctcatttggtaaaaatggcttctcgacattgtttttcactctcctaagtcatggttaacaaattactcaaaaaccgattagtccgccaccaaaaatcttgaaccgagaaaccagatctgaatgcgcaaatctcccggtttgatggttaacgaagttagtcaaacaatcattatgaacgttagatataataacacaaaatccaaattaaggctaataatagagtgtgcatgggaattatccgtaaccatgagccttgtagtactcaagattcgagaaaagtttcatcgtataacacgtccttaccgtttccggcaagattgatcgtttttccgtatggcgtaactagcgagtacatcgtaatttttgtcgaactggccgcttttgatatagtttttaacgtagttttcgcattgagacggaaccaccctacaggttccggcattgttggtctcggcggtcaatctccagccctcgcagtaggaagcgacggaagagcgagattcgtcggagctctggagcttgatgaaggatgagacgtgtgaagagatcgtaggattaattatgacagcgaataaagtgaggatgaagaaggagatcgagctgctacgagaaaacgtcatccacaacacaaagattatgtgcaagatagaagaaagagattggccctgaatttatagcggttacaatgttgtcttactaactcttcgtgatttcgatgcaattgtatatacgattcgaagtggacaattttttccacacattaatttttagtgctcgtacatttggtaacgtcttcaattgccagactatacaacttgttcccacacattaaaggttagtttttttggaggttcttgctgcaagttgacccttctaacatgatctttgtgttgcggattattactgtatgttaagttgtcggtcattgtgatctatagatccgtccattgtatacaataggttatcattgtaaaatgttaaaatcatccagaaaaattatgaataatgttaatatcaaatattcggacatttgtttttttttaactattcatcatcatcattataagaattaagaaatttaagaaatgatgaggaactctcaaagttttattcatactgattcagaaaattaagtttttaactacagcaacacaattatttaaaacttacctctataagttatgtttaatctgattttatgtttttttaaaaaatattgacaacaatgtaagtgaaatcttcttaattttttcaataattatccaatcacaaaaaggcggaaaaccctccaaattttttattcatatagattatagaaattattaagaatttgtctctttaacaattataagtacacatacaattagcacttctaccaggtttggatgcaatacattttccaactccattgtactccgcatagcagtactgaacacaatcagaagggtcacatggagatcctggatgaatgattatggtacaacgttcatcttctttagccttctcaaccaatgaaaaaactgaaaaagaaaaataccatctgttatgatatgaaactatatatatatgtgtacacgcttaaatattttatgtaatgtaaaaattaaaaactatttttttatatttgaaagtgaaaaacatgaaattacctgaaaacacaagcatgagtacgaagaaagaagaacatgatatcttagccatgatcaatatatatcacaacaaaagagagctactaatgtttgtaaattatatatgatattctttgtttgttttattgttctatatacatatatgagtatacatgatcttttctttattattcacatgataaaaacatctaaacagaaataaaaataaaggaaagtgaatgaatgttgaaaaatgtaagattgactacattgattactatatgcaccttctcaacatgttaaaataatagcaattaacttaattttttcccatgtgtttttcatttgtagttcatagatacgtgttatctctatccatttccatacttaaaaagtgtattagttcaaacaaataactaatacattaacattatcacattatattctctatccattttttgtgtcatgaacaataaaattaagaagcatttaattttataattattttctaaggaattcgaatttctttaattggataagaaaacaaaattttgttaactttgttgggtttgtaatagtatatcatttctttttcaatttcaacttctagatattctaccctttgcacaaaaaaagatattctacccttcgaaatcgatgatactcattgaaagtttggaaccaaatgtttttgatcactacggttaaaagttttaactttgaagttaacacttttaacttaaaatatgataaccacaaaaagcatacggactctagatagcttacggactgtttaaactgcttaaaaacgccgtctaagcttcttacatgctgccatttcaactaatcccaccgtcttaaactgtaatcgccattgtaaaaacttgcttcgagttaaaataatccgaaagtaaaatagttatttcggatatttacctatattagaaacaaacattcaacacaagctcagttcgtgaattggagaggtctctgactcaatgggagagatcacggactctttaataagttggagtcttttctttacaaatacaaaagatctattagatttcatcgttctgtgagttctctctctcaccacttgtcaaatgcatttccctgcgtgcagttaaagatctcccatagttttaatcaaaagccatatagtttcacagaaggccaagcgtcttcagctgctggacatgctcagttggtaaagccgggggagaccattctgaccccgtcatttcgccatctacatcctcgaccacatactcctacaaacaccaaataaagaaggtataaagaaacattgaatgataaacaattagaaaccgtagaaggtaaataaaaaacttacctttgttagcattcttttggcgagaatgtggtaatggcgctgccaaatgcgctgtccaaccatggttgcaaccaatacgctatagaatataccgataactgtaaatagacccagaattactaatgccgttatgaagagtaatggcaatccggcttcccctgcacctccaaggcaacctccacactcactaactgcacttgcacagccttcagtacatgcggtgcaatctgcccacatacaaatggttcctggtagatggcagtctgtgcatatcctgcatattgatgatatatatgtttattaaatgggagctgacaaaatattttcaatagtgtatgtaattttgttgtgttgtagtttggcagataataaactcgatcatagtagtttggcagataatatagatagagtttagcagacaaaagaagaggatctagttagtattctaatttttcactaactattgtgtaacagaattcctctggcttgtctcaccatttctagtctctgatgtcgcttattcaaacataaatcacccaggaaccaggtaaagcaaaagcccacatattcagcaaactattttttacgaaagtctatcatgtgaccaaatgaggaacacttataatcaggaaaacgccaatgactgaaaacaaaaacaaaggaagaagtatggaaattgtacccaggctggcaacaacagagacacaattcacggcaaggctgtgctaagtcattgcgaacccttcgatcatagcaggttatgacgcatccagatagacccagcagagcaaaaaataataaagctcctgcacacaacaaaatcctcatgtaaataaacaccagtagctcatacacacatgtaaaattttagaatcacttggtataaaattctttagtaacaaattttcatgaagagctgtgtaaaacacaaaattttaattactaaattctaatacacttgctttgaaaattcttatttagttaaaaattctacgaggtccagaactctaacagtatattcgtaacgtagccaaccccttaacttttgatctaaatctaactgatcacaaaacccttgcttcacttcctactacgtagaggcaatgaaatcatctaatagcaaactccttacattggaatctaagattctgattgaagcaaagcattaacaaggactgtaggacatatgtacaataataaacttagcattcccgtcttaccaactacacttggcagaggtcttactacaaaatattatcttatctagaggggaatttaattagaaattaaagtttgggatcataccacacatgtaataaaacgtgacc

SEQ ID NO: 29510 - DNA, 2187 bp, Arabidopsis thaliana landsberg
tcatttaagatggctatcaagatttgtgtttcaaatctgagttcatgttttgaaagcaaccgtcataatgattcttacatctctcaggacataataattaagaaagatatttcgtttggtattcgattgacatgtagcacatatgacattattcttggtgtttacagcgatttggagtatgggcagactggaacaatccttatctaactcttgatccggaatatgaagcagctcaggtaatggtctcacgtcccacattatttactggatgaaataaccgtgtaggagatgattattagagttcttcaaagcctgataaagtcaacatatatttttatcatatattgtagattgaagtatttggccagatggccttgaaagggtacatttatagaggtaggaaaccagttcactggagcccttcatctcggactgctcttgcagaagctgaactagaggtaaatttgaatcaataatctaagaataataataatattacggccagttcaatgcaaaacttaagtctgctaaagtcataccagtcttcctattctctttcttacttccgttgacattttaccatgatgcgatctgttgtccattagtcgaagactaattctttatgtatcaccaatgaaccctgatttaatgtagttttctattgctgttctcaacgcatgccgctttcatgaaataatattttgacaattccacactttaccttgttatctgatatcagtcccacatgtatctgccattatgtgtagtatccggagggtcatatttccaaaagcatatatgctatttttaaattggttggtggagcgaaaacaagccttttagatgagtttatccctaatatatacttggcagtatggacaactacaccttggactatgccagccaatgctggtaaggggttatattagtatatgtgtttctctcagctgtcaaattgcatcctactttactttgtatccgttctttctcatatctcttctccacttagaagcaataatacttaccttttttgaatgctatataagcacatttagtgactcttcttcttttctttcttgtcaaactttcagctgtcgcggtgaatgcaaagcttcagtactctgttgtggaagtgcagtcattctcagaagatgaatcaacagtgacaagcaataaaaagaaaattcccgggaaggttctaaagaatcaacaaaagcttttcgtgattgtagcgaccgaccttgtgccagcattagaagcgaaatggggtgtgaagcttagcataagtaaaacattccttggttcagatcttgaaaactgcaggttacattttaagttagagaataaaagaaattccagttttgcatgtaatgctataaattgaaccccttagtttatggtgtgtcatcatggttgtaggtacacacatcccattgacaacagagactgtccagtcgttatagggggtgattacataactacagaatctggaacagggttggtccacactgaaaatggtcatggtcaggaggattatgcaactggcctgaagtacgggctgcctcttgtctctccggtggatgatgaaggaaagttcactgaagaagctggacagtttagagggctctctgtccttggagaagggaataccgctgttgtcagttacctggatgaaaatatgtctctggtcatggaagaatcttatggtgagtttgattcaaatgctttctgaggaaccatttgaggaaacatttgctatagagtctcatgatttaatttccttcttgtcatgcagctcataaatacccatatgattggcgaactaagaaaccgacgatatttagagcgactgagcagtggtttgcatcggttgaagggtttcgcacagccacaatggatgcaatcaacaatgtaaaatgggtaccacatcaggtacctagttgaatacatactgagtttataagttgatttttttttcttcattatgtgggctaaaagtatcatgtgtgggtgttagctgtgaaaggagattcatagcacatgaaccacatgatctgatccaccttgctgtgggattttttcaatgttgagatgataccgtactgcttgacttaacgtctttccttactttatcttttttaagagatgcatatatattgtttggagtttaattttggtacttgttat

SEQ ID NO: 29511 - DNA, 2289 bp, Arabidopsis thaliana landsberg
  unsure (1)..(2289): unsure at all n locations
caaagcgtgaaccatcttctgcaagtctttttatgaaaggtcaccaaagtctctgcatacaggaaatcactaaattaatcagcaaagttttggtggatcacttgaaacaagaaattaacacaaaaatagtaactactttgaactgtgtttcaattgcgcagctttgttcttcgacacgaagtttgtcatcttttcatgcaatctttcacttgcctgaaaaagaaaaacagattactaccaaacatatccacatgaccatttgaaatcttaaaatgctgaaaagaggaggcaagatgatatagcaagacatacatctgcaatgtgagcatcacgaagctccacccaaatggcatcttcctcatctagaagaacctctttcttctcaggtgtctcaccagttttactcggaacctatacactaagaaataaaagggaaattaccatatgctgtagtgataagctacaactaacttttacaagattggaaagctaaaccaaaatgtcacctcgtgtgtgtatttatttccttccatattaagcaaatcgtggcacatcgcatcatatgtccactcatgaatgagaggtgcgatctaagaagcataagaaggttattctgttattaagtggctatgacatatcaagcagaactaattgtctcagtgaaattccttacctggtctatggatcggtccaagataagtagttcgcatgtttcagtctgaggaaaatcttcgattgtctgtttgtatcttgcaagacaattccatacactagcagcaagctttgtaggaannnnnnnnnnnnnnnnnnncattgttgtggcatcaagagctttggctccgcggtagcgaacaaagggatattcctgtacatcagaagaatttaaagattaaccgtcatagaaatgccaaatcaataaacaagctgtagcaatttgtgcctcgtacctttagcgaggccaaaacagtagcaattcgtttagctaccacattcaagcaagcatctgctctttgatggttttcgtcgtcacagaaaagttcttctaaagcattttcattatttgtaacaaacccctgccgagacataatacataggagcaattaagtaaatagaaacaacaaactggaaacgtagttaaaacacatgcattgctacagacaaattgcttttaatatacgcgtacaaactgctgaatttttaggcatgttctaagttgttataagtgacgtgaaagctgaattgagtttggcctcaagaaaagaaaccaccaataacttgatagggcaagcatgaaactcattcttagatatcacaatcatcaaactatgccaatcttgaggaacagacacaactaaatctggattttaaacgtataagatacctggatgtccatgctaatgtactccacgttcatctgcataatatagaaaatttacattatcttaactatcttgggagatggcaggccgacaccgaaagggagaaaatatataaaagtggcatatagaagcaacctctttcaatcccccaattcgttttatcgctctcatgtccttcttaatgagattcactaagcttctcgaaacaggagaactaaagaaaacaaaagccctgaagccacaataatgaaaaggattaatcatatcagaaaagacagtccatagatataaagaaattctgaaacaggaaggaagtgttcacatacttcttgtaaagtggtgactttccagtcatatctgataaaaacgcagtgacactgcaaaaacaaaaacagaaacttgagaaaatcataaaaatttcattggcgagaaattgatgtcaaagatggaagaattgttacttctcttcggtcggttgaataaagtatatgacttccattgctgtcataggttgcctnnnnnnnnnnnnnnnnnnnnnnnnnnnnnaatataacaaaacatcaaatgccagaagataaaagaacatttctaattctgaacaagatctttcttacaagaaatgccttcttgtgtgatctcagacattttgcaagcagatgacattatcttcacagtgaacttgtccataacaagtacctaaataatacattcataggttcagtgaatcaatgaacaaacccatagaatcaaaaacaacaaagtaaaaccaagattttaagataaaaattaccttccaagttaatttagagcttccatttctttctggcctaagcatttcacaaagtaatcctgaaaccaaaaaattgacaaaataattacctaaaatgcaaaacctgatatgccaagattt

SEQ ID NO: 29512 - DNA, 5159 bp, Arabidopsis thaliana landsberg
  unsure (1)..(5159): unsure at all n locations
aataaaagtatttaaattgatggaaaattttgggctttgtgttttttggtccataaatatcaaaaaaacttttcttaatcacggttttgtctgacaaaaacattaaattcggttgaacaaaaaaaatgaaaaacattaaaaattcatatctgtaagccaacaaagaaaaagtcttgttaatttacagaaaacaatgtcacatttaatttacagaggtggaaaattcaaagtctctttcttgtcacatcatcaattcacacacacactatgcatctcttcgttttcacaagctccctctccgctccgcttcttcttcttcttcttcttcttcttcttcttctttagttctttaggtttctctactcttaacccaaatccacaaaactgcaaatgctaaatcaaatctgttttcatcgtcccccaattccaaatgccaaactctttctcttcttctgacccatttctcaaaattctcaacttttccttcttttcactgatttgttttctcttcaattcttttaggtcagaaattctcagtgagagagagacgaaagtgaaagactttcgttgtttttagggtttcaatcttcagtatctcagattttcacatctgggtattcgtcttggtgcctacattatcttgttgacgtttagactatttcgaatttggtactcttctaatcatttgatttgtctgtattcattttttatcctgctgttaatgttactgtcgaaagttcggtctttttttgtccttttgattgaaaaaccaaataaaaattccatctgtaatagttggctgagattgagtacatatttagagtccatagaaataattcaattgctgtgttatgtagatggcagaaatggaggctgttgagaggaaacgatccagaggaggttttctaaatatgtttgattggcctggtaaatcccgtaagaagctcttctcctctagcagcagcagctcgaaactctccggtaatgtctactttaatgctctatcagttttggtttaagttcaaatggttcttgtcttgaagcccttggttggtttctacttgatatgtagaattttttggtgtgtgtgatctttgatgcattgtcctgtatatatctacgtggataaagatagtccacttcttattcagaagaacttcactttttatcgactttgggttcttgttcaatagactcaaactcttgtcttctttgtttgtatcagaaggatcaaagcgagagaaacaaaatgctcaaaacccctcaaagtcatggccctctctggtaaggcttctcaatgatttcagtgagtgacaggatccaattgtgttttatctgatcttttgtttaacagattgagggagatgagattggaaagaattcaacttacaatcccagaagtgactcgagttgttcaacatccactcccactagtgatgatggacaaggttccaaagctccaagtgttgttgcgaggctcatgggtttagagtctatacctgtaccaaatgccttggagccccggcgaaatcctgattttgatccatacttcctcagatcctcacgcaaggcaagcacatgggatgcatatgagaatttgggttatgtaaatctccgcagtgactatgatggtatttcttgggaccatttggattcaagaatgaacaaggagtgtaaccggcctatcgaccgctttcaaaccgaaacgttacctccaaggtcggctaaaccaatccctgtcacccacaataggctcttgtctcctatccggagtcctgggtttgttcagtccaggaaccctgcttctgtaatggaagcagcttcaagaatgattgaaccaagtcctcgggtagttgctagaacacggttttcatcatcgaattctccttcatcagttcctatgaggattcaagatttaagagagaaattagaagctgcacaganagtgtctagccgtcaaaactccaatgataccttcaaccttaagtacccaagtggaaagcacaacgagaagagaattacaacatcactcacgacaccgtcaactagtaagttcatggggaaaagcagtactgatggtttgaagggtaaagtgaagccatcttatgtatccgcacaagcaaaggccaatactattcacaagcgagacagttcaatgctctcaaatagctacagagaccaaaagaagaaggtggaaactaagaaccgcatagtaaaaagtggtcttaaagaatcttctgctagcactaggaaaaccgttgataagccaaataaccagaaacagaaccaatttgctgaaacgtctgtttcaaatcagagaggcagaaaagtgatgaagaaagtaaacaaagttttggtggaaaacggaactacaactaagaagcctggttttacagcaacatcagcggaaaagagcacttcttcatctttgtcccgcaaaaagaatctttcccgcagcaaaaaaccggcaaatggggtgcaagaagctggagttaacagtgataaacggatcaaaaagggtgagaaggtgataaaatgtaacatcaccgtcgatggcgggttgaagacaggggacgatgatcgaaagaaggacatggatgtgatttcgttcactttctcatccccgatcaaaggtttatcatcagattcgcaatactttttaaaaaagaatgatcaagatgcagagtcagcactttgtttcaataagatagatagtgattctctaaattttctgttggagaaaaagctcagagaactaacctctaagatggagtcatcttgcagtagtctgacccaagaagaagagtcttcgggttccattacaaaggattgggtgaatgggacaagatcattgccgtcagatgatcaggataacggtttatcagaaagcgaatctgattctgactatagtagttcattctacaaaaagaaaatattccaggttagttagtcatatggcaaattcctttctccgcacaaggatatgtctacttttagtagcttatcaatgttctataattcgctatatatgtttcccgtaaggttttctgactccactgacctttgaaaatttcatattttctatgacgcaggcagaagatgatgaggaagttaacagtttcagcactgccgaaaatctccaaatctcctgcagcacgagtttctcaagttcacgcaatgattatcaccataacattgaagaaaccgaactctcagaatctgttgctttatcagaagctgaagaaggtcatgactgggagctcgagtacataacggagatcattgcctctggccaactgatgattaaagaattctccttggggatggctactgatatattacctctgagcttattcgatgaaaccgaaggcaagagagatgctcggggaaagatcgagagaaaaacactgtttgacttggtgaatcagtggttaacactcaaatgcgagcagatgttcatgggaacctgcaaaggagtgttggggaaacaagacatttttcttgaaaggagagagattttggcagaccaagtgttgaaagaggctcagggattgaagaagatgagagagatgatgatggatgagctagttgacaatgacatgagtagttgtgaagggaaatggcttgattacatgagagagacttacgaagaaggaattgagattgaagaagagattgtgtccgaattagttgatgacttaattaatgatcttatcatgtgttgttgacaccaatcctttggttttcttctctccaacatgagagtgaaattgttttctataggataaaaacaagattaggctgaactaaattctgtcacaggctgaactaaatttttatctctgaaatcgaaaatacttaaaagtcttctgatagcacatgaacataaaagtgtcttatactaaaaataaaaaaagatggggtgttccgagaatcgaactcgggacctcgcgcacccgaagcgcgaatcataccactagaccaaacacccgatttgttaaatcgatagaggtaaacatatttatacggataacatatcaccaccgtctttatagggagagactctagttgtttgttcatcggagacggaagaaaattcgaatcatcagtgtttgtttcctcctctcttaaagcttagcccttctcaggtcattgttcttcatggcttcgagcaacacggtaagcatacggtagtttctctagttttacttagggtttattgggatacgaatctgagattgctttctgtgtttttgtagactactggggttgataatacgtttagaaagaagtttgatgtggaagagtttaaggagcgtgctcgtgaacgcgaaaagaaggtttcactctctccaatttcacaatctctgatctgttaatttttcgattttgaaagctaaaatctgttttattccatgatgcaggaatcggatcggtctaaatctcggtgtagggtttctacttatctgattttaagcttatctagatgaaatttaagtagggtgttgtttttgcagccaaaggtcctcctgtgcaaagagcccctttgaagcatagagattatcatgtagacctagaatctcgtctgggcaagacacaggtatcatttgctctcttttcattgaatagaaatttgcaagcttttctttaagacagagaatttgtgaaagtaaatttggtctacttgttcttggacatggatgatgtttctatctgggtcccttctacattacaggtctactttttaagcattgcacttttggtttgtttaatctcaagtgtgttaaaattatgcgattcatatatcaatcctgcttgataatatgctagtacctggttctttattaggttttataaacgtttggaatctcagttaaacagatgaaccattgtgaataccttactatatagcaaacggcattgatgttttttttttttatatattgcacgattagtttttttttattccaatcttttctaccattcttttgatatggattagtctttccacctgaggtttcttcaaagaatctaacgttcgtgtttatattaccaggtcgttacaccggtagcgcctctaagtcagcaggtaatggctcttatttacctctactgctaatatgaacttaagcaaaaacttgtaatcacatgagaatcga

SEQ ID NO: 29513 - DNA, 2236 bp, Arabidopsis thaliana landsberg
  unsure (1)..(2236): unsure at all n locations
agacatttagttatagtttcaaggaaaccttcagaaccagcctcatatgagagtttgtcttcacataattcagggtcatctaagaatttatctatcacattgccaattaggagatcatctggtggttgtgaaaaatgcttttttattgctctcaagactctccggagtttaactagtccagttctctgagacaagaaggatatgcataagattaccagagactatcttgaaaacacgacacatgtattgaatactgctacgcaacacattctgtattgagtgcccacgtggtttaaagagtgcattcttataacttactcattaaaccaaatatttctgcaattttaagttacatgagttacaataggtgtttcggaaaccaatgtcggatatgtactgaacacaactggcaacacattataatttgtgtgtgccatgtaggtaggccatgcatgcttaaatctatatgcattgattgataaacaccagtagacatgtgagcctagttacagaagtgaatagctgttttggtaacttgcaatacattttttttactcgaatagaaaaaccttgaaagctacaaacttgtgctaatagttgttaccttctcagtgctaccactacaatttaactttgattctatatagataaatgcaccaagtacaagaaactaaactttggcacgcacatatcacacacatgaaaatgagcctaccaagttaaggaaagatcactcacagatgaagctttggcatagggtagtatgtactggaagacatcaacacattgttccttggtctgataatctccgcggctagtgtttttgtgcacagcaagctcatcttcgtaggaaccatcgactctcagatttagaccatacaggcaaaaaaagcattgatctaaagcgttgttgattaacaactcaagttcatctttttcttcttcagcaacttcttctgtgtgttctggaatctgtttgctttgttgatctgactgttctttctccctataaccaacttgttcttcagaaccatccttcttagactcagttttgatgatttcgattttctcaacatgcacctcttcgagaaatgattttacttcatttctgcataatttgtcaggcagtcccatatcatgtccaagaccatctggggagttaatactggatttgactttcatgtccactgccaataaatgcttaatcgcaaatctaagaaaagctccttcttcccccgcacaatttttaccagcgcagcagagcccatattcagcaagcaaatcatggagtcttatgatcaactcaacctaaaaaattaaagaaattccaatatcactaatcagcagaccaaaatagctctaaatatcatggctgataatcgtaggcgataacattcttaatttgtctcaccaaacagactcgcttaactatgtcaaactgagagtcccaaattccaatatcaccaaaaaaaagggaaaaacgagccccagtaagccatgtcttacttggtatttagtagatatagtagcatcaaggtgctgaagtttacagaatccaatagctgcatcgannnnnnnnnnnnnnnnnnnntcttcaatcccatcagcattttgagaatctgaatatctcttagaaaaaaaatgcctcacgatatttgacataactctcaaaagcagagcttgtataccagctacacaatctcttggggcaaccatgtcatcctgcacatcaaacatacacattgataaacacggccacaataataattgtttctaggaccaccataaaatgttctaatattcatccttctacattttactgcctagtaattaaaccatgcaaatcatatctaaaacattatactctttgagctgtctatagtacaagagcctgaagattgtcaaattttgaattagcatatcaagcaaggaataagcagataatgaatttaaatgattcaaacaagctcaataaccttctgtataatttatcttatacgcttgtgctagcatgatcagaatcacatatccaaagcaaacaaaggttattagcttttcaaatattacttgagaaccataacatatatgtcacaacaagtttcagacttacagagttgcctgactggccaagggagttcttcacttgagagatacagagaagaattgccttgacttcctccgccaccaagtgatcccaactctcacttgaatttttggacgaggctttaggtgtcac

SEQ ID NO: 29514 - DNA, 1496 bp, Arabidopsis thaliana landsberg
agactgatagcaatttcgtttagataaagataatcaaaatgacctcatgaatttttttataaaatatttaacggcgttaaacgtgaaatttggatatattttctttcataaaccgattttttttcctgtaaaccgatttgatcattttttttttttgagaaagatctatttacatcaaagtcatattcgatgttaaggttttttttattattccctaacccctaataactattttaatgtttaacgtccgatggtataacggaaaactaaatttgagtaccaaatacaagctttagcgcaactaacataaacgtgtaggaaaatttacacatcaccggaaaatactgttagaaattcctaacaataatgttgttttctttataatgtttgctgtaacaaatcaattggtatcactaattactacattgttagagataacttaggtctcttttattattatccgactatatacactgatttttttggaatcggttatctcgttagtagctacaaaactaatttccttccataatgtttcgttttctttgtaaatatataaaaccaaaagaaaattgaagtgtcatcaagaaagaaaaccaacagaagaaaaaaaggaaaagaaaaacttgtgttgccattaaagctctagtttagaattggagaaagtttttataacaaaagaggaagaagaagaagaaaatgagaggggaaaatagtgttgcgattaaagccctagtttggtggcttgtattacaagctatcatatttcaaggggattcgatggcaggagacgtgggtttcacgctaatgatgaagaacgaaatgtttggcttgaaacgtccatcggttctctaccggtgcaaggcttatgacaaatcccttcggtggcacgtatcgattcccacggcagaatttacatgggatttcgaagtcccaccatttggaacaggcgtggtcatccaccgttgtgaattcaaatcaagccaagggacagcggacgtcgaaattaagacattgtcgatgacatctacgttgtgcggagggcatttgtgtaaatatgtcattaggccgaatggtgtatacttcgttggttttgagacctattatccgcacaatattttcttaagatttcttgagttcgtgaggcctgttgacaagcttgtcgagccatggaaggcgtggtctccacgacagctaaaggctttgcgggaacgcactaacaaccgcaccaggttacacgaagacaacaaccgcaccaggttacacggtgacaaagatgctgatgaggacgagaaagacgatgattaggacagatcatttctgtaatgtcgcttaccaaagtagcaaaaacgttttactaaaaaaaggcaaagaaaaacctaagaaagagaacaaaacgttagaagtagttgcttttatttgtggaggacaagattttttttatcaacagatggtattgaatcgatcgtgttggtcattttcgttaaatttgtatc

SEQ ID NO: 29515 - DNA, 2730 bp, Arabidopsis thaliana landsberg
  unsure (1)..(2730): unsure at all n locations
taaacaggtaaatctctgcttaaccttaaaaagtttttaccttaaggtctacgtaataaaatcttgttttcttttcatcccgaaaagggtcatgaagtagatgcatttggaattggaaccaacttagtgacttgctatgcgcaagctgcgttaggttgtgttttcaaacttgtggaaataaacaatcagcctcggatcaaactttctgaagatgttactaaggtttgaattcttgactcatttccccattgagaatgttgcttcaaactttctgtgttcttctttatataaactccctcgcttttctttttttgcgtcttcaggtatcgattccatgtaaaaagcgtacttacagattgttcggaaaagagggttaccctcttgttgatataatgactggagagaacgaaccacctccaaaggtaagagacaaaggcattaggctttcttgaaagctttcaagcttttttatttgccttctgatttttttctggatcctaaggtcggtgaaaggttactttgccgtcatccattcaatgaatcaaaaagggcttatgtggttccacaacgcgttgaagagcttctgaaatgttattggcgtggcaatgcaggttaaaacagagctctcaattcttacaggtatttgacatatgcttatgactcattataattttcttttactgtcatgaagatgaagctagggaagagctagagccattgaaagagctnnnnnnnnnnnnnnnnnnnnnnnnnnnnnnnnnnnnnnccgatcatatgagaagattaaaccctactccttataaggtataataatccaacaaaacacctgagaaaatctgtttacttacacttaatctgtttgtattaagcgctttctgcttctgagagaaacctaattgtttactttgcaggttagtgtcagcgccaagttgtatgacttcatccacttcctctggctcaacgaagctcctgtcggtgaactgcattgagaatttacaaatatgggttgtctggtttgttgagtgtgtgtgtataaccatagtatcagctttgccactgatctcactgttttcacaacaccatcaaaaaattatactcaccaataatgttttgaatgttttggccattttgtggaaacgtataaaggggaaatcaaaaatcatttgtatcagatcaaagcaaactgagctcactgaggaactatcaccacagcaagagagtcgccgcagagattagaacgagagatgacaatccaatagctgtagaatcagcattacccgcaggaagatttcttggtttccgtgaagtatccttcctccggagactggtgatggagacgacttcggaggaggagcatcacaagtgccaaaaggtgcgtttgactgcatatatgcaaatacacatatatcattagctcaatattatgaaagaatccaatctggttcaatgtaacgtaccttgcaatagactaagctgtcacaaccacatgtgagacgaccgtttgcttcatctacagcttcggcagctcctccactatcactcctctgcaattaaacatcaatagtagaagagtttgaaaatttgacttccagaagataaactgtacaaatagttggattggtcaaaagttcacacctgataaaaatcaacagctatgaagttaggccaccttttacccgctgcttcatggcaagttctcatcatttcgatcaacggagaggaattatccgcacacgcttgcgttgaattcggactggtttcaaagtagttctgaaacaccaaagaccgagacatggtatctagtgaagaagattcagatcgactcgagcatgatccatccttcattccatcattaccatctacataaacaacacaaattaaatatcatattgttaagctgggccttaatcatgtttgatccaagttcataaaaactcacactgattttcaaccatgtaattccactggtaagcaagaccttcagaagcttctttatccttcttggaagtaaaaaccacaagcctttggttctgcttcaccatatcatcaaccgttggccagtctgtaccgtctttcggcattctcgagattggtaacaagaacttactcaatccagatgcattgaatacattagtcaatcccatttgagatttgacataatcttcaagtatgatagtaccaatctcagacaagtttgattcaagaaaatcattgatctctttaagtgcattgatagctggttgctgcaagttaatttcgttagaaaccaaacttaatcactcatagaccacaaaatcgaatgattcaaattgcaaacttacaaaggctgtgaagttaaagcaagtccctccagtggaatgacacaaccatatatcgttttgaaaatcatatgtatctagcattatacctctcacaccattctgcaaccaaacaacaaattgacaattcaacaaataatggaggaaaagtcaacaaattagaatgttacacgtggaaagtaataaaaagtcaccaactaaagctgagattgtcttttattgaaacctaaaggtaaaagatacttgcaaattaagtcaaaatccaaatttagctaaaacagaattctaatacgaaagttgtcaaaataagatgaaagtagtagaccttaagctgattggtaatggagtcttcttgattctttggagagacaaggaatgaaccagttgccgaatttgcccccgtgattgcgta

SEQ ID NO: 29516 - DNA, 1204 bp, Arabidopsis thaliana landsberg
attggttggtaaattagtaatccctttggattgaaaagcataaagatcaactaattagtcgtgactagtaacaatgatctagatcaatttttactttctttgcgaagaatccgttgtaattttaagaatttttataggtcactgtttttttatagataaatttattagcatcaatcagatttagtagtgtagcacttgggcatctatatatatctatcaggtagaacgtgtatgtgcatgcataaggatgtacagtgcttctataaatgtatgtggcagtaacgataggagaaaaatcacacaaccaaagcgtttagaaaaaaaacagcgataaaaccgaaacatcaagcaaacaaaaaaaaagaggagaatttttttcttttgttttcgttttcaaaaacaaaatctttgaattttatggcaacccgtcttctccgaacaaactttatccggcgatctcaccgtttacccgcttttagcccggtgggtcctcccaccgtgactgcttccaccgccgtcgtcccggagattctctcctttggacaacaagcaccggaaccacctcttcaccacccaaaacccactgagcaatctcacgatggtctcgatctctccgatcaagcccgtcttttctcctctatcccaacctctgatctcctccgttccaccgccgtgttgcatgcggcggcgataggtcctatggtcgacctagggacgtgggtcatgagctctaaacttatggacgcttccgtgacgcgtggcatggttttagggcttgtgaaaagtacgttttatgaccatttttgcgccggtgaagatgccgacgcagccgctgagcgcgtgagaagcgtttatgaggctacgggtcttaaagggatgcttgtctatggcgtcgaacacgccgatgacgctgtatcttgtgatgataacatgcaacaatttattcgaaccattgaagctgccaaatctttaccaacatctcacgtaagcctaattcctctgtttttcttctttgctctgttttttctgattattttacattaatccctaatcattttgtcttaaaacgtaattatttgttaatgggaaacgtaattatcaaattcagacaacttgtttggttcgacagctaaatctccgtactctgacaaagtacacttgcatagatatgtactacatttattatatctatctattttcattc

SEQ ID NO: 29517 - DNA, 1212 bp, Arabidopsis thaliana landsberg
aacatttcggtatattctatgctccataacacaaagtcaagtgaaataatacaatcatatatttctttttaggtcacaaaatattctatgcttgataaaacattgttttatggataccaaaaaagcaaaaagaatacacaataatacttgtgcaatgcaagtgtcggtataccaaacccactactactccgactctccgagttatataaccgctccattatcaataaatctacactttagcatacgtataaccgactcaaacattttgcttttgttaaataacaaattcacacactcactctactttaaattaacaaacgaatctttaatttgataatatggccggattttaagaatggaatcccatattaatatcggaacgtgtatcttagtgttgaaatattacaagactctttaagagaaataaattgcaaaggccaaaagaatgcataaatctttgtcgccaagtgctactattttctgattatttttgcatataaaagtttttattattattattatgcatgttagaaaacttaggggtgcatggctccttagtttttgagacttggctccatattggaagttgtcatgtgatttggttgatggtactttgagtggaagaaggaaagcggagttgtgtacgcggtttgcgggtcttagcatatccatcgtcgtgtgacttcatcgaattgaagatgggtctgattctagtgattaaaagtttcgacgaatcgtgatatgattttggtagtgagtactcatgtattaaaataaaaatgaggcttttgaattaagtattagctattttctttaatcgattagtttagagtgcgtcggcctaaaccgcttctatttattttttattaggactgaaattttttttattaagaaatgttagaaaatttgtatagttatatttatttggaaattggatagtcaagacttttgaaaaataataactaacaacaacaattaaccgtagaatttgatactttaaatctaaatttaagttaaaatttcgattataacatttgttattaatcggaaccataatattgggattcatagtgtactactgtatgtataaatttgggataaatgtatacgtatgtaagtaaatgtgtaagcgtaaatttgggtatacgaaagtgtctgtaaaaaaaaaagaataaaaaagaacgatgaagccagaagaagaaaaaaatctcg

SEQ ID NO: 29518 - DNA, 2119 bp, Arabidopsis thaliana landsberg
aactactcgggtctatgtttgttgtttatattattggcagggttctattgaatctatagtcattggagaatttaaagccaatctaagtcaatccctggttgaactttgtgctacggcttttatccaggaccctaaagttatattctctatatgtgacctgaaaatagttactagaccctcccactcaagtaaaggtccgcgcaaaccaaaaactcggaaatcgagctctggtggcaagggaaagttgatgctatttgctaatattggcagattcttttcagtttccatgacaaatatggtagtgcaggtaattgtagcctgctctgatatccatgaaagctctttttatttggtttagcttcatgataaattccctttcattctgtcttgttgagctagttttgatgaaagcagcatgaatggtagtgatgctactagcttctattgttagtaccataaactaaattataatgaatgattcacttgcaatgatcttcattaattttgatgaaatattatctcactggctatttagatatagagtagtaaaatattgaccacaagcctagatatatttcccatgatgaggcgctttatgctcaaatgactgttagctttctgtgcttctgttaacttattctttatagaagatatacttgtttaactcaaacactgttttgactaggtagaacaaaattaggctttgtagaactatactaaccatcatgtctactggttgttcttattttctcttgcaactgcagacacctaaagctacagcagaaatcaaggagttggagctcgatttatctaaggacagagggtcagggaattttttcatgaagttgtatctattgccgatatttgtacagattggtgaaccacatgttacttccactcattcacctgagatggacagtgacatttgcctcgctaggcagacaccttccaaaaccgcagaggggtcttcttcttcttcttttcattgcgaaaagatctccttgtcctgcgaatttggtcctaataggtaccttttgcttgacatactcatatgatttcttaccccattcacatgtacattttaatcctcatggctgccatattttggtcttcctggagcagaaaatcaagtccaagtataaagaacgtcgaagtagacctagctaatgctgttttaaaccttaacgagaagctgctgttgaaaaacaaatcctcgacaagtgctgcttccaaaggtgaagtgattgattcaagttcaggtaacaccacttcagagaagcctccaaagcaaccaatgaatgttttggttgcaaagcatgcttcaaaattccctgagaaggtgagtgattttttttagcatgagataactgcaagtgtcttttattgattatatatgcacacatatgcatgttgcatcagcatcacttatccaactcatagttgctaaaaacaaatcttacatttcgttaagctacagttagaaaccatgtaagattaatatttgcttctacaatgaaaggagtgtgtgcatatggtgtatagtcaatttttatctgaagtcttactcgtgcctttgactttatgtggtaggttttatttgatttaacgaagcttgaaatcagatttgtgcatcaagaacatgatttttctatcgccaacagcataaaaggctttcaattgagaagtgccaaatctcaatctggtgaagatggcaaggaagacacatgtcttgattttgccatggaactccaggagatgcatgtatgttaaaaatcagttgtcttagtaataatccagtgaaattttcgttttgatgtaccatcctctgttgctgcctttaaatttccctttcatttcagctttttagagaatctgaagtttctgtcttggagatgacaaaatttggagttttcaccaaggtgtattgtccgatacaggtgagtcctctgaattaagacagaagtctttggtaatgcattttttgttgttgtccatgtgcattggttgctttcacaatcgtaaatggttagatccacagctaagacaatgctccttttggtttcatatatttttcacatgtcctgccattaacagaagggcgttcatgatttgatgtatt

SEQ ID NO: 29519 - DNA, 1095 bp, Arabidopsis thaliana landsberg
ggtaagatttcaaccaaacaagatgtgtatcatgtttccttagacctctactaagatttctattcgactagtcccaatcaatctagaagcaaagtgtataaaaagtttaaaatgtatttctttctcattcaaacattgtctgctgagaatgagacccattcgtccatttttaccaggacacctttttaccataaaatagagcttgaaaaactggtaaaaaaaatgactagaagcaacaaccaccaacagtcaaaaggccaaagagggggatcaccagcattggccttattggtaatcaaattcatcttccgtgaacactagatcgaacaagctagaacacgcaactaaatcaaaagaacaaagcagataggtttttcctttgtggtttaaaaacgaaggtttaaaataacacaaacgcagttatgtggaggaatccaaattcccagggagaaaacgaataccaaagaaacaactccaattgtatgggagagacaaaagccaaagatcaaatgataaaaagcaatttaagagaggttcaaggaagcgagctgctcggttgcaccaccagcagcgacactcctgagaacatccatagcctctgcaactttggccttgagagcttctggtgactccaacagatggagcacttcagtctggtccatctccaaaagcatcccagtcactttggctgcagactctgcctcaacctgctccaccaacgggtacagcacctcacccagcatctgtacaaacacacccaaagggtcacattattataatccaagcaaaaccagtctctctatttggtttttaagagattctctcaccgtcctctgttgctctggagtagcattagacagatttgaagccaaagctccaatagtcaatggcatgttgttgcccatatcatatggaggcacatcaccactaccaccacgcccttggggataccggaacatccgaccccttggatgcatctaaccaccatccaaacagaaaaaccatacgatcaactattaaaagagagccaaacacgcatagcatccttgattgcaggtaaatctagaaacgagaagaacctgttgctgcatcatg

SEQ ID NO: 29520 - DNA, 1641 bp, Arabidopsis thaliana landsberg
tttttcgtcagaaactttgaaagtgattctttcgagggcttggctcgatatttatagtattttcaaggcgcgtcgggtccgtgaaggctaagtaggtcgcatcgggagtgcgtcacctcggtaaaacgcgtcgtatccgcgtgaacctcgtgtataagcaaaaacgtatccgcttctcaagaaaacaagcggttgcacgcataggaagtttgaccgttttgtaaaatgaagcgctagaggttacaattgagatgaacaattagtcggctcgggtgttaattctggaaacacatcccaagccggacgtaggaacacttcgggagttcagaaagatcgccttgaacattcatagttggatcggttgttagtctaggtaacacatcccgagccaagttcgagaacacctctagaattatctgtaccgctttgggagatagtcagcggcatcttccgacattccccaagctgaaaagtagtttgacccaaagactcctataaacgtctaccgagccctgaagattgcccaaggaaaagacttgtgtaaatccgatgataaccgaagtagcatttccggggaaaccggaccattgtcagaaatcgtggaaatgatattggagaatcttaaaggatattgtcgaatcgagaagttttcccgaagcccgagatgaataaggaaactatccttaagacgactatcctctccggccgacttaaagataaatggaaatcttctgagaatatcgtcatagaggcggcttaagaatcctatatatagtgcctcaacgacttctcataaaggggacacaaaaaaaaacgctctcaacttcgaacaaccagaaagctctgattttgaaggctaaacacttttctcattacttttctaaacattagcacgatcaaatcatcaccttttactaataatatcaagaacatcatccatggttattcatcgattctgttgttctttgagattctcgcgatgatctgttatttgaataaacagtaagtacaattttgattgtgtgagttttgactctcacatatggcacatggttaggtcggataaaaataagctgcaaggtatgttgatgctccttatgcggactgctttgacagagaagaagagagtctgatggtttgtagttaatggcgtgtccatccggtactccatgagagaacatgctctaataactggtctcgattgtcattgctatgaatcagattataaagcaaggagctttggtagttatgactttgtgaagagggtgtttggaacaattgctgttaacgtgaaggatgtggaagacatgtttgattcaatggaagatgagtgttgtggagatcgattgaaggtggcagtcttgctctttttatgcaagatagttagaggaaggagaaggtttaatagcatccattcatttgttctgaaaatagtgaacaatttagaagaagtagaaaagtttcattgggggcgaaatacctttgaagacactgtggatgagatccatcacttgatgaagaaaaggttaaatggcacagtgggagtggactatttatttccaggcttcattgtgcctcttgaggtacggttctatatatctttttaataagttctctgtttggatgaataagattgtattc

SEQ ID NO: 29521 - DNA, 2425 bp, Arabidopsis thaliana landsberg
gtatggccaaaaattcacgaaataaatatcattcccttatcgacatggtaatgtaactagattataataaatgatccaaatcagagttttcaaaaataataaaactttagggttggtttagttgtatgtttactatgataatgattgttactatttttggactcgaaacagagtagcttgctctgttttgtaaagatgaaagcaaacattcaattaaaaagaagaggttttcgaaaacgtgacgataggacccacaaaactggaattgaaaaaaaaacttgtaggccaaaaaattcacaaaagaaatatccaacgtcgacatggtaaactataaaataaataatgatccaagtcaaagttttcaaaataatcaaactttatgttggttagtatattttactctgataatggaagttactatttttggactaaaaacagagtagctactctgttttatatcacaaaattcacaattattatgtcacaaagctttcaaggtcatttctcacttcctctcactaatttgttctttgtttctcctcacttctggtgaagcagctttcatttaagagaaatcaacatgcgatatcacgaggatgaagaaggaaggtacatattttatttagttttcctcaaaggttatatatttagtgaatgagtcctctgtttcttctactttgatctttgttacaggagattccgtggaaaccagtatacctagattcttcagaattttcaagagaaaatcttgccaaaaacagattgtagaaagaaaaagctaagacaaatatacagttttcgacctttctttgatttttactctttcaaggatttttttttttttttttttttcaaggatttttactctttcaagggtttaagagttaaactttagctcaaagattagatattgtattcagaaatagattcatgagagaacaagagagaaggtcatacaatctgaagtagacaataatgaaacacataagtttgcttgatcacacaacaagatggaaatcagagagataattaagtagccaaatctcttcctctactcatactgctagcgtctacagatccttaccgcggatgacatggagtttgattgcgtaaacgaaagttcccttgcgcaagagctcacacaaaatgcggtcttctttcttcaacttgttcctcttgcatatgcgcatccatcttttgatacaaacacgctgatccttccatttggctgttttagcacttagtttcccgaacctgtcgatgtagttaacatagtctccaaacctcaagcaatagtctttcaccagttgtgcatgaaccaactgtaaaaaagatacgtacacaaagcagacaagaacgttaatgaaaacaatctttaagttaaaaagagtagtagtatatgaggacaagaagttgcagttcttaccagctcgtataacctattcttcacgtttgtctcgaaatggatattcttaggatcatcgaggtatctctcaggattcttgatcatgggatcgactgtaagaatctcaagagacaaaagcattagcatctcaaaaatcaattacataatgaagtgatggaactaattaagacaacaatgtgattacctttcttcctcttctttgccgcctctggttccatagacaaagcaatgttgcattaagataagcatggaagaaatgaagttaaaagtgatgaaagtaaatgtattttacctttcctcttcagattagcaaccttatttgcaacctttggtttgacaaaagaggcagtggctgtgtcttctttatcaggagcataagaactgtcctcctcactgatggaattctcttcaatatccaattgaccaaacgtttcaatgtaatcactgtcactgtcctcctcttcgtcttcctcgtcatcagaggactccacaacttgttctttcttctttcctgaaaacatctcaacaaagaagacatgattgtcaatatataaaacaatcacataaagaaacaattcaagttatgcaatgagctaacgatgagtttaaaacctttcttctggctttttggtattgttggcttggccaccttgaattcagaatcagtgtctgtctctgtttcttcactgctttcagaataaacactatcctcctcctcatcgtcatcagaatcctccacaacttccacttttgactttcctgcaaacaaaaatctcaaaagtcaaaacaagcaaaatcacataaaagcaagtgatgggaaaaaaagctaacaatgaacctttgtctctgccttccgggactgtattcttcatctcagatttagcaccagtgtctgtgtcttcactgctcagagatataacactgtcttcttcttcctcttccaattcagtgacttcgctaatctctttacatgcgtcgtaaccgcgaaagatactgacc

SEQ ID NO: 29522 - DNA, 2196 bp, Arabidopsis thaliana landsberg
  unsure (1)..(2196): unsure at all n locations
aaattgaaattgaattagaaaaagagcataaaatcatcttaactcgtttatcatcgggtttttgttttcttcattttcttacgaaagacaagcatctagaagaaaaagaatttatgttatgttaaaacgcatcagatgaattttttttcttttccaatttaaaaattgaaaggaaaaaaaataaatcatgaaaaaatattacaattaaatgtcattgtttcaaacgcaaatgcattttcggtaccatgcaaatgcaatctcaaaaggaagttatcttattggtagagattgctgatcttgtttctctcatcatgtgtaagcatgtatcggtatagtggtaagagtctatcgggcttagtgaaaaaaaaaccatagctctcttcgaatgttgttgcaaccttcctcatcttgtttaaagtagaaaagattaaatttcggtgcaacctacctaacaagaaactgaatcacgaatattataagaatatcaataatcatataaccaaagccaataacaccaaattccaaatatccatacaaagaagcaaaccccataaaatattgccccaaaccttttaacccaattattacgttgaagaagagaaatacaataacaaagatacatttattatctgtttctgtctttttttttcttttactcgggtgtccaaagatatatattgaagatagtgtggtttccaagctttcctacgaagatgccgcaccgctttggccgcaccgccgtaatgaacatatgtcttacattcttgacttggcgaccacaaggctagtcccttcacccattccatcagctcccggccttgtccaactctccttgaactgttcttcagtgacacctatatatgaaaaagggtaacgtcattgttaattttgaaagaaaaaatattctataattggattacttctaccgggttttttcactacgtactacttaatgcatttatattttctacattacctataatagaagtgtaatagaaatgactctattacttgtctcgaccaaccggacgaatctttagtaaccaaacaattatagttgaaagatataaagaacgtcacatataaactccttttcattgttcttataagcagaatcttatcataacacactattatttcactaaagttactttatgtgagcaaataaatgttaaaaacataaactaacataccttttcccatggctgcagtggaggagattccaccttggacggtcttaagataacgatcatagtaattagcaccggaccatttctggtgagccaaagtgtcaaccccatgggtcctctcttctctttgtatcctctccacataagccaacatcccgcgcctagcgtaatcctttgcaaatgtatcaaccacaagagcannnnnnnnnnnnnnnnnnnnnnnnnngaactgccaacaatatccgagcctagcaatccgcggaatgaactcaaccatctgctgatccgtcataccggaagcgtcccagttgaaggacggcgagagattgtaggcgagcatgacctccggtgtcttggacttgataccttcggcgaattgggtgcattcattgagatcagggcttgccgtttccatccagatgatgtctgcgatctgtgcaaaggcccagccacggaccacggccgctgcgaccgagccttggaaccggtagaatccttctctggttctcggcaagtcccagtcccagaaaagatctgtcacaccaagttttgctgctaacactcggccttgctcatttgacaggcagttctcatacctgattagtccaattgtaacatttttgtgaacattagagaaaaaacttttaggatcgttatttaaacataaatagatctatgatttataaggaacctaacaaataatacggaaacaaaaaaaataaaactattttcagtttttaactaatcataatggacgttttttttgtattttagaagaaattatactacggacttcataattataactaaaaaaaaaaagttaaacctatacgtaaacaaaagttaaattttggtaaattatatagttttaccttgcatgggttaaccactcgctcagtctctgattcttctcgttctcgttgaggttcatgcgcttgatggcctgcacgacagcttccgagaaagtcataagatcggcctgagcaagccactgatcttcaatgga

SEQ ID NO: 29523 - DNA, 966 bp, Arabidopsis thaliana landsberg
gacatgaacactatgcacattcagatcaacttcagcaaatacagacttggaaagtcattaatatatgagatctattttcaaaagatcacttgctatttctttaccgtttcttcaatctcaactcgaagtcgaaggcattgataagcctttgcaaactcagttcttcaatcttctcttgaatctctatccattctcgataaaccatatgctttgattgattggagactgaccagaacaaacagctcaaaccctggaactatctgcaaatttgtagacttgctctgcctccaattctctctactgcttcaagtgttactgatgtttgtgtttgaaaataaacatccaagtttttttacataaaaatttggttcattattcaactaaaaatttacatttttacattattgtaaaataataaacataggttattaggttaagatgattcttatgcatgaagctaaaagaaaaattcagaactatcttttaaccatatgtttggaccaaagaaaccgaatctatatatagattagtcaaaaagaattcagacacaaatacaacaataacaaagcatttgagctctctctctctatctccctcgtttcctctgcagcctctgttttttacaagtcagattagcttacttacttgggacagaagttacatggagagaccaagccttgttaattgtttatataacccggattggtctttttgtcatctctttgtttcgttttctgataatttgtctctaagatctttaagagcatcaacgacttcagaatcaagattgtgtttaagcaatctcccttggaaagatgttgaccttgtttcttgcatcattttctcaacctccttatgcatcgatttaatctacaatatcatgttttcacaaaatcaaaatcacaaaaaaaaaaaaagaagcaaattgctttggtgatgatcttcatacctcagaaaccaatgcct

SEQ ID NO: 29524 - DNA, 1732 bp, Arabidopsis thaliana landsberg
aaggtccccttcagggtttagaatccaagaaatgtatgtagccgcagcaatggagagatcttctacatcacatacttgtctacagtcagccacttttgaagcgcatatatggtggatattttcaaacgactttccttctgagaagagcatagcagatgcaaaatagaaccaatctgggaagttaatagccaaagccctgccagaagatacaacatcattcaaaaaccactcacacgcacgtatatataaatagatcaaatctgagggtatcaatttgcattttatgtaaagttaccattcggttttgtcatctaatgcttgaacttttattggagtaggcttacaattagtatcccgttgttgttgcccagggacagcagacgctttactgacagtatgagctaacattaggagggacttggaactgagaggacccgccaagattctcagaaattgacactggaaaggaaagtatgtatcagaaaatggcaacatggaagctagttccattggtataccccacaacgatggccttgaaattgtatccattattgcagagaccaaaccagcaagtacttcaaaaacagaagcaagtcccctggcgtaaagaaagaaattgcatcagaaagcaagaaagatggaaaactagagatcacaacgcataagattacacatgtctattattgtagatttacatgacaccaattggataggaactcacgtaagcaaaagccatttatgtaagagtgatctagtgttgataaacatagtaggagatatcgctaggcagatgacaatatcgcgccactcccccctctcgaaaagctccctttttacacaaaggaaaggcctttccaccacctctttcaagattctggaaacatctaccttcaaagacaatggatctcgataccagaaaagaatcctgatcatcaaaaagtgtcagaccggtctacctttttctgaaacaagagagcaaacatctcagaagctgtggcttcttgagtaatatggaaaatgcagactaacatagcttggaacagaaacagtacaagaggtcaaacctcagaggtatcttgtggttctctatagatgattctcccggtaagtaagcaagaagcttcgagacagccctatttcttccatccataagctttccatgcgcgttgaaactgctgatcttacatgttgaggctgctgaccttacaacagcttcgaataacaatgtagccaatcttcctatgaacatttccaagtcagaaaaatatgagagaacaaacaaaagttaaaatcttcagataactctaggataagctaaatcaaacgcaccatttccccacagtttctcaataatatccttagagatttcgatcaattcttcagagcagccaggtaaattggagctcccaaactgtaatgtttcctcgtttcgatacctaattaccttacaattgcttgaagatgataaggcgcaaacaattgttcgtaccataaactcaattgccgaatcaaaaacctgaattttaataagaaaatcactcacaagtaagaactcagctacgtagaaacaatgcaagtccaggatagatatgatactaacctgaggtgccttgaagcacattatagataacgctgcgtccacaaccctgaccccagaatcctcgcagccgatatccagagtcagagatcggttaagctccgagatagctagtcccatagaagaagtagactc

SEQ ID NO: 29525 - DNA, 2472 bp, Arabidopsis thaliana landsberg
tgctttagctacctagtaattcatcgttttcatctttcgcctccacaatttccgtcaggcttctactcttttggtgtattgttgcggtgcttataacgtgatcccttcgtgattttcaggtagtttcgtcatgtcttggtgcacgattgagtcggatcctggtacgttggtctcttcttagtgtttaatgtctcttaatggggtttgggtttgtgctttaattgatttctcactgcattgaatggtttattagaacttaaactcgatgctttagatgttaagtccatgttttttgtttgtttgatgaaaagttgtgaaatttatgctcctagtgaatagtgatgtgagaatatctgaagtgatctgtgtgtgtgggtttggtactattttaaacattgaagattatctcaaagttggggagtattttttaggggtctaaggttattttagctgcatctgttgaagagttcatagtaacctgtagatagttcatatccggcttgaatgatatttgagtttatatagtaaacaaaagtgttggtatttggtatagatctcttgagtggttttctgcacactttaactgtctgtagtctgttttattgagattctctggtgtagtcaattacaatgggaatatttctatgtatgatttgccgcattacatgtatatcaattttttgtgttctgattatatctatgtaaatatttatgcaagtgcaggtgtatttacagagcttattcaacaaatgcaagtcaaaggagtgcaggtaattaactgttataatttatcctcttaacttttttttgggatatagagcaatgcatagccttgcatgagacatgttgtcggagaaatatattcatgatgagtgaaaactttatcaagtcatgtctgtctcttaagaatctaaggaatagacgtataggaatggtgatgaaatgaatgttgagaataggtattgtgctccttgctgtaagttgttatgtttttgtctaaatttaagtactctgcagcaaaaaaaaaatcggaacttttttaatatttttcttactcgtcctttatttactcttctcaagtaagtgtctttgttgtttcatgccttgttctgtcgtatactgatagtgatatccctactcgtctctttacgttggccaaatgcattctcaatagatgaaattggctattgcaattatttctagcatcagtttccaccacttggatatcccttttgattttgattgtgtttcctgtaggttgaagaattgtattccctggattctgattctctcaataacctcaggtgagtagttgcatccatggttatttatttccttgtgatgtttctggactcttttttgaatggagcagaaatgatattcttttgagccagacctcgaagtctttgagttagatttcttacttgtctatgcctttcttgataaatgcttttcaaccgtgtggcttccttgtagacccgtatacggtctgatctttcttttcaaatggcaagctggggaaaaagatgagcgtccaacgatccaagatcaagtttcgaacttatttttcgcaaatcaggtttgtgtcgataacataagcataagattttgactaatagtattgtcttttaattcgtgttctcaaaattccaattttataggtcattaacaatgcttgtgcaacccaagcgatccttgctatcctcttgaactctccagaggttgacatcgggcctgaactatcagcgctgaaagaattcaccaagaactttccatccgacctcaagggtttggctatcaataacagtgattcaatccgggctgcgcacaacagtttcgcaaggcctgagccatttgtcccagaggaacagaaagctgctacaaaagacgatgacgtataccatttcataagctacatacctgtggatggagtcttgtacgagcttgatgggctcaaggagggacctatcagtcttggcccatgccccggagaccaaactggtatcgagtggctgcaaatggttcaaccagtgatccaagaacggattgagaggtactcacagagcgagatcaggttcaatcttttggctgtcattaaaaacaggaaggatatctacactgcggaactcaaggagcttcaaaggcagagggaacagctgttgcagcaggctaatacttgtgtggacaaaagcgaagcagaagcagttaatgcgttgattgctgaggtaggcagtgggatcgaggctgcgagtgataagattgtaatggaggaagagaagttcatgaaatggagaacagagaacattaggaggaagcataactacattccgtttctgttcaacttcctcaaacttcttgctgagaagaaacagttgaaacctctgattgagaaggccaagaaacagaaaacagaaagttcaacttgagaatgtagacacttctctatgtttcaggaacttggtttgtcgtctc

SEQ ID NO: 29526 - DNA, 1158 bp, Arabidopsis thaliana landsberg
tcaccgcttacgattatagccacattggccacgctcgtgccgccgtgtccttcgacctcctttacaggtcagttccatagttttcgccgtaggattgttgtttaatttgaatttctttaggtcacgaatttggggaaaaatcccaacaatttaaaactaattttgtctattgttagcttcgattaacaatgtactaagcttagagacatttgaagctggtatttatctctctagtgtactggttgattatgcagatacttaaggcacttgggttatcaagttacttatgtcagaaattttacagatgttgatgacaaggtctggtatccttttctgcgttttgaaactagagcaatgaacaccaaataatcctcctgtttatcaaactctgaatactgtacctgcaagtaattgaaaaggctaaaaactgtggagagaagccgttagatttgagtaatcgcttttgcgaggagtatcttttagatatggctgctcttcagtgcctccttcccacccaccagcctcgtgtcagtgatcatatggaacagatcattaagatgatagaaaaggtaaagttgtcttttttcttcttgtttggtttcctgcaatgttctttgttaaaatatggcggtataatgatgatgcttccttggtacagatcattgagaatggatgtgggtatgctgtgggtggtgatgtgttcttctcagtggacaaatcaccgagttatggtcagttatctggtcaacggcttggatcatactcaagctggtaagcgtgttgctgttgactcaaggaagcgtaatcctgctgactttgcattacggaaggtttgacaagtttaatctttttgttcaattcttatttcagttattaaactagagcagctggagtttatgctgaaatttttatgcaggctgcaaaatctggtgaaccaagttgggagagcccttggggtcatggaagaccaggatggcacatcgagtgcagtgccatgagtgctcattaacctgtctccgaggtttgacattcatggtggtggcgcagatctcaaattcccgcaccatgaaaatgagatcgcccagacatgtgctgcttgtgaagatagtggtgtgaactactggttgcataacgggcatgtcaccaacaacaatgtaa

SEQ ID NO: 29527 - DNA, 1688 bp, Arabidopsis thaliana landsberg
  unsure (1)..(1688): unsure at all n locations
gaagatttattggcatccattcactataacttcgagcagcaacttagagaaagatacattaagtgttgtatttttaagacagggaagttggactcaaaagctttacacacatctctcttcttccattgattctctcgaagtttctactgagggtccgtatggccctaactcttttgatgtctcaaggtacaaaactcaaaggtgttatttcagtttcatacttaattactttatcttaagttagtctaattatattgtctccatcattttcgtctnnnnnnnnnnnnnnnnnnnnnnnnnnnnnnnnnnnngaagcggaattacacccttcatttcggttatcagagaactcatatctcagagccaaaacaagagcacaaagctaccagatgttcttcttgtttgttcttttaaacattaccatgatcttgcgtttttagacctaatcttcccactggatatgtcagcctctgacatttctaggctgaatctccgaattgaggcctatattacaagagaagacaagaagcccgagacaactgatgaccacagacttcttcaaacaaaatggtttaaaccgcagcctctagactctcctatctcacctgttcttggaccaaacaacttcctctggctcggagttgtgatcttatcatcattcgtcatgtttctcttgctcatagggatcgtcacacgttactatatataccctgttgaccataatacaggatccatctacaatttctcatatagagggctttgggacatgtttctaggaagtgcgtgcattttcatctcttccagcgtagttttcttatggcgcaagaaacagaacaaagaaggggataaggagttcaagaatcaggtacaaagcgtagagtttcagacacccacttcttctccaggttcatggttccacggccacgagagagagctcgagagtgttccctatcaatctatagtacaagccacttcagtccacttcggctccaaacctaatctgaaaagtaagtaatctattaccactatattcgacatgatagcatcacttacattacataaatggtgtaagtgaaattacatatgcatgaatctgatactttaaccttgtcgctttgcagagattctacttgaggctgagggttcagaagacgttggggtgatggtttgcggaccaagaaagatgagacatgaagttgcaaagatatgttcatctggtttggctaagaaccttcactttgaggcaattagtttcaactggtgatgtattccatgttctaactatgtgtgtttatattcatcgtaataacttttgatgttttagatggtttgctgtttgattttctatttttaatacaatttaaaatggaatgttaatgtatatgttatcctgcaccttcattattatcaatttctaatcatcattaatcctattgagcccattatagacttagtgagtgttttttctttgttaactttttttgcttttctctttcttcatttttctttcatattcattacttccttctgtttcatatcgtaagatatttaattttgggaaaaaattacataaatgtttacgtgtttgatttaaagtctatttgaccactaatctataccactttaaacttatatagtaaattaagtgaaatataattagattgcaattagatgaaataaaaatgctg

SEQ ID NO: 29528 - DNA, 2330 bp, Arabidopsis thaliana landsberg
tagatcaccagttgaactaattgcctcaaagtgaaggttcttagccaaaccagatgaacatatttttgcaacttcatgtctcatctttttggtccgcaaaccatcaccccaacgtcttccgaaccctcagcctcaaatagaatctctgcaaaacgataaggcttaaagtatcagcctcatgcatgaatgcacattcatttataccatttttgttatgtaagtgatgatataatgtggactctaggtggtaatagattacttacttttcagattaggtttggagccgaagtggactgaagtggcttgtactatagattgatagggtacgctctcgagctctctctcgtggccgtgaaaccatgaacctggagaagacgtgggtgtctgaaactctacgctctgtacctgcttcttggagtccttatctccttctttattttctttcttgcgccacaagaaaattatgcttgacgagatgaaaatgcacacacatcctaggaacatgacccaaagcactctatacgtgaaattgtagatcgatcctgtgttatggtcaacagggtatatatagtaacgtgtgacgatccctatgagcaagagaaacatgacgaatgatgataagatcacaactccgagccaaaggaagttgttgggtccaagaacaggtgagataggagagtctagaggctgcggtttgaaccattttgtctgaagaagtttgtgatcatcagttgtctcgggcttcttgtcttctcttgtaatataagcctcaattcggagattcagcttagaaatgtctgagactgatatatctgaagggaagattaggtctaaaaatgcaagatcgtggtaatttttaaaggcacaaacaaggagaacatttggtagctttgtgctccggttttggctctgaaatatgagttccctgatcacggaaatgaagggtgtaactccgctaccaccgcccactagtattagagaatcgtgcctatatatgatcaggaagaaaacaattagatatacttaagataaagtagttaagtaaggaacttaaataagacttttgaaatttttacctggagacatcaaaagagttagggccataaggaccttcagtagaaacttcgagagaatcaatggaagaagagagatgtgtgtaaagtttttgagtccaacttccctgttttctgattacaacacttagtgtatctttctccaagttgctgctcgaagttatagtaaatggatgccattgaatcttcgaaatgcttggcacatgtagaaactatatgcttgttggggtataatgtagccctatagttagtaaaacaaatggttacaacaatcatgaagcatgcatctctctcttgaacgtggcactctagttcaaattaaaatgcaaatactattcaaagtatataattaattaaaatccaattttatattatatttctctttcagattataaacccaaaacatttgaatgtcaacgtaaatggatgaactagttataaacctggggttttggagaaagtgagttcgaggttgtctgaaggtaagatcctagcagacacaagtctggatctcttggtggattgtaagaatctcaagtatcggtctataaaaaagagaaagatgtttggcaagatcatgcagaaccacgagtctcccacgtggattacgtagaagactatatagagaccgcagagatggtgagtgtagaagaaaatctcaaacttctttcgtctaaaggatggtaaactcgtcacccacatcgctattccaatcaccatcgctattgttccggccagattatgcacatatgttggattccatgcaaacgtcttcacatatataagaaaacgtaaaaacaaatatcagttggaataaaagaaagaatgaaagttttgttttgttttgttttaaggataagattaaggtagatgcatgtaacacggacctccatcaacttattgatcatggcccagtagataaggaaaacgactgtgtgaacgaggaagcaaaaatttgagacatgtccaagccaaatgtgatattttatacttgactctgacgttaacccgacaagtggcagaatcgtagaggctcttgtcaccgggaagaacaaaaaggcccaacagatgttgcccacatatcctattctcaggccgaaagccctaaactttgcctgccatctgcaccatttgcatcaatgtgcagtcaaattcgggtatgggttttaatatctgtctcttttttaaggatgtgtatattttggaatcattgcatgaaatgggtatatccataataatggcagtgcaaacaatgcg

SEQ ID NO: 29529 - DNA, 2473 bp, Arabidopsis thaliana landsberg
agttattatatagatgattgctcaaatcctttctacttttaatgtgatggccagcagctgtcagcagcacttcccaatattggaaatcatgttgttatcaatcagaaattaagcgcatttggtatgcactttccatttcaaaggtttgtgactaatggtctcctactggtgaaatcattatgattgtagagcattgaagctatattctattacacactaaactattatccattgtcagagtggtaccacttgccatggacagagctatcaaggagattgtgtctggtattgttcagcgaagtgtttgtattgcatgccaaacaacaaaggagcttgtgctaaaggttggccaatctaaacctttctgctttttttttttgttcttttcctttattacttttacgtaacttgttttttagtttcgtgcctcaaaattttccttaacccccattcgatttccattgcttttgactccacaactaaatttttttatttccatttatcacaaacatcttcagggttttgatcttatttatttatcgttaattgttgtttcttttttgactccaggattacgccctggaacccgatgagtcacgtatttataatgcagctcacttgatggttgcgagtttagctgggagtttggctcatgtgacttgcaaggtttttccttcttataaggccttggattctgaagattctttagctttttgtttacacatttacaataatgctattatatctcggccctgttaccctaaaccaacaagatctattttttctctggtttttaatgctcttgtatttttaggaacccctgcgcacttcaatatccggtcatctacggaattcgcttcagggtctgaatatttcaaatgatgctcttgaacaaattgtgcaacttgtcaccaatgacaacctggatttgggttgtgctgctattgaacaggctgctacagaaaaggtttgtgtcagatattagatctcggactttatttctgtttcagctgattgaatcaaataaccgaagtaggtttccctggagtgtaggcacttccgtttaccagagggttaatttcttctagttactaatttttatgtccgtgtcactacaggcaatacaaacaattgatgcggacattgctcaacaattgttgttacggagaaagcatagagatggtgctggatcctcctttttcgatccaaacattctatcacagaattccgtcagttttatacccgaatccctccgtccaaaacctggacacctctccctgtctcagcagagagtttatgaggtactgtttttaacaggtagcctctggtatgttctgtgtttgtatgactaaacaagatgtgtgcattttcaggactttgttcaacatccttggcaaaagcagtcgacccaaacttcacacggtttatctgctgcatcaagctcatctggtgatgttgcgcttggtagtggttatggtccagtatcaggaaaagttgcttctgaatttttgtctaatgctggaaacgctcggatggacatggtctcccggccatcagatatttctgtggatggttttgaatcttctccagtctcacttttgaggtgcttagttgtaaagcagatcgataaaactgctctcatttctattcgtatatttcacagctgaatgttgacatatcattttacctgtcttaaagctcacaagtcgatccagctggtgactcatccagtcttcaatttactaagtcactaccaacctctgaattgaatctggctgaatcctctgacgctgctacgaaagtgagatatactgtgttttcaaatgattactcgcttaggtttataatgaattactaagctgtgcttatttatatacaaggaaactggaacatcactgcagacattgacttcagctgctaccatggaacgacttggtgctagtaatattacacagccttcactgtccacgagagatgcactggataaatgtcaaattgttactcagaaggttactaaagtggttatcctgtgttttccttgctgcattttttttttgctgctttatatgtgagaaacttcttgaaactgtttcagatggaggaattagtggctaataatgcaggagatgatgaaatccaggtatttgatttcctagtgcctaggtggttatagtgcagaattgttatccatttacgtgcacctagaataaatgaaattagaagttaattttgaaaaccttctctaacttttggaaatggtttctgtgttttccaattgatgcctattttcttctatccagtatgaattcaataactaatgcagatctcattgatttttcaggccgtaatttctgaagttcctgaaatcatcctcagatgtataagcagagatgaagccgcttttgctgtcgctcaaaaagctttcaaggctctttacgagaatgcatcaagtaaccttcacgtcagtgctaac

SEQ ID NO: 29530 - DNA, 2468 bp, Arabidopsis thaliana landsberg
ccctgcgtagttgatagtaggtttttatgctcaattaatcctaaaacactatcctgtcgttgtagtattttaggcgtcaatccaaatgggtgtgatgcagacagatgagatatgatcagaagttgctaagtcaagccaagcagaatttggttggttttctaacagtcctagtgttgatgcagaaaacagtaaaaattcacagaagtgactgatatactcgatcgcagggtcgactgccagaagggaccctgtgatcgagtacaataggatgacagagagtgaaaatgcagaaatggaccattttactctatcacgcaatctcactgttagtagactagtgtgatcgagtagaatggttgaaaacagaaaaatactaaaattcaatagcaagtgaatgaagcaggtaagtaaacagagaaatcaaatggatgagaaattcctaaggatggggtaatcaaatagtatggtctccctgatcaattcagttggttaacaaatctcaattaagctatccttagacaacaggttcaacaatagattaattcactcccgtgatagaaatcctcaagcatagctagacatagacctaatttccattagcgatctctaactaagcaggcaataagaaccgactgttaaagccaataaccgctctaaacgtccaatcccttgggatagagacgattatcactgaaattagtagatccaacgttccattaaacgccttctgggcgctggaacgtctgggattggattccagttgatcagaaaggaataagcaataaaaacaactaatccaggagggattcaataaatctacacttaaccaacagattcgaccaggggttccataactactctatcccatcctcagaaatcctaatcactactcagacaacatgcttaaagacaatatcatagaaacgaaagatgaccaagcaatgaaagcaaaatctgaataacttaggagaaaaatcaaaatacaaatttgcaggaatgaaaagcggctgctgaatagtagtgcgaaattcgtttctacaaagtgcatgtcttagggcgaaacccttagagacttatttatacaaaaataaaaagcgggcttcgagcccacttaacggcccatggacggcgtgatcaagagtgtcggctcaaagtgggcttcctgatgggcttcgaatgggttttgaatgggcttcgaatgggccttctcttctcttctcttttcgatgctcatgttgtctggttgagtgcggattgatcagagggtccaggtggtggtcgagtaggttggttgacagaatggtctgggctgcttcttggcctctatgatcgagtaagtgtgtcagctgtcaggatggactggttcttctcctctgcaatcgagtataactggtggactggcaaagtggactgcctagtcccctctgcgatagagtacaattgcataatggactgcctggtctcctctacgatcgagtagaagtgtctggatagactgcagagctgactgcttccctctctgctactggtgatcgagtatgttgatggaagtgtgactttctgttctgtttcccctctttttgagcaccaatagttccaaaacacctgaaacaactccaaaacgcagaatgtatgcaagactagtcctagactcgactaaagatgcaaaatatacaaaaatgatggtgaatgctatgaaagatggatgaaactagactcaaaatggtgataaaaggatgtgtaaaacatgcaaattatagacacatcagcgaccaattctagcaaatgaaggaaaagcttgtcaagatcagcaacgcccttcttaaccaacaagacgatatccaagaccacaacacaagaatcatcagtgtcgaatttgccattgattcggttgaaggtcatctagattggaagattgaagaactagagaagaagctcactaactcaaacgagttttcggagtggagaagtaaccaatcttaccaagaagaagaacattttcccaaggcccaagcccgatactaggtggaaacaaaaaaggaaattggattcctagtgaaaaagggaaagatctatgttgctattccgaaaaaggaaattttgaccctataaaaactctagggatttcgatccctaatgtttctcaacaagatcaaatcgaagaaggatatcacttagaagaagaagcagcggcacgcctagaagaaaattcaatggccgagacctactcttgaagagagagctacgatcaagaagacgattctcactttgagaatttggagaattggattgaagactgttcaagaggggatgatgacctcaccgaccgttctaaagaagaggaggattatgaagagttcaaagacacctactcttgcatgacaactagactcctcgatgaagatactccctgaaaccctagtttcaaggcaactaggaagctgtgctacctaaggccatctccaatg

SEQ ID NO: 29531 - DNA, 1759 bp, Arabidopsis thaliana landsberg
  unsure (1)..(1759): unsure at all n locations
agtagcatggatactggaacttgaactacatttataacttttacaaatcaacgcaagattttttttgtaagattagattatatttttgtgaacaccgggaaaatgcaaattaaaaataatgaaaagatatgcaacagatggatactgggagtgggacataagaaaagctctgaagataaaacatgcgcaagcagagaaatggtatagatcaagatgagatttgcacctcgatccgtttgatattcaagtctattacgcctattcctaatccaaagaggaacagcgttagaagagtcatttatcaaggtgttgcggatgatgaatttaggctccgttatgggcttggaaacaaaacactagagggcctgcatacttttcccgatcactttgagtgtctcttgtctgtgtaacacttaatttagaatttcttggtggatgccttagcggcggggttttctcaaaatgttatcactcttttatttgaatccttgccaacattttggattagcctttgcgaataatatatatatatatatatatatatcatcacttgcggtctcattagtccctcatacagtatctctgtgaaatcgttataacgataactctcttagacgaagaagaaatcgcgaaacgagaatgtcattctcagacgattgtacatctccatcggaaaagaatcgagctcgtacgagtcaagaaccacgagagcgccctcaagatttgtctttcttgtcatccaaggtaacagagaagcaaattatgagccaagaaccgtttgaaacgtcttgctcctctgtttctccgatgaacagagacaaagaagcctttaacagtcgacatggtccattctcgaaaaaccaaaactacttcgaaagtaatgacatcaccatgaacactgaaaacctgctaaatcctttccatttcggaggaggttcttgtggttgtgcctttttatcaacagagtcgatgttatgttcttttaccgtttcaggtgaagaacatggcacaaacaattctgacatttgggtgaccaagtaacatttctcttcgttgttttgggagcattgaatccatattgaaggtagcaagagatggaatagagattacgatgatgcctatccctagacttgtcaacaacgcacctcaatggaccatcaagaagagactgaccgagcataatgttaaccctacttatggccaacttcgtctgcccagaagcttcttcgaacagcagattcgaggacatctgcctgaagctgatttgcaaaagcggactcattgttaaggtataggacaacgacacgagcacaatgcatgagctgcgtctggcagtacaatatacctatgttctaacgggtgactggctggaagattttatccaaaaggagaagtttgaaagaaagagacgatataggactcttatgggattcttctgcttctaggcttcactttggcgtgattgctcgtggaaaggcaatagttccccggaagagaacaaggtctgcataatgtgatctcaattacaaacgcatatcagcagctgagagagctagtgttttgttctttctattttgtcaaaacaacgattggtatggcttatatggttaagttttttatgcaaccaacacaaacaatatatgatttatcagatttaaacttctaagtgaagcntaaccagtaactgcatgatagatacttggcaacagacaaaanacctgtatcattaaattaggagattatagttntacaacaaaaa

SEQ ID NO: 29532 - DNA, 1552 bp, Arabidopsis thaliana landsberg
aatgtggcacttttcgacggtggtcatgtcataaccacccgctgtccaccgtatgtgtgttccctggataggacatatatcccataaaatataaatgatccaaaagattacaaaattaaagtgccatcaattttggagatgtcacctcattgtttattgtctatgttataatttcataggttccatcaatttatttgctaatgtcgaaaacgaatctcagatttatgtagtgattaaagtttatctattctacgttttaccgcgatgaataaaagtaccggttgattcaccgttttgaattattccaccatttaccaccattggtaatggtataatacatgtatagtaaacatgtgaaatcaaataaatgaccataaaacttgctagaattgtaaaatgatagcaaatgttgtatccagtataagatgtgaaacttaaacaacctcagaataatgttcgatgatggatgtatataacgatcgacttacaaaaacagaccgaaatatttgctaatgaggtgaagtcatgtggtattgtttttggacacaatttagtaatttacacaaagtgaggaaaaatcatagttccgtggatgaaactcgtgccgttggatccaatgatcattactttaacgcagtaccacgtgacggaaaacggaaaaacgtcacatgattgagcggatctaatgaactgaacagccaaccagataacgacacatgtccaatggcagaaccttgtcacgtgtactttattccgaccgtccccttttgcaagtgcccctcccgtcactccgtcagaaccgcttttctcttctctaacttttgtttgtttaatgttttgattcctagagattactacatgcttcttcttgttttggtttttgatcgagcgtattgttcataaatcgctaaacagcgtgagaattagatcaatttataattgaagtatatgatctatcatcgtgttgatgatttttggtgatattataaatgaaaactgtttaactacccaacaaaaagctatgcaaacgagtgaacgacttgggaatgcatgtgggagttgtttgataataactaaatttcattggcttagacgctttatgtcatgtgtcacatgtttatactattatttctccactaagaaattactatttgttttcgtcaaatagatggcaacaatcattttaatgccacctcaatgattgtttctacgtacggctaaatgcaatcaattgcactgtatatatcatatatgcatgtgtttgaagtttgaactgatacatagaccactttaaactttctttcccaagtcaaatttatgttgagtttattagcaatcacagtctcccaatttcgtcaaatatgatatgaagttgtattgatcttaaattccgttatcaattatatagtttaaaaacagacgttgttagaaaacatgtcataaatttttgatccattcagcataacaaaggaagatatcagagaagttatgcatttactatattcattcattttcatcttctcttatttgctcatgtaaattaaaatacttt

SEQ ID NO: 29533 - DNA, 1527 bp, Arabidopsis thaliana landsberg
ctttcctattcacttgttatagttgttgtaagttaccttctcatacagttgatcttttcttatctcacctgaaagcaagatttgaagggttcttctgtctcttgcagggtgtctgtacagtattagcaatgctggcaacgttaccacttgctcagcttttcttcttccacattcttctcattaagaaggtttgtttcccatgctcagttgctcacagacatgccaagctttgtcctttaactattcaattaaccaaagtaaattttctctaacagggaatcagtacatacgactacatagttgcgcttagggagcaagagcaagaactagaagctggaggcggtcaacagagtcctcaaatgtcaatgatcagctcatttactggactaagcagtgcaagctccttcaatacatttcatcgtggggcatggtgcacaccaccacgtttgtttcttgaggatcaggtaccattattcaccagtttcttttaccttgttgactatgaattgctctaatgcgtgtgcatttctgggtccggtttgacgtagtccctccagagaatgcttctgtaagttcatatgggaagaagtctgttgtagaggaacgtgtcaagaagaagccccaacctgtgaagattagtccttggactctagctcgtctcaatgcagaagaagtttcaaaagcagcagcagaagcaagaaagaaatccaaaataatccagcctgtggcgagacgggaaaatccatttgttggcttagaagcaagcagcagcttcggaagcagtggccgtagaatgttcccaacaaaatatgaaggtgttaataataacgggaagcagcgaaggcaatcaaagcgcatacggttaccagcagaactacctctagaaccgctgatgaatgttcagacaaaagcagcaatggagacatcaactagttcagggctagctccacttcagctagaagcaagaagcgcgtttcagacaagccgggcaatgtcagggtctggtaatgttatggtgacatcttcaccagagagcagcttagactcgcatgacattcacccgtttagagtttcgtctgaagcagaggatgcagcgcagcttaatgggttctcttctgctgttggtctgatgggtcaacagagaggacaacaacaacaacaacaactatcaatgatgatgatgccattgtcaaggtctacaagtgatggctatgatgcatctggtggagaagacagtgatcaggttccttctagaaacatccacaaatcaagatgagaagcatgatagaataattctagttttggcttcttcgaatcttcggaggtattctttgtgtaatggctgctgccttctatcaggaagaagtcaacatttgaggatcttgaaggtataaaaatgcctgccaaaagctcttaggagaagagcaccagagacttttgagaattcttaagattttatttgaaggtactgagcaatttgaacatgatgatgatcttctagggatttactaaaacttattttgcttt

SEQ ID NO: 29534 - DNA, 1252 bp, Arabidopsis thaliana landsberg
gaagcaactacggatgagatttaccaaaaatgcccgcggccaacctaaagataacatcaaccacctcctatcaatatgactatcaatatgagagccaatctatcgtaacttctacgattcttgttccatgtttttatgccttccacatatcatggatatataactacaaagtggtatactttttttcgtatctataatcctcttttgattctatcataaatgacaactcattttctgtcggattcctctaatcaccattaccgtttagacttctagtatttcactaatttcgttagatggttcttccggtgaagtgatttggttctataagcaatgtgtcagtgatctcatatattttttttatttctcacagattaaagatagaaaaccaacaaaaagatgagttttgcatcttattttttgggaaaccactccaagttaaaaagagttcaaaaaaaaaaaaaagatagagaatcttgaacattcacatctgaaaatgtagcaacaatttttcatcactagcaagaagaaaaagattgaaaacagagcccccaccatcttcacagtccagagaatccctgtcaacatattttcagagtgtgaattaggactcagaagaatgaataaacaatcaaatcaggagaaaacaaaatcattgtcatgttgaagaatcttagaccaagtatttaggggtctatctttataacagagaaaacacccattggtgtcaaatcataatggcatatacaatgaacaagtagtgaaacacataagaacgatatgaaaaaggaaagaatcacacaagcatgcaagagtactcaatggcaagtgagaacaagaagatgagagacattaagagattggttctgtagctgttgtgacataaaataccaaaacaacaaagcagaaaacgtttagacacaggtatgtagttggtgctgtaattatacaattcttctcaaggatttataagtaacacaaagtgactgtaccaattcttagccatgaatatctgagacacaatttacaagttcacaaaagatatatatcaatcataagaatttcaaagcctagaagtgtgagatcataaatcaaacataaaagatatagtctaacgaatagacttgggtctagttaatcagtgaaactctcttgtatcctttttaagggtctgtaacacaaagcgactgtaacaattgctagtcatgatatcagatcacaagatcttaaagcagagagcgggcgttcttag

SEQ ID NO: 29535 - DNA, 2557 bp, Arabidopsis thaliana landsberg
ctctatataactttatctaacagtgtggaattttatttggcaattaacggaatctgtcttgtaattaacggaaagctatctaacgtctaattcgtattttatcctaatcaaaaccatacgaacttttttggtggttagatgtcaatttcagtaattccattaaaaaacttgtctcattttgtaggaacttaaaatagtatggtgttattatctgttttatctttaacccatccaagagttagatatctactggcggaaaagaaacaattattgatttcttgtccataattatatttcgagaaaatgattaaccacgaagacttcttgttgtagtaacgcacaaaattgaaacttggtttagcagtttttctaattaaagcatcaaacgtggttgcataaaacaccttttaagtttttggattactgatataaaaggaaatgtgaagaatcatgcaatcttcattggctatttctggtacaattcaaacagaactcgagatgtcctaaaatgctagcaatctattattttggtattaaaaaaaacataaaactcatagatatacagtttcgtctatgatttcatttgtagccaaaggaaaacaaaaatgcatcaggacatcgacatcgaaaatatcgtctgacgaaatgtgccatgtgttttatgctttacataagtagtagcacaaaataggtgttagatatttaaccataaaaaaaaccaaaataactgtgcaactatttcatcctttttcacacaacacaaaatatccagttttgagacattgttgttagtagaaaaagaaatacgtataaaaattaacctcagattccataatttagtttgcttttttttttgcacaaccatttaaaaccaactgaatacaaaaataaataatcagtgatagaaaaaaatgtaaaattttatgatccatatgtacatcaaaacgagacatttcgacatttttttccgccttctttcgttcgttatcttatagctaattaaatctaatacaaaggaacaggaaaacgcgccggcttaacaggcggtgattgcggcggagtttggacatctacggtgagtttttcaggtcgaggtggtgcacacggacacggcaatgctatgaatttgggtgtattatctcctggcattaacaccggtacgctcagattctgcggtttcttcatttcctgttcatagtaaccatatttcttagttactcattccaaaaaaaaatcccttatttttacttcaaattttagtaacacaaatgttatctcctattgttttccataaaatttgctttcgtgacatatttacagagagataaaaaaaccttatttagcgactcaaattcttaaaatgtttagatttagcatctcaaatttctatagataaaattatattttttgatagttggaaactatttatttataaaaaatacaaatactttctaaaacaaaattacatatattaaatttaatgttttggatactcgtttaatagctgtagtttatatgagaaataggaaatgaacaaagtcatattttggtaaagttataaatttgagaagagagttaccggaaaagggggtttgggtttgtaaggattagactcgatgtcggcggagggacgaccattggccaaagagcggcggagagaacgatgtttgtcccaatggtaacaacaagagaatattccggagaggctgaaaatgatgataagaagcagagctgtgccaagagggaatcctagtgacggccgagaagcatccatgtgtggtggcgagaaatcttgagtgttctccatcttcttctacgacggtggcgatataatcgacggctgagattgtgagctgatgattttgttctctcatgtgttagagagagaaggctagagaagagaagagagctttgagagtttggtgagaacaggggacggggaaacaagaagagatagggagtgtttatttataaaagatttttattttattgtttttgttgtgaaatcaaaaaaatgagatattaaaatgtttttattttacaactgtgaaaaagttattttctcagtacacataaagcaaatatgctgtacaataaagttgtcccttttcttttcgccgttgaaatttttattcccattaataattaaatcatcaaacgatagattttttcaaaaatataaagattatgtttcttgacttttgttgaaccaatttacttatcattttactgtttgattatgcagtgattttaaaagtaatttttgttttttgctagaaagttaaatgttaatgagtgaaaaaatctttctgacaaaataaatgcgttaaaaatcttgtactttcatggtgataaaaacagcttaacttttatggattccttggagatcagatgttgatattggaataatatgtgagattcttttacaaaaatgaagacagacaattccaaagctagttttatctttacaaatttatataaaaaacagatcaaacaaagtgttatgtttccattttcctttgtaaataacagattaatgaaaatgttaatctaaatg

SEQ ID NO: 29536 - DNA, 2032 bp, Arabidopsis thaliana landsberg
ccattgttggacctggctggcttaaatcccaacagaacttcgagcttttcgagacttccgatacccttggggaagcattgaagggatccacagttcgtcatgtcaagtacaaggagtttcttgaacaagacgatgcaaggttgaagttgtttcagattctgacagtagcttgcgtctagaatctgaaggttgtggagatcttccatggaacgaggaaactggatcaacggatgtgtgttgctcaaactaagacatgctaagtgttgaaggcttgcaatctcatccaaaatctcagacagaggagcatcaaatatggatttcgagatatcgagaacccgaagatatttgcagtctgtgaatttcttagctaagtctgagttgagcttgttcacttcacctgtcttagttgttgacactacgcctctcagcttatggttaactttgatctgcttctcatcaaagtttccactaatcccaaggtgacgacagttgaggccttccgggttagagaacgaatccttcttggctatatcgatcaccaaatcacgaaccatgtcatgaatcttgcaagtgatgatggttccgctataggttttgtctacaacttctattagacacctgtttgtgagcccggaaaagcagtcttctccagattcagttgcagatcttccgtttctccacatgacacaaccctctccgatccatccatgtactagttgatgttttggtataacacagtcttctggatagagcgaaagcgtgagaatgcacgacttaagtggaaagggagttcatcgtagctcaactgcagagaagacataacattgtcagtttcagaagtgtttcctcttagctcatcctgaaaatgctctgcaattcgtctccattcatgatagacatggtctttgcacagaagtaacccaccaaccgctttgattgtcaaaggcaaacctttgcatttcgttacaatctccttgccgacatcctctagctcgggacgctcacaagtaccgtcatttgctgcaaatgccacattacaaaacagcagccaactgttatcaggactaaggagctctggacggtgagtcttgtcgtctctcgcttgcacccttttcgctacagattccgaccttgtggtcacgataacgctacctccttgtcctctaggcagtccttggtagatcttgtcccaccagctcaaattcttgtcccatacatcgtccataactatcaagtaccttttccccaaaagatactgctggatttttctcagcaatgttccaatatcatctccaacactcgcgtcccccaagttccgcaatatgcttctcatgatctgttcttcagtaaaagtatgtgacacagacacccatatccttctttcgaaacgatgaaagatctcaatgtcattgaacacttcttgagcgattgtagttttacctagccctcccatcccaacaaaggccattatcaaaagctggctgtcgtttgatcgaaagagccactccttgatttttcttttatctccttccaaaccaaccacctgagtatgatcatacaccggagagctccaccgatcagttccattatctcttccaacattacttggcgttctgaatttgaaataaggctgactctttattttcgttatcctctcattgatctcttgcaaacgtttgcttttcttgtactgcaatggaacccgggcaggatgaagccgcgaaagccacgcatttgatgacctttgctcgttcccatcatcaccatccgcgagctgacaatccacaagtatgtcctcagcttcgtaaaccagttctcgtaaatccgcaacaagagtacgcaacgtttcattagttctcttctgcctctctgcatccttgagaaaagactgcatatatttcaatttgctttgcaaatcttccaactgttttcggtagtccgatacggttcggcctttttcttcgaggatgttcaaggttttctctaaaaacactgttacaacagcgtccaccattttctcagaccctgcaac

SEQ ID NO: 29537 - DNA, 2747 bp, Arabidopsis thaliana landsberg
tatactctagaatttagcatctccatatatgtacccatgttttattcccatgggaccgggtcagttcatttcgtgtgtcaattaatatagttcagatttatatgcatgtgatccatgggtttggaagcataaaatctcaaatctaaaaagccagaatatattcgaatcgatcatatatgtcgaagcatttggaacagttatctatagatgacgtctaaatggatttttttatatatatttactggtaaattaaatagatttgaagatgagtttcacaaaaatcttccctaactttatcaagaagtatccaatagtctcacataaagtgatattaatgcatattctagaggaggtaatggatcatgcccaacttgattttttttaattattaaataatgaagcacttgcaacatattttcataagaaaaacatatcgcaataattaatctctgagatttgctgatctttttaatttattgggttctctgttgctatgtattgcatcagcattcacaggaaatattttaattaggatcacattcctatggatatggttactcaccaacaaaaacaaatccgctctcgtaattaagcagtttttgcaacaaattacagacattatttcatctgcgggtcccacaaacaacgtaagcctaggtcccactttatttctgctgccacttgtaagtcactccgtccacttgttttttctttcttctttgctttccctacaaatccaaatcattcgtcacacttataacgatagagttggaattgattttggaatttgtgtgttcactgttcgtcatttacgtgtgcatttttatttccatttccgtcggtttaattttgacttttgatcatatgtatatattgaaacaaatgttaattaaatttgtatatgtacacaattgatatggatttaacaactagtactatatagttatggtgttatgtattgtcctgatttgatctgatttttctgctgttgatttggtgtaagccgaaaaaataaaaatgccaacgtcactaaaaaggaaagaaataaatggagtaattaattattttcaggaaaaaaaaacaaaagctcattcgaactcatgatccggaatatgatgctctatataaatagaaagaacctctctcaccaatttgttcgtaggaagagcacaagcctccacaagtggtgttgcctctctgttcctaactcctttctcttatataaattgtgtatcctccatacatacaacaaagagagaaacttttgatatggggttaaagatgtcagaatcagccaagccttactttgcaatggtttgtcttcaattcggatacgccggcatgaacctcgtgacgaaggttgtgctagaccgcggcatgagccattacgtccttgtggcttaccgtaatgcctttgccacggctgctatcgcaccttttgctctactctccgagaggtatcatattttatagaaatatatattaaaaaagttcgattgattctcatcaaatacaaacatttgataacttgataacggtgttgtaggaaagtgaggccgaagatgacatttccaatattcatgcagatttttgttctagctcttctcgggttagtcttcttaaaatttgaattatttttcaaaaacatgcacttgatgagtatatgaatactttatgaattatttaccacaggcctttgatcgatcaaaacttatattacgccggtctcaaacttacttcaccaacttttgccggcgcagtcacaaatatcgttccagctttgacctttatcatttccataatttgcaggtacctaaatttaacgcatagctttattattagttatccattgcggtagccaaatacaataggttaattcatacaatatggtacgttgatgatgatgcgtggtttatattttggtgaaaaaaataaaggatggagaaggtggagatgagaaaagtaagattccaagcaaaagtggtggggacattagtgatagtggttggagccatgttgatgattttattcaaaattcctctaatcacctttctccgatctcacctcaccggccatgctttgtcgccggcaggtgaggactacctcaaagccaccgtcttcctcctcatcgcctcattttcttgggcttcctttttcgttcttcaggtacatcatttaaattttacatcgactgatctctttaactcgtgaagccccttctaaaagtatctttatctacggattaatatatacatatctaatagtagtgatccgatagtactatatctaaataagggagtcttctaacgaattaggacaattatgtttcatcatttctttaggcggctacgttgaagagatactcatctcacctttcattatcgacgatggtgtgtttcatgggcacgttacagtccacagccttaacgtttgtgatggagccaaacctttctgcatggaacattggctttgacatgaaccttcttgcctctgcttatgcggtttgtccttctcatgattatataaattatgttatatacggaaccatataatacttataatctgatgtgtgaatatatatatacttttatagggcataatgtcgtcgagcatagcgttctacgttcaaggaatgatgacgaagcaaaagagtgttatctttgttactgcttttaatcctcttgttgtcataatcggatccatcattggcttcctcatcctcaaccaaactttaaaccttggcggaa

SEQ ID NO: 29538 - DNA, 4516 bp, Arabidopsis thaliana landsberg
aagtggtccaaagaccagggcccagcatacacctctctcagagtcactacaaagtagttacagcctcacatatcaacctcctcatttcttatgaagaagtaagattagttctcgctgactcattaaataaggacataaaactaatatgcacaaaaacttcagataaattgaagatgactaataaggatacctgctaacacgatagaaagttatcagtgcgtaaacaccacatgaaagaccgaaacatgcccacagaccaaccatagcagttatctttgggagattagaagctacacatgaatgcaaaatgtcaggacgaaataatataaatccattagtaagaacctcaacacacacacactattttgttgtatgcgttattcacctgaaacaatggatgtgatgaagaggaccataagaatgactattaagctgaacaacataggagcatagctagtctctcccagttttccacagaagatcttgtccacaaaactattcttacgagttcgcattgccttcgactgaaaaatattaaaatcggattctcagaaagcacatcatatcaaatgattaaaattttaagaaaaactaaaaaaaagcggggcaaacaacattgaacatactctacaaccattaaacaaggcatacctcatcctgtgaactctaaaccctacagtaaccctaaaacagaccgctatcatattgtcgctcttacatctacaccctaaaactgaaacagaccgtagaaacaagttctctaccagaatgatgcttaactatatctgaaaatcagagccagttcatctaaggatactgagaaaaaattctgggttagagctgcataagaaaaagcaaatatcacaaagctgccgtcttttctgcgtttaaggcttatctagtaactgtaaacttataaccatatttacatcaaactttcatatattcaatgctattgttttttcatatgtttgtctgtttgtaaattgtaaatacaaatttacagaactttgaaagggtattttgcatgaaacattttttaaatagccttattaacctattcctgtccatttaatgatgatgaaaatgaaatatgaaggagactttgattttaaggagcgagccagcaagcaaatgtcggatccacaaatcaaatttgaagaagctaattgtgaataatcaagatatgttcctctttacggatgttagaagggtagcaagcaacactaaacattacgtacaaggaaaagagcgagctgcctgtgacctttatcagaagcaagcttaagtggcgtggatccagtgttatctttcaatatcagttcctccttggttccagcatgaactagcagcgtacaagcctcaacgttttccttaatcacagcccagtgcaaaggcgtgcagcctggcaagcaaagtgattaatgtaagaatttctaagaaaatagtgcaaaatatatatcagggtatcagcattctacacttttcgcaagtcattaacagtctggaatgctataacaatccctccataaacaaacactcaaaaatcagagttcataaactcttatccgtttttgcacttatctttacgcatcataaggtacagaaaaaattccgatgtaagccattctttattaattatagagcagacaagtaaatacagttaaaagaaagttttaagagtttctgatttgcctgtgttatcttgtctatttggacatgcgtcccgaaagagaagtaaccggactgtttctgtgaatccattgtaagcagccctgagtcatacaaacaagaaaaatatagagttcacagtagttctccacatattgtcaaatgataagtaacagagatactatgtacaactaaagaatacacactctaagcattcattaatatctctagtatccataccagtgtagcggactccttccttcaatatctagtgcgttatagtcagctgcatagtccacaataatatgattcacgaatgctgtttgtccatattgagaagcaacatgaactgcctgcacaacaaaacatgtcgtaagatcgacaaaatcttacaagaatctgaagcctatgatcacagcagcaacaagcctgatgcaaaacttataactcctgatccatttcacacacctttagcaaacaaaaacacaaaaattacaacagaaagaagatattaccctgaagccattgacatcaacagcttcaatacgagctccatgttgaagtaaaaggtcagcaacatcaatggagcctttaacagctgcccaatgcaatggtgtctgttgtatattatcagctgaattaacatcaccaccatgctgcagatagttcaaatccaaatcaatcactacaccggagaactatcacagtattatcgagaaattggtacctggatgatatattgagcaacgtggagggaattgttgagtgccgcccattgaagagcgtagaagccattatcgtcgggaagtgagacggaagagccattatgttcgacgaaatgtttaagttggtggacatcgccgtaagcggaggcggagaagacgtcggtgatggttggtgattcggtagggctttggtgagagttggaatctagaggcactacttcgatctctgatgagtccattgttactcaacgatctgaattgaaattgaagtttgaggacttaagaaagaggtgaatgaaatgggtcggatccagagtgggtattatctcggatctcggatcttggatcttgttaaagtctactctttcatactttgactaacgctgattattcatttgtcattccattcctcacttaattggaaactagtttgctcgtttcgtcgcagcggcacgcagcggcagcaacaaacactaccgtagattattgtttgttttgttaccgtagtcgttgacgctttgtgtatgtttttaatacgttgatggcgagtgccggttagagcagttgtaacggcaagtctttatgggttttttttgtgtggcaggctcttccagaggcccaaaattaaaagaaaaataccaaaatagataaggatgctccttatgaaagggattttttgatatctaagggacccatacgtggctaaatgttattggcctatgaagtttgtcgacaaacataatttttgagcagacttaaagaagctgctgtttggtgaagtggtgtttgtctgactttgtcaccttcgtttgacttggctatagaagtctgatttgagcattgaaagattttctggaatcttggaaatgagatctttctaaggtataaatatattcctctgattcattgtggtttgataggaatttgctctcaaagttggtttttcgcacaatgtattattcttggtctgtgttgcgattttggcaaaacgggttacaaacgagtttggaatgagatgaatgagagtgtggagctatattcttgtaagagggcattggattcggtgaccagaaacatagtatagtgacgacgctttagagcagttatttcaaagacttctaaggctggattttgcaatggtggcttgcaaatgattcacataaagggtgtttcagcttagtgcatcccagatgtgaattaatgggtgtgattgtgcagtgtgtgtttttaagcctttgttctgcatgtgtgctcgttgaaagaagaaagtagagtcaggggactcatttgttgaagttccagagaaggattcaccttcattattattataagatggtcgggatcaatctgaggtaacattccagagtggtgtaactccggttcagttctgtaaggttagctgaagtgacatctgcaaggagatgttggtcgggatcaatctgaggtaaaaatattcaaagttgagtaactccggttaagtattagcccaggaagctgaagtgtcttatgctacgtaaaggctgtgtcaagatgttgttgtggctaaaggatggttcacacaaaagtacaagattaatagaaggaagtggcacttgaagctgtttttagaacttgtgtgattgggagtgactgcatgatgaaacatgacattggaagtgacttaagatttctaaacgaattcattggtagacagtcctgtacgcgcaactgctgagaaaaagtcaagagggaaaagcaaaggagaattctacgtgatgattcactctagatgagaagtttgccggggtcagcctaaattttgaatacatcgtgttaagtttctgttgcaactacaaagattcagtgtaggttacattttccacttcaaaaaattactctcatgtgcgtacggcaggctcagatcctgttcctattggcgacagcggtacctttttgaaaatggaacaactactaagcttgaggttatatggctcgtgacaaggaaacgttttttggattcacacaagagaatgaaagcgatctcctcacaagggtaaaagagaaaggcagcaagtatgacattaaagaaagttgttaaaacagaagaatgtcactggattagttggtgtaaaattatctag

SEQ ID NO: 29539 - DNA, 1279 bp, Arabidopsis thaliana landsberg
gatatgaggtaacagttgaaaatttcttacgggttttgactgggcgtcatgaagaatgctgttccaaggtcaaagcgtctcctcagtgatgagggtagccatatactactgtacatgactgggcatggaggtgatgaatttttgaagtttcaagatgcagaagaactccagagtcacgatttagcagatgctgtaaaacaaatgaaagagaagcgtaggtttgtttcacatttatggtgtttctcgagtcatattgactccatttcctccattagttcagtgctttttatctgtcttttgaaatctggcttgtcctgcatatagcttttccacagggcatttcttggtggaacgaaaattattcattcaatgtctcatcttaattcaattttgactatctaatgacattatttcgcttgcctagattcaaggagctgatgataatggttgatacttgccaagctgccactctctttaatcaggtacatcttcgcacactttttcagggttgttttgtctttatatttaagtaagccataattttagttttgctctgccttttggagctagtatgttaatttgacgttgttagttttgtgaaataatttttttggtagcttcaatctcctggtgttttggctattggtagcagtctaaaaggagagaactcatattcccatcacctggattcagatgtaagttcccttcaccatttcatgaatggaaagtaccattacgatattaaggggaaaattattcaatgaagttgtcattgtttggggattgtttcttctttttatcattgtattgatctccaaatctaatgttgcttttgcttcagattggtgtatctgttgtagatcggtttacatattacactcttgcattctttgagaggctcaatatctatgacaatgcatcacttaacaggtacaataactatgcaactctcgtcaccaacattctgcaaaccttttatatgatattcgttttcactttgattatatatgacggcattgtgattgtcaaattgactaaggagacgattaaatagttggctgtttgaactaatacgcctttttagcctgaactatctgagctagaaacatttgttcacctccccttgctgctgtgcagtttatttaggtcctacgatccgagactgctaatgtctactgcctactaccggactgatctttaccaaccacatctggtggaggtatggactaaattgatgcaatgtgacgtttaattgattgtcagcttaaattactattct

SEQ ID NO: 29540 - DNA, 1831 bp, Arabidopsis thaliana landsberg
tctctgaattatgctttttccttataatcttttgcaggcaacagccctccaatactttaagagattttatctgcaatggtctgttatgcaacatcatccaaaagagataatgtatggttcttctaaatcctcaaaatggtcaaaagctttgcttttttcataagagaatagttttgaaattgtttatcaaattgagctaagcattttgtatttctgagttctgagatgcttttttaggcagtcataaatggtccattgttgtaatttggactaattgttacctttcattgaacaggttaacctgtgtgtatgcagcttgtaaaatagaggagaatcatgtatctgctgaggaaattgggaaagggattaaccaagatcaccgaataattctcaagtatgagatggctgttcttcaggtatgatatgagtcaattaatttgtaccaacttccatatgtttacttatccctggtgttcttttctctctctattcttttgttcatattatattaactttatgtgcagagtttggaatttgatctgattgtttatgcaccgtatcgtgcaatcgaaggttttgtcaacaacatggaggtaaatcaggcctgtgtaatttcttagtaggtttccttatttcaactggcttttctctgtttacatcttataatgatgagactctttttgagtttattggcaattgttttgttgcaaacaaaattctgaatgttaacttaacgccaagaacttggtgaaccataataggatataccaagattttcaatacttttttcggtgtgtaatttttcatccttgttgaacttcacgctatcttcaaaagtgacctcatcttttcatcatataggaatttcttcaagctagagatgatgaaatccaaaaactagaggtagatctctcttcagatatttccttaatcttcactagattttaagcatgtggtaactgaatgtgggatcaaaatgtaaattttagtgtaagtttgtgatcatagctgtaagtctatttacttaacaggctttattgaaatattattttctcatactggcataacttttcaagtattctgcagagtttgctcaaaggggcgacagcagaagccgataaagttatgctcacagatgctccactcctctttcctcctggccaggtgggcatgctagtttattttgtctccctagcctcttattatcagattaaagatactgaataaaatccatcaaagaaactggttaaactcattgtttgggatatttcagtaaagctttaaatatgctactcgagacataaatttaggacgaaagttggtgctttgttttctctttgactgatatatagttgaaattaatgaatgtttatgatatagtagtatagcttatggatatatactcaccttgttccttctttcaggatttttctttttttctttagcgtatatgtaacagaagaagtatcacaaattgttgtattgtttctcaactcttgaacgtgtgcccttgtagttggcattggcgtcgttacgtattgcaaatggggttcttggagtgattgactttgataggttatttctcttattctatatccatcccgattatttacccttttaatctttccatgatattaatctcgtggtctcgaatttctgtatatgcaaagcattttactggttgtattttcaactaaactgcatttgttgcaggtacctagagaacatagtttctcaacgaaactctgagcacacaagttcagaacttaaaaagttacttgataacattgaatatttggtatgcagtaactttcataatttatcataacaa

SEQ ID NO: 29541 - DNA, 1271 bp, Arabidopsis thaliana landsberg
aagtcatgtttttggttttcactttcatgatcttgtaagagatatattctttccaggatttaacagacaatcaacaatgttagttttaaataacacgtgggtatatgcatttggaaaatccaatgttgtcatcagtcctttttaataacactttggtattacaacatgggcgtttccgttgttgatggcaatgtgaaatcgtctattaaaaacattgttgactattgggtcataataaaaacaattaaaaattaagttataatagatgcaatcatgcaaacaagtcgcaaaagtcgtaacgggatgagaggaaaattagttggaagaagagcaactagctaacctaccaatcgtgtttactttaaatgctacatttaatgatatataatctatataatgtatcaaaaaaatgttaaagtttatatcataatttctttttaagttatttaagatagaagagccaatggcgatgaagaatacatcacatgttcttttgctaagtcttctgctttgcctgatgtttgtgattggtcttgtagaagctagtataccaggttagttcacatgttaagagaatcgcacaattcataacctttacaatctatcatgtttttgaaatattggtaaacgatgaagtagaatgaaaatcgaaaacgatgttgtgaaaagagaattattaacttaaatgtaaaatatttttattgaatcaagataacatttttagtaaaatagggacagagaaaaacagtataaaataaaataaaatagggacagaaaattgttcttctcaattaggatgaacaattgactcagatttcagattttgaatcaaatggagcagccaaattttatcactaatatatcattaccttggctatgaattagatgacgatatgggtccagcaatatatactccaccatcaggatcatgtggagctcctatttccaaatatgatttccaagtactagccaagagaccaccaccatgtagacgtcctcgactcgaaaacacagaagatgtgacccatactacacgaccttgaagtttaagaacaatactcgaactatatgtaatattttcttaaagatttttgaagtgatatgtggagtgactctaatctaggttattacctatattttcactatactgatttattagatattgtttaaagtttttagatatattttgactgaacaaaaataattctaaactcaatgtgttacttccaccgattaatttacctgggtgagattttaaaggagaatatggc

SEQ ID NO: 29542 - DNA, 2710 bp, Arabidopsis thaliana landsberg
  unsure (1)..(2710): unsure at all n locations
gggcaaaaacgaaaaacgaagatttttcttttcttggtggaggagattcatctttagaactaaaaagctcatttcaactatatatacatcagagtatgctcttttaccttagaactatcggagcaaatttacatatcacaaagaggaatcttattgtaagagccaaaataaaaaataaaaaaataaacaccttagaacaccacaaaagagaaggtcttttaccttactatgtatacccatcagcggtataaacccttaccgtgctgatcaaaccgcaactattgaacaactatagttctactcactctcattccttcaccccatttgaggaaaactttagcaacagatagataaaactatctcatatctcgtgtgttgaaagcttgttcgttatctccgttgttttgcctgattcttggattgatggggtttttgttttaccataaaccaagagggctctaggtgtagaattacctcagcttcttctgtatgtatgtatttatttcagaccaactgtagaactttgattgacccatttgagctagctgaaacaaccatattnnnnnnnnnnnnnnnnnnnnnnnttgaaacgaacaggttgttgtcctcctctatctccttacctgatattggatcaatagaaccaaacttgtacgaggtaattggcatgggaagagaccggtgataggcataaacctgaacaaaccaagaaacagcatatttctcaatcagagagatcacttaaacaacaatactaccagattagttcttttttgaccctacgccagttattttactaattgttagtatcaatggataagttcctccatcgcgtataaatagacggaattcacatggaactgtgattttttccatcacatgaaataaactctggagcttctagttaagttgagaatcaaactatcaatctgtggcaatgcttgttaaaggattatagaaaaggagattccatacacaaagttataggaatatcaaagagttcccaggtttgtaggggcatacctcatttgtctcagagccacaagctatatatccatcagaagtagacaaaccaacaaagttctgaaaaaggcaggaaaagacaaatcaaccacgaaggaaaaagagaaacatcattatatagattaactcaaaattacgtttcagcattagctaccttctcatttgtatggccgccaaaagttaagctgcaagcatttgttgagaggccaccgtgagtggttttcttaagatcccaaagctttaacgtgttatcagttgatgctgttacaagagtttcattatccaagaacttcgcatagctaactgctttgttgtgtcctgacagtatgcaccaaggagttcttaaattccttagatcatagcagtaggttctgaagtctgatgatccaaaggctagcaagtgagaggactgtggagaaaattgcacacaacaaacgtttgcaatgttcctgattgttcctaagcagttcctctgcacagtcaaacaagaagattgtctattagctacaaggctgaaaatacgagcatgacaacattgacagaataatccaaagcgctattgatatattcatatgtatatatgccagatatctcagtaggagtagctattaaaacgacaaaatccagtatagaagagcatgcctcattgatgttccatagcttcacagaacaatcatcgcttccactggctaattttgtcggacaagcttcagagaagtcaacagaccaagccctcttctcatgctctatgaaatgtgaaatggcctgtcctgttgtcacatcccataactggattcatcataaatacgtttgtattcattagaccgaaggaaataaaggggtaatcaagtgataaacaatctacgtaaaacttcaaaggttcaaataccttgacaataccatcataatcagaggaagctaggtagttcctaatgtagttgttccagcaaacgccgctaagctttgatctatttggcatttctatggctggataatgaatgtcaacagattcgttgaaaacggaattgaactcatatatcttaattttttttgacacaccagctgtggcaaaataatcctcgtcccgatcgaaacccagagaacaaatcacatttgaagtgttgttcaactcactggtcctcagcacaccccgagtttcaaacttactatatcgagcatatttgcataacccatcaaagaacgctccaacacgatcatctgagctccaagtctcactgttttctacttctgctacagtattatcactatttcttagcagatctctatctgggcgtaacctataacgtgcttcagggagatgtgcgtctatccttgcagcgaaataagcgctttcaagctgattaatgttcctgatcagtctcatttcaggtacactagaagcaggagatgagctagaagcttcttccagggacggaggccctatggcacaacgtctcttgacaatttcctcgatatctgcttctacggacgcaatttcttccatcaaatttccagcatgcttctgccttttctcttgggacaagaaaaggaaatgctgcaagagttcagactctgtgtcctcttgttcaatggataaagataagccttcagcatacaaatacgggatttcattaactactttagattgtaggatgtccctattacagaacaacatcaacttatttag

SEQ ID NO: 29543 - DNA, 2634 bp, Arabidopsis thaliana landsberg
catctttgaaactcggaagcccttctgcttggagtccatcaccacttatcagaaactgatttccaacaataaacgatccaacagcacgaattatgactccaccactgccgcaaggtttgcaatgaagcttctcaacgacatgaacaagtttctcactcggtaaatctcctgttaatgtgttacgaatgtctgataatgctgagaagatttcagttgatcctgtgttatgtttcccagagaaactgaaaactgaagtttcagtgtagagcgattttgcgtggtgccaaagatcatcaaatccatcaaagagggagtaataatgtactggtgagcatctgaacaaaaatccaataagatcattaatgttaactttaatttggtattttcgaactaagaaaagtctgataagatcatcatatacttacatcagctaaatctttcaatctctgagttggatcaaagatgctttgaacaaaagtcgccaaatctactctttccttctcgtgttttgtaataaaagggtgtgacatgagctgttcaagtagcagaggaaacaccatcagacttgaatcaaagcaaagctttataggaattatctaataaattcaacagaaagaatccaattcttaaccagacttgtattaaaacaaataaatacaaagaaatgcatcgaacttctaacaaacagacgaatactaagagaagcaccaaacttttaaccacaatttgctctaaaaatgacttatttcagtaaagtactagactggtaaatgtatgacatttcagttttaccaacctggtcagctgttggtcgagcatctggatccttctggaggcaagcatcaatgaaggaacagaactctggtgagaattcttgttttggtggtgttggtgaaggatcatccaatatcttcattcacataacagtaattagtgtaaatataaataatatatcggaagaaaggatttggggacaagttgattaacctgcaacataagattaacaggcccttcattagctatatacggaaactctccagtgccgcattcaaaaagagcgagaccaaggctccatatatcagctggataagaataactgtcattccttatcctctctggtgacatgtaggtgacagttccaacaaaagtagcacactttgcaaccatcattttcagataatacaagttaaaaactcatcaaaaaaggattactggattaataaggagtgaaagactgagatacaatcactaaccatagccattgaattctcaaggccagcacttatgccaaaatcggttatcttcggttcccctttgagatttataagcaaattagcaggtttaatgtctctatgaacaagatgtctcactccatgcaagtagctcaatcccttaaaatgaaatcacatcactaagaatgaatttatatacacttaaaacataacgcatatatatgttgcacattatagagagagttaagtatctttacttgcaaaagttcgtggaacaatgatgaaagaaccggctcaggtatcttctttgttacttttaaaatatcagcaagagatcctccattcatatattcaagagctatgctgatttgtcccgagtctggactataaaacgctccgtgaaaatccacaagtccttcatgacaaggagcttcacacaatgtccgtatctctgtaagcaattgctgccttttctcctgctcaccaaaatcagtacatattcaaaaacacatactaaatggagtcacatttttctctttaaactagcaaaagagattaacattaccctttcaaagatattaatcttcttcaacgctaaaattctatgattagggatatgaatagctcgttgaacaacgctgctagctccgcttcctatagctccaaaaacccgcatttcgtgagaagcacattgatacgtcgtctcggaactttcagactcatccacatgagaagatgtacatttttgtaacccgagctcgttaaaattataaactccatatgatctactaagtaaattcacagtcccaccatcagataacttcacaaacaaacaaaaagaagataaaagtaaacaaaccagaaacataacaaaacttcttaacaacgaaaatcacaggaatcttactaaatatgaatcgtttggatccaaagatgaagatgaagaaaaacccttctcagcatcaaacaatggagacagcttcttctttagctcctccaatgccgccatgataactactttttctgtaacacagacaagagtcaatgaaaaacccccaacctttttctaaattcgaaaactttctatttagaagaaactaatttagctaaaaaagaagatttcttacttaacaaaacatgaaaagtccccaaaattttcaagtttctataaattaatttcagtttttcttatagcccttcaatagaattggattcaaagtcgtgattagtcaataaaacagtcataattcacaaaacataacagtgaactaatcgtagaaaattcagaattaaatcaacggatcaaattcacaaattcaacaaaatcatacaaaaccaaaatgatataactaatagaattacagataaaaacttacctttgttactctcagagtttgctgct

SEQ ID NO: 29544 - DNA, 1448 bp, Arabidopsis thaliana landsberg
  unsure (1)..(1448): unsure at all n locations
attggaaaaagacagaagaggaaagtccaagaaagtccctcttagattctcgtgaattccttaaattccaaccttcatacaagggcaacagcgattgtagttagatttcatctgctttgcttacgtttgagcaaagccatagaaaaatccaatatatataaaaaaagtgttgcaagttgcagcagcagaggtaaattccaaaactttctttcgtttgataccaagacataaggtttctcctgaaccagctttgatcgccggacaaaacggtagaagaagaagaagaagaaaattgnnnnnnnnnnnnnnnnnnnnnnnnnngagagagaatgaagaagattaagcaaaatgatagcttataaagttgaaaacagaggaaaagttgatgatccaatctccaagccacattgtttcatctgacaacttttccaggttctgtctgataaaaacccccccaagcttccgtaatcatacacgatcaaatcaacaacaaaggcggagaaaaaaggatcataaaaaatgcatctttaaatttccaaagttgatgaacaacccaacccaatagaatagaataaaccttcttcttactgttcaacattcaaataaaaaagagatctttttttcctcatttctgtgttggtgggcatcttttgacaaacaagagaaagagagagataaagattaaattttgtttatctatcgatgaccgacaaagccattagttctctgaattgggcaaaggcaaagaaaaagtgagagagaaatgggagaaaaaatcagagtaaaaaagtggaaaactttatgccaatttgacaaccacaacgtcgtggcctttgctagcctccacaggagaaagaaatataaagagaacaatcacagttggaaaatgggcccatcatcttctattcctctctacagaaacaacagaggagagagagagagagatagaaaaagttagaagctttacatggaagaaaagtattttgcagagattttttcaacagccttcatcattagcctcaccggtaaataattgatctctcaaagctctgaatttgagacatggcagtgacgaggattgttgtctgcgagcatgaaagcagagagaaaaacaaaatgggcttgtatgaataaaagtgaaaatataggagtcaaattgtaacgtttagaggaaaaaggtgcaaatagataaattataagaataagtgaaagtgaaactataggggtcaaattgtaacgtttagagaaagagggtgcaaatagataaattataagaattgagtgggcgcggccaaagaggagagacgtaattggtcattggtgcttttgcttggctggttatggaatatggagaacacgtagtatttgagattattacaccaaatgcgattgttttcattgaccaagtcattaatctaaagttaacgacggcgttttgtcaaacgtag

SEQ ID NO: 29545 - DNA, 3668 bp, Arabidopsis thaliana landsberg
acagagcacatgaaggcatgtgcatttgctttttcttactacaatacataaagtggttcaatgaaaatatcgtctaaagattagtcgtcgttaccaatctagttaatcatctagatggattaattaataaataaaccttatatttatatttgaaacgaccaaaatttgcgttagccaacctttttagcgtttcaaattattgaacttctaatgatagcccaattttacaacgtttcctagtttggaaagccgtacattgccaaaagagaaaaattatgttgataagaaaaaaaaaattaatcgtgaggctgacaaatggttttgatctaaaatgtttattatttcggtggagatatacataaattagacacagaaataaataagagggccatgcacatataatgaggccatggacaaaatcatgcagccatagttattatgtatgagacagcacatgatgtgctatgaggccatgtttcctaattcctatgaaatcagactagtatccgactaatttccgtaatcaactcttactattctttgtttgtagccacaacttggaaactgagctttgaaagttaatgaggtctccgtgaaataacaactccaagaccacaaatcatatctctctctctctctctctctgtcacatgaaaatgatgcattttttctctgtttgtgtgttttcatatatccgagataacacttgaatttctggcccaaaagacggggaaaagaaaaaagctagcacgctaccggaggtaactcgaaacgacccaaagcaaaacatagcttaggagcgaagacatgacttcaaaacctcttggtcctttgatgaacggtgggatcacagataccatcaagaaagtcccaaccagccacgagaagatgaaagctcccgctctgtttcaaaatatcaacctgatcaggtgtggattctaatcaagtaggtagcaacggttttacaattaagatcagcttattacccgtaaaggaaagtccagagcttcttctggagcctttggtggatgaagtaaaaggtagctattagtgataacaaaacctgcaaggtcggtccttcttctgtcgggaacagaacggttagaacgccaagaactgcaaacgtgactgctgttttgacaaggactgcattgggaggagtttggaatctctcgaaaacaaagttgacaactttggactgcctcacttggcgaacctttttcgatatgtcaatcttggggtttttcctctcatgaaacttctgcatgataatcttgtcatgagctgattcgattgcatcaacactgggtttgtgccctgcgtattgctgaatgagaaagttcctcgctccttgaatctcatcctctgaggccatccggcttatcccaagccgtttatatgggtctttgacattgatccgagggaagatagctgaaccaatggaattagcttagtcagtttggaattcaagttttcaacccaagaattacgcattcattgaattgctagctaggtattgcttcgtctaatgaaagctagttcgattcaaaagcacttaaatataactactaaattactcaaaagcaccgtttacaagcttaactcaggattatgagtctgtgccaattactagaaagcataaccttaaattgtgcatagctcagaagaatgtattaccagctgaatcgtctgccatatcaccaaaggaagcactcatggcacgagtgatcatagcatttcttctttgtgtaggaagcgccaaacgagaactgcgcaacaccgaagagaagaacattacagataaccacgaagaaagaactagcatatgctaaatgaaacaataaccaaaaaacactaccttttaagaacaggccaagcggaatttcgattattcaatttgctaagaacagtaaaagcttgagagcttctctgagatgtaccaaaacgatcagaacgccatcgaaagtgaaatctgggcggagtaacagttaagccggacgcattcatctctaactaccgaaagctttacctcacaccaccaacctcaatccctaaaatcaaatgaaaatcaggcttaaaccctaaacaaccgctaaatcaataatcgcactattactatggattctaaactcaattagcaagataacatccaaaatctgaagagaaatcggaactatttcggaattcaagttctcgcactaccaatggattgaaccaaaagccaattctgaaatgaaagcagctacagagtatctaagtggaacccgaaacaaaagagaagagaatcgaaagaaggagtaccagaggagaagagacttatcgccgatgaaaacaatccacttccccttttccttcccgaaaccatacacgaaagacaaaaccttgctacgcaacggatagaagagataccgcacaaccttctcgactataccagtcgcgtgctatataaaatttaagtcatcagtaggcaacattccgtcgtagtctagctggttaggatactcggctctcacccgagagacccgggttcgagtcccggcgacggagcttttttttgttttttcaatttctttttttaaaacttaaaatttatcgataccgcaaaaaactcaaatgatgaggctattttatgaacttttaacagataaatgatatataattagtcataataaagtctgaaaagaattataaccagaataactgttattataacccgggtgatagtaactagacaaatgtataactgtacaacatttgtcgtttttggtatcatcgatagttttcgtagcttcttgtgacgttagatttacagagtctggttgaagatagcatcttgagcccctacaaagacattgattgatgtaagaagctttgttaagtagcatataacacaagacaaattaatctgagccattttttctacaaaaccaaacagtgaatattcattacggccaaattcaacataaacgaagaattagtaacgggcatatacctcagcggtggatacgcatcatgactggaacaaggttatagtggctatatgaccgttcttcatcacctgcaaatattttaacccaacataaagtttcacttaacagtctgcaagtatataacaaggatcaaagttactgaatctagggttattacaaaaatgcattacctcaaaagcaacattctgatagccatacacatatgtagatccaaaagggttgctcgttgagccttgcgtctgaatagctgctggcccacattccccgagtatttcctaagcataaagacatttccatgagaaatgactcattcaatctgttctgatcccagatttaactattcagatcaatttcctaatgcttcatcccaagtttcttcccattacgcaattagagccaacaatgatgggatggtaaagagattttacgtcagtaaaaactctcacgaacaattggtcaagccctaacatagactagtttttcattcaattttctgttctgcttttatcacattggtctgaagatttaccttgacctgatcccagctagtgcttggagtgatcttgtttccacttctgtttgcttctgccgcatccgctccagctgaaagtgacatgaaagcgtaggttttgttggaaaaataagacacatatatcgagtattgaatatattgactga

SEQ ID NO: 29546 - DNA, 2191 bp, Arabidopsis thaliana landsberg
  unsure (1)..(2191): unsure at all n locations
catgtattggtgcaaatcaagtttactttcatgtggtaactttataatcaactcttaaagcttttgattggaccattatcgatatcatcctgatctcaacatatatagctacacatttaaagacaaacaatggtcaaacaaacattctttactagagcaatctcatccgaaaaatgcttgtgttgaaaaaaaacatgacattaccgagcaagccatagatgttattaatcaagctgtttnnnnnnnnnnnnnnnnnnnnnnnnnnnnnnnnaggtcgcaaccgccttcttctggctctccaccgactcctgccttctacgtctatacatatcttcttctggtaactcgagcattcctctgattacatttagtccaagattgctattgaactgttgttcatcatcaatcacgtgaacaaaccctttgtctaaaccaaactcaacgtggaagtaagggaaattcttcggtatagagttcctcagacctttcacgctagtgtctatgagcttcttcgcattgtgctgactccattcactttccgcttatcgatcgccttcttaagtataaagaccttctttgctatctcttgggggattgggatacactcgatcaaacagtggcgacgttgctgagacaaaccaatcactgtctccagaaacactgcgtcttttccttcttttgcatacatcattataagacactttttgaaattacgaatctcgtcccaaacattgtcgtcaacacttctgctggctgcctcgtgctgcattggcaagatacagcaatggccttggacaaggggctgatgttgtggtaacatcagataggtgaagttggcaatggacacaactaaatgtttcggccgctttgggttctcaaaacagaagagacagcgttcttgctgggtcataatacgtttcacacggttgtccttttcaggaatgttacttgacgattcccgcttccgggactttttgcttggagcgtctccatattcatactcatcatcagcagcttgattcgatgttttgtactgtttgttctgcattatgctcttggctagatgcatatccgtatcatcttcattcttccttctacccgacatatctttgacaggatatctaatgagtaagaaaaagaggcattgtaaaatgagaacgatttggcaaaaaaaaaagaaacgccctaaacagctcagaaataaaagtaaactaaacttacctcactgcggttctgatggagtggtggtctttggatgaatcgtctccaacagcttgttttgctttcagcctttccgcttcttcctgtaaatattaagagaattcacttcagaagtaagcaggaaaaacagctcaactaatcagactcaggaaaaactgttagaaaaaagactcaggcacaaggcaagtgaatgattgggaatttcaaagttattgtctcaccataattttctgggcttcttcatgtttccccttcatacggagctgtaaggctttagcagccagtttattcacacttaaattttccatactcggaagagtcccttcgtcatccttattggtctctgacggtaatgcttcctgctccacatcacttctgtgatctccacgagtctctacgggagacactgatacattcttctgcttagaaagcatttccttcatgaaatttccgtcattggaaaacttattcatgtgagctgcagcttcagatatcagcttcgagtcttcgtttctatgagtttggctctttctctttccccaggataaagaagggtcggttttgggggctctcaatacacgatggttcaacgactcacctttcaaatactcccgattattacccttcaaataaaatacgtcacgaagttagaatataagctgtcataattcccagtatgaaacagtactaaccagtatgaaacagtacattagcggttcatgtaccttctcagaaattctttcttttgtttttttttctgaatcattcttttcattttcccctcttcttctattatttatggcattcaaatgggcacgagatggagctgctctttgagatgcgacagactcaacaaggttaccaagagaaccatatcgctcgccagcaacctgcataaccctcaaaatgataaggcaatactcaaagaccaacgagactatattaatcgtaaatcaatacaaaacttacc

SEQ ID NO: 29547 - DNA, 3090 bp, Arabidopsis thaliana landsberg
ctcctctttcgcagctttccactgagcacaagtggagtctcctttaagttttggatctaagagaatctagagaaagggttgtttgacgagattcaagaaataacagcccttgtcaaccaatctggaaacctttttatttgacctcaatgtagatgtagcagctactgttttcttttttgtccgtttcactgttaccaaagccaagtaagagctcagaaccctcaatctatgaatgtgataaacaaaaatgaaaccaagattagagattcatgaagaatttctcatacctttagtttgaccttttgctaatagagacgatccacttgtaacatctgtggatttagaagcagttgctgaagatccaacctcagtagagtcattggatctcgaactaggcactacagctgtagaagagttgtttgggatgtggtgattagcagaaccaactccactgtgatgtagagatgactcacccgagctaatgacaggaaacagtggagctgcaccattgaaatcgtaataagcttcaccagcactggctgctgcaggagcaacttcagttgtaccaggaacagtttcataataaaatgtggattggggaagagaaacttgagatccatccacatggccatagaactgagtattaggagctagagtaacagcattggtatattgataattggactctggataggataagttgtattgtgtcgcataatcagcagattgatgcatatatgattgaggtacggtatagggaactccgagagagtcactggacaaagatgaagcgacatggccattgtcaggtggtggaggaattggttcgctataactgtctggtggcggtggaggaacatcttcactctcagacggcggtggtggaatccattcctcacccggaggtggtggaacatctgtatgaaggttggatggctctgtttgactgaacatcttaccatcagaagcgtctatcacttgaacagaagacactggaactgattcttcaacttccatatccacatccatgtcaacatcttccacatctggggagccggccttctgaagcatctcagttgaaggaataatatcagactgcccagctggatgatttggggagtgtttaggagatccatcgccgctcccatcagctgattcatctgaatgaagagattttccagattgagctaactctccatctctctcactgtcctcggactcactctctgtattagcatctgccaccaacttttctttgggagggcttttgttagtttctggttcatccattactgcagattttgcaagctggtaaatctcatcgttaacactatcttccagccgcttaagttgtttctcagtgtgaacccaaaaagaaagtaaaggtgaggtgtccaatatgagcgcctttacatcagaatgtctgacttcaacctccagaatgtactttgttatctgctcattgctgtgaaagttcccatgcgacctataaatttttagaaattagacattatcatattttaaagaagataaggaactgtggtctctttacctaacaatatcacatacgtaaacaagaagacgcaaactagaatatgttacctcttcagagacctcagcttctccagtaagctttcgatttgactcaacaagcgagatgggaggtcagtagcagctcctgcatcaaaataagtatgcacatgatctgaatttcctggccttgaaaggtcctcctgacaactaacaacagagtctatccgacattcaacttgatgaccatcagttcctaaacttttgacatatagatcttcacttttgtttctcccatccagctcaacagttggaaaagtagaatagtcagttcctgtgaaactattttgcacgggtacgaaatagcttggttcaacacttgaaatcaaggtggaagcatctgtaaccatgggcccagactcattgtacccagtcccatatgcaaaggtagtttgagtcaaaactgtaggcaattcccacgaagtttctccagtttctgtattccagtaataatactgattgctctcctcatgcagaatcatcttccactgcgacgtaacatctgtgggagcctggtgctccaaagacacactgccagatgcttgaactgagggaactgtctgcttgtttagtccatccaatgttgttgagttactcactgtggtataaccagtttctacttcagctctagaatcaagagcagaagaattctcccctgtctgctgttggtcagccatctgcatagtggtggtgactgcacctgatttgatattcgtatctttgtgtcctccttgaattaatccatcaacctggtataaataaaactcatcaagactaacagatacatcatcattactccgatttataaaagttagttgttgttacctgctcatttttattggctaaggaactatctgcagaggtatcatctgccttcttatccgaatcttcttccacctcatcatcactatactgcccaagtaaaagcaaaggattttctgttttctgacctgaaaaaagcaaataaataaagcgtcaaaatttgggagccgtatcaagtacatacatagacttcagttatatgacctgctaaaagtataggaatgtgatactttatattgcattgtaaagtaaaaaaaaaaaaggatagagaataacgtcggggaagatttatcagcgacctgtcacaaataaatgacaaagccgtcagttaagcgtagcaagccaaaacagccagagacatacgaaccgctaggagctacatccagaagaaagtccccagaaagcttgaagctgcaaaatagaccaactcattcaaaatatcactgtgtcttggcctgaactgatgtcatacgacgttcttaagaccacaattactctaatactttgagaagaaatattggagacaaataactatgggcttggctacatagcggaatttgaaaatagcgatggaaccccctgagaagaggtgattgggtagctattagctctgttgttccgtcaattcatacgcacatttgagccaccaatctcttcaaatataaagattctaaaaaa

SEQ ID NO: 29548 - DNA, 2221 bp, Arabidopsis thaliana landsberg
gcaactgaacctcgacaaatgacctctcatcgacacccattggagtaaaaccgtccactgatccatctcttctggttcgtttactttctctgaccaactgagcaggatcatatccttcccaagaatcggggtttgacctcatagggcgcctcgtaccttgtgcaggagatgggaggattccaggtcctgttggagatgggagtaatccagttccatttgcagatggcctcctccagtttggctccttaccaacaacgtcattgtattctgcaccattatatgaacgctcatttgtacctctgaggggcctcatagacccaggaattccagtagaatgaggagaagatacaaatgaaggatcattattgaacatatctgtccttgaccgtttcataccagagtaaaaactagtatcgtcttgctcaggaggcaactcatcgtttgagtacataattttgattctaggattattgaataacctcccctgtaggccttccttgcattggcgagcttcctccgcgctcctaaactccacaagtgcaaaattccttgatgggtaactttttaccctctcgatctcaccaaagagtatcatcgcattgtgcagaatttgctcatcattgcattgtgtagcagtaggagggaacccaatccacagaaccttacttggctggacatctcctttaaagtcttcatatgagtgaggatactgtaagaatataacaaaacgtcaaaaccagtaacctatacatatcactagtaacaagagacatactttcaacattcaagactaacctgcggtttatgattcatattgccatttctgttatcgtaagagccagcccattgttcctgaagataacacaaaggtaacttgatttcagacttaagaagttgagcctactctacaatgaaatagagacgagtaaatactgctcctaggggcacaagacagagctcagccctatcagtttgacgcaaattatgaaactaaacaaaatgtttactggagcgttttcaaaagtaaaaatcaaatgccacaagagtgcttactttttttggcgcttgtgaccggagaaaatcaacacgcaaaaagctaccacccataggctttccattcatgctcttagcctgtaaagcatcatccatctcataataatcaatgaaagctgtcttgcgttctctgagaaacctaaaatcctcgattttcccaaacttgctgaactcttcctccaggtcatccttggagacattagggccgattccacccacccatagactcttacaaggttttgcctgcaacaagaaaaggtcgataagaaggcgatactacccagataggttgccaagaataaagcatcaaacatcaaggaaactaaacacacaaactaactagtaatttcaactacactacgacaccaattcatatcaattgctttcctaaacaaataaaattgccgcaaggagaaaccatctcctctttctctgttaaatcagtgttaatagtttctcttgcctaaacatcagattttgtctgtaggagaagtatgtagtccccaaagccggaaagacattaatactttctgcaaaacattcctgtctttatccattgcctgagtcccaaataaaccaatccctgaacactccatttaagtactcaaagccggcaagacattgaaatctgagtctgcctgcaaatgaatatttgtcttgtccactgcaactgtaccaatcccagaatggttgtgaagaagtcaacttctctaggaactacaatgggaaagcccagattgtacgtagggatgggaattgaggaacaaacatggttcttcgaataaagcgtttctgattggtagagttagccgccttaacaaccacgtaatttgtcttcctgaagcatcgagccaaaacaagcccaaaactccctcacactgatatggatatgtgccagcgatactaggagttaggacgatacggttgccagaattttctgtttcgcagatgcagttattgatatctacgtaccgccatagacaaatttctccacgcggtttgatttttgcaggaaactgaacttttaaactccaagatttcttatctgtttggccgatgatagagtttgctcgcttccaaattttcaccattgcgaatttcgagtggagtaagcaatacattcatactcaagcttgtgagatttaacatctgaagcgaaccggaaatc

SEQ ID NO: 29549 - DNA, 2199 bp, Arabidopsis thaliana landsberg
caattacccagttgaagtatagtacctaattccatccaaaagttagcctttgactgaatctcgtactttctgcgttttgcgtttgcatgtatgaaacattgcaattgatgttatggattcactagagttaatacacaaccaacgcaaacacaagtacacaacaatcactagggttagatcgttccttgtaagttttggaagtggcacttgaattgatccttccaacggaatatgtgcagaaagagatagaagacgaaagaggagaagaatcagaagggaaagcgaaggtacaagagttgaacgaacagagaatcgtcttcgacccataaatatttttcgatataggagagcttggattggggccgtatgtgtatatatttatacggtttagggttcaaataagaaaaaaataccaaaaagacgttaattactttatccaatttatatgtttttttaacaatgtagctttcagtctatagattttatttcaatccattaataggtatcctctcttgtgtaataacgaattgagcttatggagtcttaaaccaaatattttccataacctcggaaaagttaaccttgcgaaagttaaaatgatcttacaagtatacaaccttcacatctaagaaactaaatcaataacccgcttaatcccacgactatacctaaaagaatttccattatttatagaggaaaacccaaattacagaaagttactattctcaagaatttctttttttttttaactctttccttaagcgcgtgaaaggatttaagatgagtttgtaaagaagacatttttacaaatttcagatacgtttgtaatatatcggttatacgtcttgtcgagaatctagggtttctttctctatctctctctccttccatggattagtagcgcctccctttctccatctctccatagcttctgggctcgattcttcttctcgggcttcttaaccatgttcaattaaacttcgaattctcgtcctcaccttacagatctcggtgagaatttccgcctgtttaacctaattatccactttcaaaacctttgaattttctccgattcgatttctcggagatccagtggaggtctctgattcgttgcggtacttcaacggaagctattgggtgcattaaaatggattcgaagatcaaaaagcctgctaatttaatcgaagacgcagacattgatgggggttccgagagtgattctaccattagtagcgttttaagtttggaagatgactccgtggttgatgtttctggtcaaaatctggagttttctcttctggataatgtcgatgattctgtgaaaggtctctacttcttcaggaatgtattcaatttgattcccaaatcgattggagggcttgggagattaaggaagcttaagtttttcagtaacgagatcgatttgtttccgccggagttagggaatttggtgaatttggagtatcttcaggtcaagatatcgtcaccgggttttggcgacggtttatcgtgggacaagcttaagggtttgaaggagcttgagcttactaaagtccctaaacgatcttcggctttgacccttttgagcgagatttctgggctcaagtgtttgacgaggctctctgtttgtcacttctcaattaggtaaaaagcttactcctttatgctctgttgctttagttgctgcttcttaatactacgtagcattgataactcaagcatgtggtggattttgacagtttctgttggtggtccgtgtagaatttccaggaaacgtaagttagaaaattattgattgtgatacgtttggtggctgcttaatgatgtgttttttagcatgctctaggtgattgttgtactttattacttttgatgtttaattggatatctagattgttgttatgaagaaaatttgtgaaatcgattggactttagaattgagtttagggtattcattgcttcaaattacattggattgcatttaaccctgtctcccacttgtttgtagatatcttcccccggagattggatgtcttaagagtctggagtatctggatctctcctttaacaagattaagagtttgcctaacgagataggttatctgagttcattaacgttcttgaaggttgctcacaacagactgatggagctatcaccggtattagctttattacaaaacttagaaagcctggacgtat

SEQ ID NO: 29550 - DNA, 349 bp, Arabidopsis thaliana landsberg
tgagcttatcaagcaaggtgacaaggtcgggtcttctgaggctgcgcttctagccaagcttggcatcaggccgttctcatatggtcttgttgtccagtctgtctatgacaatggctcagtcttcagcccagaggttcttgatcttactgaagaccaacttgtggagaagtttgcttctggtatctccatggtcacttccttggctcttgctgtgtcgtaccctacccttgctgctgcaccgcatatgttcatcaatgcgtacaagaatgccttggctattgctgttgccactgagtacaccttccctcaagcagagaaggtcaaggaatacttgaaggttagtatgcat

SEQ ID NO: 29551 - DNA, 1792 bp, Arabidopsis thaliana landsberg
  unsure (1)..(1792): unsure at all n locations
tgctttctttctcagagatctctgcggatgcagtaagctttatgcaggaaccttctcttaacacacagaaatcggttcccatcatgaatgcaaatgcagacaaggatacacctgaatctatcatcaaacatggaagcaattgtgggaaaaatgcagcaacaatgagtcatgatgcatccgaaagctctagaatcaactcagatcctgtggatgcagtattatcggttatgtccagaagctttactggtggtttagagcagaccattcgtggaaacttaaggcctgatgatgcaacctttgcaaagataccggatgcgatatggcaggaaacctctgcatccactacagagaacaaacatagagaggttatagaccgttttcagatactgaaggagcaggaaacagagcgcaagctcaagtctcagaagctccctgattcagacattgatgttatagaccggtttcagattctcaagcagcaggaaacaaatcgcaaactcaaggctcaaaaatgtccagaaacaaaaaagggtgaccaggaggacaaactagaaggttcagtgatggctaatatgggcagaagcagcgatgtgagtgatgttatggatagattccagatactgaaacgccgggaagctgaacaagtgaagaaatctctcaacagcatggatgtagattcggattcagaaaatgaccagccacaaaagnnnnnnnnnnnnnnnnnnnnnnnnnnnnnnnnnatacgtggacattctcagagagaaacatgcgccgcggacactgaacaatctgcatctggcaaaggatacgagagcccgacctcggactgggaacatgtcatcaaggatgattgagtagtgaaatttccttggacaagaagtttcgatcctataatgaaatcttgttattataaataaaaggtatttgtagaataacatgaacggccattatgaaaacgtttgttatgtatgataaaaggataaaactgcttggatgctgattttcataatatgatagttttaagttactgattttcaaaatatgatattttcttgttctacaaaacgaatttaagacatatctttaaaaactactgtcaaacttcttaatactctgaaattagacacgtagtatatacaaccacgtaggaggtatttaggatcaaataaggaaacaaagtgtttaagatagattacaagactgaggactctcaaagtcacttacttagctaggttctaacttacctctaagccttggtattttatagtacatttttttgttatgatattttacaaccttacattacaaccatcaaatttattcaactctctctttaccgttgattaattcaactcccacttatttaattattatatggaagtgacacaaatataaacaaaatttacgcaactttcacatgaaaaatccagtaattttggaaaagatgaacaaaattttgtatgtagagccgagaccgaaaaaaacaataatacatcttttaacttctttttaaaaaaaataaaaagaataaaagaggttgggaaaaggttgacaaaaaaaaaaaaaaaaagtgaataatttggaaaagattcctattttttgactcaaccctaaggtcgcctagggtttagttggtaattatgacagaactcgtcgaacatagagtttgtgaagatagaatcaattctttgcctgacgatcttctcgaaagattttattgtgccgtcctacgaaagatgcagcgggcaccacgtttttgtccaaacaatggccggttgtcttgaggatgtta

SEQ ID NO: 29552 - DNA, 764 bp, Arabidopsis thaliana landsberg
gtatatgtactaaacccaaatgagcacatacatactaccaaaagaaggatggacctatgaaattgcttcaaatttcctgattataagagttgtaaacaaacaccattccaagtacgatttcaacatttacaagtaaagtacacttacatttcaggagaataagacagcccgctttacttacacactcaaatcaaatccaatggcacaagaggagtgtacttactcttaactctggtccttgtaaggtgtccaaatcagtttgctagcatctacatcaagaccacctcggcctgcagctttcagatgtcggtccagaacctttggatccgcacagatcacatgctgtcctttcctgtactgtatcagttctaggctctgaagtgtgcttaatatatcttccgctttgattgctgtcacgtcgctcagctcctacatcatcatacatgaaacagagacagatgagtggattcttagatcgcagaaaccaggattagcctaagactttttatcagtttgaaacacaatctaaccttgatagaaatgtttcccttatgttttttcaagatttctaatagaacacgagtccaataacctctgtagcttagtaagcctagatccgacaagggtctttccggtgtcccaacttttccctctttctttgacagttcataggctgcaactcataagaacaatctgttacttatttttgtggacatgggattgagaagagcaaaaaggtcaaatggggcaagaacttacaaaag

SEQ ID NO: 29553 - DNA, 1847 bp, Arabidopsis thaliana landsberg
tttttctctgagtcacctttaacatcacactggaaaaaaaagacagacaaaaaagaagacttaatgatagcaaacgactttgattcttctctgaaatgatcatctggttcttgagtttccaagtgtaagttctaaatcatctgaaacacattctccatgtatcctttctccttcccaaggcttcaccattccattcgcagccattgcgttacaaccaaacgcaaactcagccgtcattccatcagccattggcacatcagagttctgatcaacaccagcaggaatagctggagagcagtttccactttgtccaggagtccacattggtgaattacaatctcccattttaaaagcctctttgtcgaaaaacgggtttcttgaaactaaactgaaagtaggagaagacggtccgctctgcggagtttgcattcctgagagccatccagagtcagggatggttacttgatcacgagtagggcttcgagccaatggcggagtcacgggagcacttatcgaatttccatggaagaatggaagcttggaaggtgagtttgaagagaggttcttgagccatgggattagtgagttagcatcaccaaatgggtttgtaggactcgggaatgatgaagacgaagggcttggattgtaggaagcacgagggctatgttgatacgatgagcatggactagctgaagtagaaccattcatgaggtccattcgatccattggtttgcatccctacacaatagtttattgcaaattgtgtaagaaatatcacaaaatgtaaccaacacaatccatttggagctgagactctctcaatcttttgctagtggattaattacataatgcaaaagctggtgagcaacaaacaaaaagacattatgattgataatagaaaatccaaatgcacaaaggaaaaaaaaaaagtaaagaacaatgattctgttcgttttataatggtcaaagaacaacatttgctaatggatggatcagaagatctcaaaagaacaatcttttctaatagattatcaacaacaacaaaaagagcataaaatgtttttttttctttctttttaacgaaatgtaagagctgtagagcatgaacaagatagcactatgattgatagttgaaaaccaaaatgcacctaagcaaaaaagtgagaaaaaacaatgattttatttggtatatagtgctcaaagaactaatctttgctaaatggatcgagaatacctcatagattatttacataaaaatgtgttttttttttctttttccattttacgaaatgcaaaagctggtgagcaacgaacaagatgacacaatgattgaaaaattgaaaatccaaatgcaactaaggaaagaaaaaagtaaaagaacaatgattttctttggcatctaatggtcaaacaatgaataattccattttatttatccccacacaagcaaaatccaaacatcatcattagatgttggcaaaaggggaaatcatttcttcagtctcaccattgaccagctaaacaagaattaagacagttaacatagtactaatttaagtatataacaaaacaaaaataaacactcatggaaactactgaatcacacgagccaagaatcccaagtcccttttttattttcttgacacaatatagctttttctggtaaatactaaatccacagcaacataagctaaaatttgagtctttttgacaggttagttatcttatgttaatgtaagtgtgaacgtaagcaaatgaagaaaagttatgattcaacaaaaagcaaaatttcgaatttcagagaaagtgtcagtctgaaaagtaaagaaaaaaaacatgtgagcaag

SEQ ID NO: 29554 - DNA, 1745 bp, Arabidopsis thaliana landsberg
gaattttcagagtcaacaggaaagactcaagcgtcaagattcattgccaaattaaatcaaatacttttcagcgtgttttacaaatcaagagaaagcagtcagagtcaagagtcaacgacaaacaaagggccaagatgtcacggacttgttcctacctaacttgaacatgtggatttaactcctttattccctgcggtagctaagttaagaccaaccctaagaaagagaaagaagctaaatgattcgcttgtagttccttaaatgatttccaagtgaaggatccctaccctattatatttattgggatagagatatacaatgctctagcaactacatgtgtagatttcataaatattgagtggctgcacgtagttttcatatagtttggaatatcaatctttgcagggacaaactcacctgttttcaagaggtgaaaacgtactagaatcatcaagatggtaattcctcacagctgagctacttggctcatcctgctgctggcgctccaaattccagtctatggctgtgtgatcatgagaatacatggaatcttttgtctggtggaaacacaagaagtaatttaagattctattcactcaagcttatgatataacactgaggaatatgaacatacgtagtgggttaatgccacaccagctgaacgcgatggagccaaaggggaatcatttgagtggttcacatctgactgccaaggtgctaactgatattccgactccttcaactttgtctagtacaagaaaaagatcagaaacaatcatctatcatatgtctgtaacaaatacagccaattcaacgctaggaaaaaacagaagtcgaaaatgaagcagaaactagatttaacaccagataagcccatacccggataacatacctcagtaagaaggagcttttcttgtagatgcttaaacaaaacctaaataaaataaaaaaagagtgctgagtagctgtaaaagccaatcactagttttaacataaaaactgcaagaaaaacttcactttcatatataatgaagcagagtgtaatatataaccagtcatttaacttcctatccaaatttctatgttctctggttctccatgactccacataaatttcacagataagacaacaaatgcttatgcatccttatccatgaagctcaaaattatgtcaacccagctccattaatcatcgatataagatgcagtgcaacaaaacctctcaaattaataggctacagtatacagtaaagtcaaagataggagctagagatggtccgaacttacaacaaaaaaaataaaacaagaaacgtaagattccaacacaagttataaataaataaaaaaagatagcgagagacagcacttcagattttggatcttaccttcacattgctaacaatagactgagcatcagacacctgtggttgcaaagaatactctgataaaagaggtaacaagtatgatacaaatgtagatctttcttgctgtgtagcctggaaaaaaaaacgaaaacaggcatattggcttcgatttaaaattaaccagattttacgtagatatttatatatatcagttgcagtatgtagttatccaaaacatgatgaaagtgaggggccagagacaaatcctagtttgaaactgaagtggaaactgaaatagttcatggtgtccagccaattatggttaccacaagaaaagggaatgaggtattaaagcatatgccagaagacagacaactattg

SEQ ID NO: 29555 - DNA, 1209 bp, Arabidopsis thaliana landsberg
gcgaatcaattaataaagagtaaaaaaatccaaataaaacgaaaatttacccgaatcaacgatgattgtgatgaacaaatcggttttccataatctgcgaacatttttaagaaaaagttatcccgaagatattgaagttactttattgacaaaataagctacaatccgaaacttgcaattacatgaaggatgtgaagagatgctccgagcagaagcgacatccatggcggaatctggagcaaaaacatgcgtgggatttgctcatgtaatttgtgtcatcttcaggcttatctctcaggggttccctgctctactgttttcactttctaaacatcaactgtgtgtcgttttactttgaaaaagcggcggattgcattttctagtttgtgacgtagattgcatgccgtttttgtaagtgaagccagcaaactattgtacattgcctttgaagtcgttgaacaatggcccattggaactaatggtcttttagtgacccattatcaaacttaagcatttttatacgttgaattaaattaatcactaaatccattttttcctttcatcgcaaaatccattcaccactgttttcttctacattgaactaatttcatcaatatataccaacttttaaattttgaaaacaaaaacaaaattctctgaattaattcagactttgaacgtacaattcttagaatttaatctcctatacggctgttagcgtaaatgtgtagtatagttttcttcagaaacgttgccatgatataagtgaaacgggtaatttaattatcataattattaattagtaacgatagattacttaaaagtcaaagatgtactatatgtgtaagtaatggaattagattagcacattatccacttggcctcgtcttatttattaccacgcacaatggcgttaccaacaaaatcaagaacaatcttagaatatcaatcagtacatgcaaggcagatttcaaaatgtagtttccataacgtagcatatatattctcttttattttagagatagaagaatctcttggacaccatatatagttttgttttttaattaccactttcacaatggtcattttggtaaataaatatatttagtttctacaaatgaatcctattaccattaagatagagtcgactgaatctctttgtattaattattgagtcaacatatctcatagaaaaaatgaaaattgtta

SEQ ID NO: 29556 - DNA, 2648 bp, Arabidopsis thaliana landsberg
  unsure (1)..(2648): unsure at all n locations
acctgagtaggaggaccagatcgttggtctatcgtctctttagtagttcttgggtgttggactgttatgtcacttgcagttgactctggcacaacactgatgtccattgatgaaacggatgcctaatgacagagacaaagacagtttcaatcttccgaggttataggagcaacgaatcaatgtatagcgaagcatacttgtgatgacacagcatgcatactgattattgtgaactaaagagctggcaagtgtataaaaagcttacgctatggtttaggtcctttaaggagttgttgttgtagtgagctcctgaggagaatccatagttgatacccaactgaaagttttgttggctttgttgcaggtgacttgttgattcttcaacttgaagcggcacaactccatctcctccaaagctcctctggtagtgagtgtactgattatcttcgaattggttgtccatgctggagctgtaatccacaagatcaaggtactcaacaccaaacaagaacccattattctgattaccgatgtttttccctggattagggagtaaccacgaagcaacctctcgatcatcctcatcgttatcagcatcagtctcacttggggccatggagctgcaagagtttgcagataatggaagaatcggaactcgctgatgacgtctagctagtgggtttgcggaatgaatctctgcatcacaagctgtacaaagagacgcagcgtctgctttacacaaaaacgcagctggggcagactcacatgactgacagacacgaacacgttcatggcgagaagcaacacggttggctgcgtgaactcgagcatcacaggtggtgcacaagtaggcagagtcggcttcacagtagacagtgcaggcggctgaacgacaagtgtcacatgctcgtgcccaagtaccactctcattactctcttctttcaacatttttataactaaagaagaaggtatgtgttttttaagcaatgattgttggcaaaaggagagattgtaattagaaaggagggaaggctaatgagactatatctaggtggtgagaggggaaagatagaatctttggagatatacacgtggcgcagagttagtggttgttaaaagtagttggatcatcttgtggctgtctgagttttgaacaaggtcatgaatcatcaaaaaagtttttttctcataaccttcacaaaggagaacaaatctagaccaagtaaatcttctgtaagtgaaaacatctcttcctattgtagctttctctgtaggacccgtgagctgacgtggataagattctcagagattgctatttacttttactgttttggtttttttttgaatcttttggtattttagttttttgcttttaagcaaagatggaaacttttcttattggaacatacatggtaagtaatcaggtagtgaccaaagattatacaaagtaatacataaaagtgaaactcattttggtttaaatgttgttttgcaggtggatgagaagaaaaagctgacatggcaaagtggtgaatctagagtgaccaatgagaatgtgacaaataagcctttagtgaagagattaggatgctcatgagccacaagttataatgttatatgttagcttatatcaacatcacttccagttaccaagaaataaatcttttttttttttgtgaagtgtggagtaatgttgataagttgagtttttcagttgttcnnnnnnnnnnnnnnnnnnnaattgtaatttaattttttgggaaattatgagatcatgaaatgaatatttactccctttgttttggttttttacttatatcaacaaatattatatatataatatatctaaatcaactataactcatttcttgtttcaatttgatagtcaatcatgcataaatcatcattttacaacaacaacaacaacaaaaaaaaaaaacttggatgggctgtactctgtagtaacaagaagatattttggtaacttatggactggactgtatattcatagtttgtacaatgcaaaagcccattgggcttgaaagggtttctttgtttcaggactgttccgttcgattttgagtttgacataaatccgaaatttcaaaattccattattttgaatcaaagcaaagcttccccgagacgcacgatggttccgccattgctgaagctcgacttcacccagggtccaagagctggcgattctctagggtttaaacccggatccactatccgaattggtcgaatcgtccgtggtaatgaaatcgccatcaaagacgccggaatctccaccaagcacctccggatcgtttccgattccgagaactggataatccacgatcttggttcttccaacggcaccatattgaactctgacactatcgactcagatacgcccgtcaatcttagccatggagacgaaattaagcttggtgagtacacttccattttggtgaactttgggagtgatgttgttcaggcgccgcaggagcataagcttccgcccaggccaaggaggaacaacaagcggcttgctgcttcggatccggatccggatcctattgagtcggttcaggagaaaccaaagcgcacgcgtggatcgtcgaagcaagaggaaaatgaactgcccaagagtactagggct

SEQ ID NO: 29557 - DNA, 2662 bp, Arabidopsis thaliana landsberg
gttttttttattgttcactctattaagactattaaaatgttaatgtaaccgactaattaatgaagcctaataagtaataagtgtggcgtctgattttgcagaactgaaattgaatgatcatagaatggctgatgtggcattaaaaattatttatttattattgaaaaatttgaagctaatgtggcaacttaagagcaactatgaaaatgctgatgcggacacatgaacaagcctcaatgagcttcttttattagtagtaaattttaattacctaaatcagccaaaaacatctatatgcagatcatatattttatatatcaccactcggcacatatatatgaacaaataagattaacgctaatagcacacaaaaatttgttttcaaaaatagcacctatttgaaaagtttcataaatatcatccaaaaaattaattaaatattaaatattaataatctaatataattaatattaataaagaaaagtatatatttcccgccaaaatattatccgtcaattttttcgcaaaaaaaagatttttatcaacaaattttggccaaaataaatccgtcaaattttattttattttattaattagtcgagcagatgggcggatctattttagttcaaagataaaaaatcaattacaaaaagtaccacttggattaaaattttgtttgtaaaacaacaccactgagatattttatttggttctcttcagaatcatttcagctttatttggcgcctttagaataaccttttcttaaaatcatccgaagaaaataattatcctaaaaaaaaattaaataattttggaatgaaataaaaattaaattatcatcaaccagtccgactcagtggtgccgatcatggccgatgatgagtcaagaaccatcctgttggagaagaacgaagactgccctggctgtatcattgatcgaaccaagcaacagcaacgaggcgttccttacttgcacctctccttcatctggctcgtgtcactctgcactggttaataagattttttctccttttgcgcttttgttgtgtgtttcttatactaatgtttcaaagcttttgccaaatttcagctcttccaatatcttcactgtttccatatatttatttcatggtaagctaagttgttgttgcttctaactccattgaattagcttggtttgagttcagagaatgaccaatatgtattgtggcagatcagagacttccatatagcaaaacaagaagaagatattggtttctatgctggttttgttggtaagttttggctctttgtggttgcttgaaaactaatcttggaagattcttgatgttgataacttttgttaggatcatcattcatgattggaagagctttgacatctattttctgggggaaattagctgatcgttatggtcgcaaacctattattctcattgggacattctcagtgttagcttttttactttgttcatcagagtaaagatgtattgatttttcttgtctacagattttttatcagtaggttttttgactcttttcaggatcatattcaataccctctttggtctaagcacaagtttctggcttgcaatttccgttagatttcttcttggctgcttcaattgtctacttggagttataagagtatgtcttagttttgtgaaagaatataccactatatatctttctatattaagtgactgctctagatttgagcaaatgatcaggttttgttttctactttgccatgtttcaggcatatgcttcagaagtcgttagcgaagagtataacgctcttagtctttctgttgtgaggcttttgtctactctttattttatttcgtcattattgccaatgtttacttcgtctttaggaagaatagttttgttgcattaatgtttcaggtgagtacatcaagaggtataggattgatactaggtcctgctattggaggttatcttgctcaggtactcttgattctaaaaatctgagctagtagcttttatacctttcctgctaggcttgacttggcttctgtttcatgttctgttagcctgcagaaaagtacccaaatatattttcccagagttcagtttttgggaggtagtttattaaactattactatttggctccatccattttcaaatgctagcaaaaattgtttcctcaataggtgctttggtgttgtgcattacaggtttccatattttctgccgagcttagttatatccgtctatgctactgcggttctcatcgcttgctggtggcttcctgtgagtatgttaacataaaatagtgtacttgtacacaaaaaccataatcatattttttcatcaacaagttttactatatggtaatatttctttgcaatacttatgatcataaatgagttcttaagaattccagagctattgtgtgtatgacttgatcatattaagatttgaatgaagctaagactgcaaatattaactcacaaatataagcttataatctatataaatatatacaggaaactcttcatacacgttgtagaattgcacaagggagacttaatccaacagagctaaacgatgatgaaagtagaggaggaggacttgatgaacagaaaataattaataagccaagtcaaatgaggaatcgtccattgatggctatcatca

SEQ ID NO: 29558 - DNA, 2003 bp, Arabidopsis thaliana landsberg
actgcatcgccatggatttcttactcccatggcccatatttcaggcagcagattcttatcttgagaaaacggattgtcctttggtatagaatagtttccccatagctgaaactcattcatcgcttttgcatctgaaagaagaaccaaaatcaaatctcatgttcattgtaaagtatgcttcagctgtatagaaaaaacatattaccaagaacattattaacatcaagtctcatgatcttcccaagcaatgatttcttgttctgtgcaaagttgtatgggtctcctttacttcctccatctcccatcatgaaatacaagtacccatctttaggtccgaacaagatctgtccaccgtgatgcgatgaaaaaggaagacccattgtaaagattcttcttacctccaccggtctaacatacgtccctgaaacatatcaataatgtctcagcaacatccactacaaaagaaaaatacatacaaaggtgagattgtttaaaataccattggtaaagaattctgatatgacactatggtattgacatggagttgctccattatcagaatctagctttgcagggtcacagtcaatatctgagttgcacgcgcattttccagaacattcgggccacttaactctatcgcagttgaaagaagcaaagaatcttccgtttttcaagaagtcaggatggaaagctattcccaggagaccaagctcagcatcaaagtgcacttcttcagtaagatcaagaaacgggttagtttcatctattttcaaaagttctcctgatccttgagctggaactgtcaccaagtatatcttcccgggttgatcagacagaaagacacgattagaaccatcaggatgaggtaccatgttaagataagacccatttccaatcttctcgatgcatatgcctgaaggagatgatggaccagttacttttgaaacgttaaatgaaacttcctgaccattgaagcacacagaggattcatctgaagctccaccaaaaatcttgcagaagtcattacttgatttccatatttcagatattgtggaagtgatgttgcctccatctccagcttgagatgcaaacggagtgttggttacagagagactctggcattcattccaaaatgtggcacagaaatcaatgtcggctagcgattgtgttgatttactagaagaaactgtggagttgcagagcacaggaacttgtctagattctgactcaacgcggaaaagctctgctgcgaaaggatcacacttctgcaaccacagaagggaatcatcaactgattgctagaaaggttctaaaatatcacgaacaaaaccacagcatccaagtaatctaatcacattatgtttttgatatgtttttgccttaccgagcaaagtaatgatttgagaagtggagaacatctgccagatacattgaatgctttaaactgtctctgcaacttcaagtcttccagggagttacagcatacacttccattgaattgacaaaaacctagcggttgcttcagattaaacggtgcagctgaccaaacaattccaaaaatcagaaaagaaacaacacaaacacacagagtcatctatctaaaccttaagagaaaagaaaaagagccacctactcaaatcattacataaaggatgtgacaaggattttttggcaagaaacaacagaagaaaagaaagaaacatggctatagaacagagagaacccattcttctttcaacaacaaagaatcagttgttttgagtctagcatctaccgatgaaaacaatctggaaaaaaaaaagatagctcatagagatttctgtttacagattccacaggaatggaactcttaccaagaaatcaaagggaagaccaaagccccagacaagaactgataagaacttttaaataaatggagactttttaagcagacaactagcagaatcttctaataaatctaatatgcaaaatggtttaaagcccaataaaataattcagaatga

SEQ ID NO: 29559 - DNA, 1752 bp, Arabidopsis thaliana landsberg
cttacttctgtcgatacaagactctaagtgtcgcggtcatcgcatgttttcttgtaacgatccttcctcttttttaatattttctttctctacaacattcggtttaaagtcaaacaaatctgatcagtaaattcggtttgatagggatcatttgtgatactattgactgcagcagtgccacaactgcatccagctgcatgtggaacagcggcggatagcatatgtaacgggccaagtggaggccagatagcgtttctactgatgggtctcgggttccttgtagtgggagcgggcggtattagaccgtgtaacttagcttttggggccgatcagtttaacccgaaaagcgaatcagggaaaagagggattgacagtttctttaattggtatttctttaccttcactttcgcgcagatcctgtcgctgactctagtcgtctacgttcagtctaatgtcagttggacgatcggtctaaccatccctgccgttctaatgtttttggcctgcttgattttctttgcgggcgataagttgtatgtgaagatcaaagcctcgggtagtccattggccggtatagctcaagttatagcggttgcgatcaagaaacgcggattaaagcccgcgaaacagccttggcttaacctttacaattactacccaccaaaatacgcaaactccaagctcaaatacacagaccaattcaggtaaaaaaaacacaccccatgaatagtattttcactttctttatatgttactgaaaaaaactttcctatttggcagatttcttgataaagccgctatcttgactcctgaagacaagttgcagccagatggtaagcctgctgatccttggaagctctgtacaatgcaacaagttgaagaagtgaagtgcatcgggagagtgcttcctatatggtttgcatcatcaatttactacttaaccataactcaacaaatgacttatcccgtcttccaagcccttcagagcgaccgtcgcttaggctcaggaggttttgtgattcccgcagccacctacgtggttttcttgatgacgggaatgacagttttcatcgtagtctacgaccgtgtacttgtgccaaccatgagaagaattactggtctagacaccgggataacgctcttgcagagaattggaactggcattttcttcgctaccgcgagtttagtagtcgcgggatttgtcgaggaacgaaggagaacattcgctctgactaaaccgacactcgggatggcgcctcggacaggagaaatctcatcaatgtcagcgttgtggctgattccgcagcttacacttgcaggcatagcagaagcttttgctgccattggacaaatggagttttactacaagcagtttcctgaaaacatgaagagcttcgcgggttctatcttttatgtcggtgcaggtgtttcgagctacctcgctagcttcttgatatcaactgttcatcgaacaactgcgcattcaccttcagggaattggttagctgaggatctgaacaaagcgaaattggattacttctacttcatgctcacaggactcatggttgttaacatggcttacttcttgttgatggctagatggtatagatacaaaggaggtaatgatgaagacatcactgagattgagaccaatgaagaagaaaccaagcaacagcagctacaagacaagaactctgtctgatctggaaacttatatatttttggtattctacttcgaacttcggagttttt

SEQ ID NO: 29560 - DNA, 2726 bp, Arabidopsis thaliana landsberg
cgaacctgagaaatagcactgccaatcgcgatgaggtttgttgtaggaaccttcttgaaactagagcatgcctccaaaactgctcctgaaagctacgaaatagacggcttttcccccttttcatatgatccatctggttaacagatacaaacaaaacaccggcaacatcatccacagttaaagcactcacgagaagtgtatgttgaaagcaaatgaaacagtggctacactatcctttgacaagacgagttcaatagatgttacattgagatagttgaaaagtataaaacttttcattattaccgtaaagagatacagaaccctgaaacaatctgaagctggagtcaacgatttgcttaacagaaccgtgtacgattgaagacaaagtaggaccagcaccaagagtgcttccatgacaacagagcaaaaaccctagaagagccttgaagtaagactccattgtctccttaactgattcagcttttggagtttctccagtccatagcgttttcactatcataattaagtagtaaccaaattgagaggaagaaatcacaaaaaaaaaagaaccgagaaattaacaaatattaacagagaaccctaaaacctctggtggcttgtttagagaggtaatcagaaatgccaagaacattgttccagttaactttttcctttgtaggagacgatgttggatcgaacaactgcaaaaagtttagcatgatctttgtctaattacaattctaattcatttccaaaaaacatgaaacaaacatggtaagaaagaagaatacttggagagtatcgtcactggtgctaggatgagtaatcagagatttatttagaacctttttctttgatttccccatttttgtcttccgttgaaacccttgacgcctctgccaagctaagggtttttgcttagctgataggtcgtcgtttgtcacttaggggacttagtgttatttattgaaatgcccttgaagaattaagttggaaaaaaaaaaagttctctgtttaagtattaatccccatattagcaaacaaagaaagattcaagaccgagagaagaagggagaaagaaatcagagaagaagaagaagacttattgagaaggcttttggctaaagaagaaaagggcaaatacattttgggccagattcactattagcccattagtggtaatggttttgtataattgaggttaaacaaaaccattggttaaacattgtaagatgtataattaaggttatcaagaaagtttcagagataaggtggctaatcctagtactaattcaacccaggtttgtgaaaaaaggagggtttttgatagttttatgagaattcagttctaatagtttgttatatggttttgttaataaaatatgtaatgattcagcatgttctgttctgatggtctttgtgagctaagctttaggctaatgtggttgaacacagcttttcggtctgatcaaagttttgacaaagatggtcctactgaggaggaccggctcaaaaagttaacccagatcagttttttcacaaccttttttaataaatcagttactgctccaccggttccgctggtcggtacaacatccctagctagcttgacagcaatttaacatacttaaaacatattaattcttttcagttggtgaaagtgacaacaagaccgaccaagttagtttaacaaagaaacgctcatgaaagcagcatctaacagagtcatcataagtaaaagagatcaggagataaccaaattgcaagagaaatatagcagtttttcaagtacagttggtagaacaattgtctcaatttcgatccaaaagaaagacttttgatcaattaaggtaaaaccaatatggaaattttaagcaatagttatgctgatcaaaatgtacaattatgaaaaccaagaatctggattgaaaaattagaacttttataattcaaacatgtacaagagaagttaaaaagcaaagagcaagatgatcaaatttacaaaagatgatgataaacaaaagtaaccttgcaaagttagttataaacaagaaaatcaaacaacttcttcagaagcaccaccactagcatcagaatcttgctttttcaccaccgcagaatcaacatcaggacggccaaaattagtcggcgcatcaggtccaatcaactgaatcgcagcgttatcataagcaagagcagcttcttcagctgtttcaaaagtcccaagccaaattcgttcaggtcttcctttaactctaccacatctaatctcagccgcccacttcccccatggtctctgcctcacgccacggaacttcttcttattcgccgtcgtattcctcgcagcaagtaaactcgccggaatcctgattttgaaccgagtttttccgacctccgggggatcagaatgatcgattacgatttccttgactagcttcttacctcgacggcgtgatgacggtggtgactcgtcttcgctgcttgaagaatcggttgcttccatgtctgtgaatgaaattcgaacaattcgtttcatctttcgccgggaaatttgacgacggagagggttggtggttagggtttgtgtccgcttcttttaaaagaaagatttgtttggtttatgattcgatcaggagaaggctttggcttgtgcgttacttaatccaaaattaaccgacttactgtttctcttatcttttagaatccgtgtgtaattatgagtattg

SEQ ID NO: 29561 - DNA, 2653 bp, Arabidopsis thaliana landsberg
  unsure (1)..(2653): unsure at all n locations
tatccggacttttatgctcatgtttccttccgaattttgtttagatggtgtctcaggtgcatcaaacgtaaggccatgcggaaaagataatacttgatgagatgcatgcatctctactttgtcagacagtatccccacatctatgctcatgattttgttctgatccatctgaatactagtttctacaagtagttgtgccgccccaaatagagagcaagacctgacagtgtcaaccccagatattgcaagaatcccattgagcttttcaatcttatagctcagtttgacatctctcccaagaatagagagttcgccacttctactacacgctgttacagaaagatatttacagtaattccctttaaaacaatttgtgtgctcttcctcagatatctcatgaacatcagttgccatgaaccctggaaattctgtatggcttgtgcaaagaggaatatggattttgacaccaatattctctgatcttgcggcaaatgacattacctcactagagttctctgatacctcagtttgcagaacattcaaaacccgatcagtattgtcacaaatagtccttaccactccaatagattcatccatatccaattttgaaccttttgagaaaaaagggtcttcactactgtcttncagtttctgggaataagatttcagaagttcaataacttcaatccaatcaaaaaagtgtaaccagatgtctagggatggaagagaaaaacagagatcgtattcattttcagcctgctccgtaaatctgactctcagtgcaaaaggatccccatctgcatcgatgcatctagctaacatgactgagctcagtaatgaataaagccccattttgaaaaactgaacatccaagctcatagggaaattatttttaagttctccagagcaaacaaatttcatatcagcttggagcactggttcggatagcagtgttccaggagctttccttaaccgatgcagttttgacgtcaaaagattgacaaacattctgaattttataaagcttgtggaaggttccaggggtgcaactgacaactcttgctttaggcgcatcttcgtatgaagaaactgaggaacatcagacacgaaaagttttgattcctcatcgactaaagaaagctgatcaaccacatcaagaaatgccttaaacccatccaaggcatctgaatctacaaagaaaaagaaaaaagataacacatgtaagcattacttgaaatacatgatcactatagaaaaacaaagagcgctgaggagcagaaattaacattgagggaaacaccacctaccatcgacaacaatttcacaaacgtcaacccttgacataacacatgccaattccgttaacggattgtgatcacaagggaatctaatccaagtatcagcaataatgctagcagccagagtgatacttctgcacacagcgttcttcttgaatgttgatatgtcactctcagaaagcagtaatgatactgataagtcccgcccaaatatgtttaaacagtcggctcgccctggtacttgattaagtgggataacacattcctgtggtatgtgctgcaccacattgctcaacgcacactctggaataaagctaatatataactgctgaatgtcaactttcagttgccggcggtcatcaccttccacaggaagaacaatagaggagtccagtatctcaattttataactaatggcaaactcagaatgagccttggtcaactcagtagcttgtggcaatgactgcaggccagactttgaagtccagtcagaaagagagaaatagccaattataatggctagatattccggcggtaaaatgcagcatgtgtgttgaatacctatgctcacttcaagttgagaaccagaaggctccaaacccctcttccttacacgtaggttcaagacctgtgagacatctgttgatgattgtttccaaagaaacccgccagaatagttggtgaacaaagatgacaccagcatcaagtcttcagcagaggcaaccaaatcgagaagatcatctgaaatggtaagaaagtatctggatactggcagtataatagttccaaaaacacttgaagaatcatgaaaatgtacattggtgttgaagacatgcatatcaactgtaaagtgattggtctgaccaagatccctggaggacgcaagcccattcagagggcaatcacgtttaggttgaaaagtacagctgttacattcgcagttcaaacctatttgtgccccatcctttctattctttaatataaataacttcctccagtcagaagtcgaataacacagagaactttctaggctatgaagagaacccgaattgttaatggttacaaatggaaatttgtcaagaggaacgcagccacaagatctactttcagtgaagtttgagaatccaaacctttcaaaatcaaactgaggtatttttgttggagcaatggtatctgtagcaaggctagatggatttgtatagatagacgagatcttataggaagatatattataaaaataaattgtaagcaaacaaaatatgtatgggtagaaatggagataggagatctttaaatagaatgtatggttgtgggggtaaaagattttaaattttctatgctctgcnatttaagtt

SEQ ID NO: 29562 - DNA, 2102 bp, Arabidopsis thaliana landsberg
  unsure (1)..(2102): unsure at all n locations
ggcatgctatttctctggatttggaaactgccgcccttaagatgtcagcagatttgaacagaactgagattccttcatctgtaagcagcaaggctctgttatacgagagcttaaaaccaagcatctgtaagattacaaaagtccactcgactttgtcctgcaatgggaaaagggtgggtttcatatgctttcgcaaatctaatgagtccaccctctactcattctccttttcaagcattcttggttaagagctccaacctggaaggtttcactctgactgaagatgaggctgaatccgtggagtctgtggttatgcttcttcagaaggatgatttcaaggatctgaaaacgctgggcaagatggaaactatcatacaattactgcagaccattccgaaccaagagcattgcagcagcaagtggtgcaataggagagtagcaatacaatgtgtagatttctctaagcagactatcattaggtttggttccatgaggagtacgtagaacatataaaatcagcactcttgacatttcaaagtcattccttggctgctggtctgagggatgtgtggcgtttattggatagtaatgctgtgtctttggcttctcaacaaaagaagtcatcagtatctttaaaggcagtttctcctagtttgtattggttatcatcctgtaacatnnnnnnnnnnnnnnnnnnnnnnnnnnnntcacgatatggaattttaagcgtatagtaatattggatcttatgaaggaggagccgaaacagctcctgcaccagggactttggtgtgttagaaaaaggttcacaacaaagttcctgagatagtactactatcttggctaacccagacaatggaagccgcattatggttgacaggtattgaagtcacatcatatttagagcaaattgtgaagctgttcttggtgttctaaggaaaccatggacatactcttcatgttgatggaagttctttttgtttatgacccaagggaatttccatgatgttgctgccattgttagctcgagtttgttttcatcaagagtgaaagaaatccgtattaggttgcaggtaaacattcataacactaaagcagacataatagagcataattgtggttgcaggtaattctcgttgcttatattttgtaactatgttcgtcaatcaattatgtgccacttactataacaaagtaagcttgatttactggcatatgatgaaatccagctccaacacgaaccatactggtttacttcattcttttcaggaacatcatgatctcttactggctatgttaccagctgttgtttttgttgctgaagttcgactgagtgtagttccggaggcaacacaagcacatcgcaacagtagttacacagaagtttcctttctagagttagcaacctcagtaaaagcctctcctctactcggacggcacttgctttgcaaagaacattacttctgatctaccagacaataagccagctatacaagtcttggagttggctgcgcatacactgtctacggatatcatgtcctttgccaaaacactggcggcaaacgttttgcagaagatgtaaaaaaggtggatggagagtatgcagagctggctgtctcaaatggaacgaggcttgaatcaaagaccaagggtggtttgatgaattttatgcagtctccaggacttgtagaaagcaccaatgctgggtttttcctgatagatacgaggcaaccaaaggagtgaatgtcctggactctagaaaggaaacatggaaggaatacacatggatgaattcactctatgatcaaatgtatattatagattttgaaagcttcaatggcaaggacccataggcggtggttctcacctctttctgttctcaatttttcttacaaatgactaaaagtaatggctaattgcctaagatgtatcaacaggttacttttgaaatgtaatggctaacatcatttcttaaaaagcttctcctgcaatttgatccattgttcgttgatcttgaccttacgcagcctctggttccttgctttagcttctttaacttcctcggtcctgccctcaactcgatctgattttctttcacatct

SEQ ID NO: 29563 - DNA, 1400 bp, Arabidopsis thaliana landsberg
tgcttcttgggccttacgtggaattactgacaacttccattactactgcatcatatgcgtcatagagttccacaggagatgtcttcagattccaagtaagatgattcacccttatcatcctcaacaccctctcactttcacctttgtaagctatgaaaccaaaatcatagtggacgtcaactacgatgacttctgtacctttctatgtcgttctggattgaacatgcctgaatacctccaaactattggctccaaatcaaatatcatattcgataaatgcactttgtgtgggaatgttctcagcgaatggttctaccgttgttccatatgtaacttctttttggatttccgttgtgctagaaattttccacctcttacaattcaaaatccaagaagccatcaccattcactcgccttgttccgtcgaccagtctcatttccttgtgatgcttgtgggttgatcaacttgttagacccaagttatgcttgtcaccaatgtgattacatggttcacaagagttgtgttgatttaccacgcgtcataaagatcacacgtacgtcaccctcatcgactttcgcacactcctcacctaccaaccaaagtttcgttatgccgggtttgctacaagcatgttgacatcaagtatggtcaatattcttgcacacatgagggttgcacttatgtagtccattcaaaatgtgcaacacatagaaaaatatggaacgggggagaactcgaatgggcacctgaagaacccgatgaaactgaagctattgcgccattcaaaaaagtaggtgataatatgaccaagtatttttgtcatgaacatccccttaagcttaagaagtataatagtgtcctataagcaaagcagcaatgtcaagcgtgcatccttcgtatcgactcttatgattcatacaactgtgtgcaatgtgacttctttcttcacgaggtatgtgctggtcttcctcgaaaattggctcatgcattgcataagcatcctcttgttctagacccttctcctatactcgattacagttccacaagttgttcaacttgcgcccgtgagtccactggtttcaggtacaaatgttcaaaaactgattgcgatgatgagataacaattcagatagattttcgatgcattttagttcctgattgtttcacccacaaaagtcatgaacatcatattctagaaaaggaaacatttcttgcgatggttgcaaagatagtgttcgtgatgagtattatatgcaatgtactatttgctcctttgctatgtgttatcgatgtgctaccattccatatgagttgtattacaaatctcatgcccctcttctctcgctttgctatggaaaagatgaagagaatgcatattggtgtgaagtatgcgagaaag

SEQ ID NO: 29564 - DNA, 2073 bp, Arabidopsis thaliana landsberg
  unsure (1)..(2073): unsure at all n locations
acgaaagcagagaaccagagaaggagaagaagaagatgaaaaaacaacagcgaaccctagagagaagatatagcgacgaggccttatttttttaatttttatgattgatgatgcagagatcattgcttttccaaattatctaaaaactattattaaaacaaaaaaaaactgataaatctccaaaaataaaaaaaatcatgtaataaaaatattaagagaaaagttgaataaactatgcatatccaactaataatctgaaaattaaaactatttttgtcaaactataatttgctttagtaagtttaattatttatttgtcgttcattatagttaacttacccaacccatgacttgtcacgtgcggactcgtgtgtgtttgtgtgtaaatcgacaggtagccgttagggttgggtctggggttaaccttacaagcgcgctagaatctggccatggcgaagattcgagtctttcgtggtctatttcccgctcacgctcccgctccagttcaagatcatcgtcgtcctcttcttattcttctccaatttgattaattagagattggatttggtaatttggttatcttatacgaagtggactcattacaattacacatttaaattgtcaaatcaatgctcgaatgttgttacatcgcttaaatccaatttcagtgatgttccttttttccttttgtgcaggcgattttggtgaaatcattcatgttcaacttgcgatagatcgagctgtaagtttcttatcaattgctcttggctggtttgcagatttgtttcctaagtactttactcataatttcgattgacattaacaggctaatctttcaagaggagatgcatatgttgaattcaaggcaaaaatagctgatgctgagaaaccacagctgtacatggatggtgtatgtttcaagtgatccaaagggagatgctttaaaatctgataatgttggtgctgacattgaaaaatatgataatcacctctgcctatgagtggtggatcacccatacgcaggccagtgtcctcttctagcggccgttctcctccaaaacggtttcagtttcctcgtctgaggttcaataccatttcagttcactgtctcaccttttatctgtcagctggagggttaccctcgaaggatccgtggcagtcctgctctaagacgttctcctctaaggtgacgataaatttgtgtttaaagagctgcattgtagtaattagaggatgagatcaatttatttatagtgtatgcaactcaatgcattagtgtttcaattttatagatgttctgcctacattgtattagttttcatttgatggattatttcttgaatgcacacatgcaggtcccttccaagaagaaggtatccgatccgcagaccgcagacgtggccgataaccaatttgtaggcaatagcatgctcgttcgcgttcaaggtcgatatcaccccgcaggtaatggttaaacctttgtatatttgtcagtgttagatttgattatctgttgtgattgcacagctactacggtacatattagactcctagttcataagtatgatccaagatcctgctttgtgtgattttgatttagaaacgtatggtctaccagctccaataaactttagtcaactatgacttaatggcctttggtatcgaattgccaagatctagtatgtaaattctgctattgtagctccttaccgagtagtgtttgtccattgtaatcatactcagttatagttaaaacttaaaactgtaatctcctctttggttctgaacaggggaagatgtttaactggcagcgtagaaggtcatcttcctactctagttccccaaggccccataagttatggcttgttgcagaccccttttcagctaaagaaataaagagatgcccttgttgtgttatgtgttgacgttctagctagtgtcaactaataggctcctaggaagatatcaaggagccacagttcanaccagtaagactgttctacaatcactatacttctcatagtgttttatggtcaagctattttactgtgtgaacacatggggatctaaaaa

SEQ ID NO: 29565 - DNA, 2470 bp, Arabidopsis thaliana landsberg
taggggatgagccatagatgatgccttcgccgaatccaagcaaagacaaaggaaagacactactttattcactagaagatttgccgagaatgacttgtgtatacctacgtggaggaaaacttcgatgccatctagtggctggattgactacaatacccgatttataaagattgtagaagcatatcaaaaccatcacaactactaggacaaacaaaatcaaatatcttctcccgaggagtaggggtcttaaccgaaatttcctttttttttattaactaattttcaccaattttttattttttttaactacaattcttcaaaaaatcaatcaaaaaactaatgaaataataaaaggattgctttaaatcttaacccaaacagctacactcggaattccacggtgaaccacgaacatcatataatacccaggtggtgccacgtaggagttagtaggcccgtccacgtcagctttataagcgaaaacagataactgactcacgcgcctgacgcgcaaaaccaacaacctctggttcatcgccgttgagtgagtgctgaacgacggcgccacgagcctcaccgatacccctccgtcgaacattccgaatgccggaatcgcgaacgttacggcaaaagcctgaccgtacaacatattcccggcgagctccaccgtgatgatcgtcggtctcacacgtgcgtactgtggatccaggtaacgcgggagataagcctcgaggctgagctccgttgggtacggcctcgccgtgaaattgtaatttcgatgaggattgcttcctccgactaagactctgccgtctgacagaagaagagacgccgaatggtacattctagggattcgagtcggggtgagaatttcgaatctccgggtctggtcaggctcctcgggtaagtataaaatcgggttgagaacagcgttcgtcgcgtcttcccaaccagcggttccgttagcagcaccgttaatgatcaaaacgtcaccgtttggtaacagtaacatatcagacatgacacgtggcgatggcatttgctccatgacccatttcggatccgggtcggtcactttcaatctcccacacgtgcgtgatcccgcgacgaagattttaggaatcgtcctcgccgctttgaagaacgctcccggcggagcaccgccgcataccataacctcagcagttatcttcgttctgttaatgtctccggtgagaaagagagggaggagcacggaggagccagtgctgggataattccgtttatcgccgccgggaatctgtggaaactccttgatgattcggtgattgacgaaatcgaacaaaatcgatctccgattggcgaagatgaagagattaccgtcggggagaagatgaagaaacggataaagattgttttcttcattcggatctctcgtctccgccaagaatctgagattgaaaacggattctcccggatccttggggtaaaactcgtagttgaaagctcttcttccgccgacgatgataatccgaccatcgggaagaatctgattggtggaataccaccggcgagaggagagatacgctctgttctcaatccaatcacacgaaacgcttccaactcctccgtcgcaaggtgtgaaaacccgtacagttctttcgccgttgccataaccgccggtttggattaaagaaccggaagcgtttaaagaaccggaagagcaccacgtgtcgtaacgtagtgtaagtgggcgaaaggtatttgaagcgacgtcgtatagtattgaatgagcagagcagtcaaaaacggtggcgttttggcaggtttgagaagggagagaaacattcgaaggtccataatccgtacggtcaaagatgacgactttgttgttgtgtagaagctgcatgtgcattgcggatatacctacactcggctgcagaagatcccacctcccgccggtgagaatagctaacggtgaacgtggaaggagcaaatccgacgtggaacagaggaagaagaagaagaatgatatcacgacggcgttaaggttgttcttgaatctttcttgcgtcattattttcagctaagaatcttctttctccggtgaaagagatttaacatttaaagcttctttgagtaattattagtgtctttcttgaaatcggtaggagaagaaacatttatggtgttgtattgttttacttttctggtgaaatgtgtgatcaagactcgcagtgctctctgtacataatgatctggtagatttgtaacatatggtcaagatttatttattgcattttgcaatttgcatataagttggtgaattttagatctgtattattgatcacggaccatattcttagagataacatttttgattttatatcagtttgcgtatgaactgtttcagtctttcacagatcaggagtccaaaataaaaatggttcattctttttttttatagtcatgtcttcaaattcttttgggg

SEQ ID NO: 29566 - DNA, 1592 bp, Arabidopsis thaliana landsberg
tcaagcattgttgttgttgtcaccaggatcgaaaattttcaatgttgttgtttgagagagatgatggctgcgaagcttcagaaatggcgaaatctggcaggtcgtctagatctgatgaatcggagcggcgctgtgtcgacgaggctgttcctgcacgaaggtccagataccgtggaggagcttctcgaaagacatctagcgaagaaagagaaaccaataatcgatcacgatgaggctgagtttctgaatagacggcgtctgacgagcacgcgccgggaagcgttgagtttgtacagagacatattacgagcgactcggttcttcacgtggattgattccaggggaaatttatggagggacgtgttgagagagaacgcgaggaaggagtttgaagcggcgcgatttgagacggatccggaggttatcacaaggcttctgataggtggaagcgacgccgtttcgtctgctttagataagcttgcggagaagcaaagagagatgattgagaaacaacgccgtggtgatcaacgctgatttgacggatcatagggcatgaatgtttcaacagaatgattcatcgagtttaaagtggttggtgtttgaaattcttgctgtaaaatggttgccagaagaagaagcgagatcatttagaaacgtgcttacagaattttgggtttgatgtttgagtgttgtaattcacttgcacaacttacacacttcgtttctgaaattatcattcatgtcattgtagagtttgtatacactgccacagagctataaacaaggcttttgattttaaaactggattctgtaacctcttttgtttcgtcaagaatcatcctgagagaagtatgattttggttgcttgaaagagtatgaaagatgagttcccttgtttagatgacatgtctcgtggtctgcacagtcagttgatgtgcaagtcgagagattaatttacctgcaagaaggcaataacaagagtttagatgtttcagtataaccaaaagctttgtaacgaaatcagaattccaatgtatgaggttatttattaagcagagagtgttgggttactttttataatccgcttctacgaagcaagcctactatctcagcaagatctgaaggcggtggacatgaaaactttactatttccccagtgcacggatgtgtaaagctatcaaggaaaacagagtaagaaaggacagttatttggttattcttgatcgaaaatataagaatgagatttaagttctcttacccgagaactatagcatgaaggcaaggtctatccattctggaaataagctctatgatctcttcttgatcgctgcgggagactcttttctgcaaaagagaaagggccatgctttttgttccaccatacacttcgtcacccaatagaggaactcccatatatttagcatgagcacgtatctacttgaaatcaagatggaagagagagacgtttcagagacaacaagttcaaagcagctggatcaaatacatgacttgaggcagaaacataaagggcagctcaagctcttacaaacagaaaaaaccgtttactgttatagatattgagtattccttca

SEQ ID NO: 29567 - DNA, 1100 bp, Arabidopsis thaliana landsberg
cctggaaactccaatctttacttaccttagattgcaggtttgcttgaattatctcaaacaatctgtatcctctccggattctttcgtttccaccaaaaccttcttttcttctgcagcttctggaaccaggaaggtacacatggttgctgaaaacactttatggtcttcttatgttacttcctcaggtaaaaggaaaagaaagaagaatcagacatatttggtttatgacataattactattttgtttttgaaaaattgatagttcctggttttttaatatatgcagcaaagtgcggcgttcaagatacttaggacaagactcaaaactgtgccaacgtactcattcagtactggaaaccaaataggcagagcaacttcaggagttcctttctctcagtataagcatcaaaacgaggacggtgacttagaagacgataacatcaacagttctcaccaaggaatcaattttgctgtgcggctacaacagttcgaaaacgtacagaatctacatcgtggccaggcagggactagagtgaactactcatatcactcttcctcttcttctacatcaaaggtacacataacgctacacatttttgtctgttaacctgcggtataatataacaggatggtgtaacattattgccatttttgcaagatttaccggttttttcccttagcaattggagtgttaagagatatggatagtctcattgtgctttaatttgatgtattaggaggtgaggagatctgaagaacaacaacagcagcagcagcaacaacaacagcaacaacaacaacaacaacgaccaccaccttcttcgacatcatcatcaggtgcagacaacaatagacctgcatcaagaacttcaagaaaaggccctggtcaattacagctttaacctacctggtaatcataaataataaataatattccatccccgacaatcttcatcttctttgtgtggacaccaccgatcccttttgtctcctgtaaaagtggatatctctctttttagtaactcttcaagtttcgacggaacttgtggaaaagctacggtcgtgtccatcaactctttctctctgtcggggttttttta

SEQ ID NO: 29568 - DNA, 3869 bp, Arabidopsis thaliana landsberg
  unsure (1)..(3869): unsure at all n locations
gaaaagttgatgatacttgaattaagtagaacacctaagcatagtatttaaaaggtttccatatagttgaccaaaaaattgaaacttctatttttaatcattaataattctatttagtactgtgcacagccattaacaaataagcgttgaatctagtttttttaatataacatctatatatacatttttgcagctattttatcaaataaattttagagttggacttatttacaactcaatgtcattagcattaaatattttttccaaaataattaattttacattaaatttttaatttaaattgtcaatcacattatcaatcaaatttaatccaaacaaacttcacatcagtcccttaaaattagcataaacttcacattaattatttagacatgaaaatatttatttaaagatttaaatcttctaaatttttgcttttagagttattatatcattacctaaaaggcaaacaatattaattgtttaaaatattattatttgtatatttaaacttcataaaacattattaatatttgaatttataaaaagtttaatctatcaaaaataattaacatcattatataatatatagagtttaaaaaaatctcaaaaaaaaattcgtcatattttgtgattcgaaattttaagaatgaacatatattaaccaattggcgaaaaatatgtgggttcaacgtcccgcaacgactaaaatattttgacgatgattcataaacatattataaataagatcaatattaataaagtaaatattttttttttgtggacgggtttggcaggacgggtttgacaggacgttacttagtaacaatggtaaactataaaataatttacagatttttatatatattaattttaaaaaatgaattgtctccgcggtacaccgcgggttaaaatctagtgttacataattatcaaaggaaattaatgaaacacatgcattatcatcgtatgatttatgttggtgataaataggtggggcagaaaggaggaacgggaccaggacctagaagttcacacggcatagccgcggtcggagacaagctctacagtttcggcggcgagttaacaccaaacaaacacatcgacaaagacctctacgtctttgacttcaacactcaaacttggtcaatcgctcaacccaaaggagacgccccacctgtatcctgcttaggcgtgcgcatggtggccgtggggactaagatctatacttttggaggccgcgatgagaaccgcaacttcgaaaactttcgctcctacgatacggtgacatccgagtggacattcctgacgaagcttgatgaggtgggaggacccgaggctcgtactttccattcgatggcttcggatgaaaaccatgtgtatgtattcggtggggtgagcaaaggcggtactatgaatactcccacgcggttcaggacaatcgaggcgtataacattgctgatgggaaatgggctcagctaccggatccaggagataacttcgagaaaagaggaggagcgggattcgctgtggtacaagggaagatttgggtggtttatgggtttgcgacctcgattgtgcccggaggcaaagatgactatgagtctaatgctgtgcaattctatgatccggcttccaaaaagtggaccgaagtagagactacaggagcgaaaccttccgcaaggagcgtgtttgcccatgcggtagtgggaaagtatataataatatttgcaggtgaggtatggcctgatctcaatgggcattatggtcccgggacgctgtccaatgagggatatgcgttggacaccgagacactggtgtgggaaaagttgggagaagaaggtgcaccagccataccacgaggttggactggctatactgctgccactgtcgatggaaagaatggcctcctcatgcatggcggaaagcttccgaccaacgagcgaactgatgatctctacttctatgcggtcaattcagcttaatgcgtgtcaagatttgtgttgtgtgtgtggctcgttaatatttattactatccaataaggagccctaatggtttgctgtattattacaaattatctgtgtgtgggactcgtcgagcttttttactctaatgaggcctactcatggttgtgtgagtggttcctcaagtatcattgtccaataaggagccaatttatttatggctggctgttttattacaaattatgtgtatgtgttaataattaaagattgaattatctacaactttatcgtattatcatttattttctctcaatggttttaacttttaagtcttaacatataccgtagcatgaaatttgtgactacgagtttgggtagaggtgcgggattccttgtggcgcaagtcatgatttgggtggtttatgggtttgtgacttcaagtttgcctggagggaaaagtgactacgagtctaatgctgtgcaattcttggatcccgcttttggaaagttgacagacacagaagtagagagtacgggagcaaagccttcagcaatgagcgtgtttgcatatgcaacagcgggaaaacatataataatatttggaggtgagatctggcgagacccaaaggcacattaaggtccagccgtccagggacgttgtctaccgaaggtgatgcgttgaacactgagacaagtctgggagaagtttggaggaggaaatgaaccggagatgccacgtggttggaccacctacacccagtgccggctcataccatttatgtgccttatagcaaaaaatttaaacatatatattttgtgtctcttttgcatgtataatttttttttttgtacctctttggtatatacaaaaaaaaatattgtgctcatttttttttttaaagaaaatttcccggatatagggcggtcgcattgtccgcctttttacttaacccggcactgcctacaccactgccaccatctatggaaaaagaggtatcttcgtacatggcggaaagcttccgaccaacggccgtgctgatgatatctacttctatacatgcagtcaattcagcttaatgcatatgttaaggtttatgttgttttttgtggttcgtcgtgttaattattagtttattactaataaagagccaattttatataacctgttttaaatttgttgtcattgtaaaaattaccataagtacatgccagtatgagtcttttaagtacgtgtttaagacaatacagtgaaattcctacaaaattgtcatttgatttttctcagatggtcttaaatcttatgttttaacaccgaataagaagccaagtgggctaaattgggcctacggaaactgagtgagacaatactaatgggctatattggacccatggaaatggtccagtaaagcttctaattgacttaataaggttgattgttttattactaaacaagaaaaatggatgtttcagttttcttgctagttctttgttacactagctcttaaactctctcgcttaaatcaaactgtaaccacaatcttatatcataaaggagatagctttgtcaacttgataaagccaatgattatccatctctgactccatcttcttgatatcatagagactctcaatgttgctctgtctcggtctcatnnnnnnnnnnnnnnnnnnnnnnnnnnnnnnnnnnnntgtaatgtctagaggaaggaccataagctccctgatattgttcggtccaatcacttccggatctgctccccacatcaaatgcccgacctgaaggttggcttcttgcgtcaaatgcttaccatcaaagaaaatatactcttcaggcttggcgcatacatttttagctgagcaattactcccggtgatagagccagttcccacacaagcagcgttt

SEQ ID NO: 29569 - DNA, 2157 bp, Arabidopsis thaliana landsberg
  unsure (1)..(2157): unsure at all n locations
aatgtcatatagcaggggttgtatcatatttgatgatagtagactctggaatgcaatatcattgtcttccagatcggacaactagtcttcttttgtgctcctttatcttcatatgtacatgattgatccacagcattacacacgtgtggtttttctttcctctcgctctgttttgctaggtccttatcaattaggaaggttctgcaattacgtttccagaactcctgtcatcaagtatcaaattatctctctaccttccattcttcagatttatggttttcctgaaatgtgaagtttggtttctcaagatctttagcttcttatgagtcactcagctgatttcacaaacagcttcatgttgacttaaaccttacagaaacttaatgtttcagactgagaacatgagcaataatttagaagagagtacttaagtcaaattagtagcaaccaggcattgacaagtactgataaggttgtggaccataacaaccaataagaacaacttaaaagaacttatacatgttggacgtatgatttagttgttactgcattgtttaaacttttcttgttaaaatctttcttacactttgatacaaaagaaaaagatggtcatattcttaaatactttatagtttgtgcctttttcatgtgatacataactctgaaatctaaaataaattcttgttacacacagaaactattcaaggtagagacatttaggaaaccgtacaacacacagaaaccagtccacttaacattttaccaaattaataagtttaataatatcatctctaatccaaattttgaaccgccatggtttttgtaagccttgcgccgtcaaagtttagatatccgccatggtttgggaatgctgaaacgccgtaagagaagtttcacgctcagactcgtaccctttttgggtatactttcggatggctgattctatggatcttgttttgcgaagacgatgagccaagccaacgccatggtttgtgcgccgccgccgccatatctgccgtgatttgtgaattaaacgctgggacagaagtttgctactcgtagccttctttttgggtatgatatctgagctttgattccaaccgtcgagactaaagcatcccgtagtctcattgaaggtttcttctaactacagctatgcgatcaaggttctgaccacagcgagccttacaaaagtcaatgtaccttatgtagacagttgcattcttagcagtgagagaggactcactgggtggctccatagtttgaatggctactgacacaatcctcaagccggaaagatcatgatccgtggtggtcctatcagatatggcaacagaaagttccagatacagacgaatccagtcattggctcgcagctctgattcatcatccaccacgtaaaatcggtttctgttttcgaaagggttctccagcgggaactcaggcaagctagccatgnnnnnnnnnnnnnnnnnnnncgacgttttaatgattgtccctaaaatatacaatgatgaatgaaatactagttgttgtaataataataatgatgtgttaatgaactatatagtaaggagtcacatgtagtataataataatttaattacctggacgacgtctttcagcaataaaggaggtcaaaacaagccggccacaagcttcttcataaacggaagtctgaaaagtaaaacgccttccactagatggctgcattgcaaccaaagtaatgtagaaacagcaagcaccagcagccagagtcctgttgtatctcttaacgtgagagagctttaagtttgtcccctgataaatcaaaaacgaaatttgaataaaaagaagagcaagagtggataaagaaagagaagaaaggaagacgagagtcttacactttgattaaaaaaaagatattatagttagtaattgcctaattaatttcacaaagagagatgataatcaaagaagttaaataagtctatgggatgcattcttaatagtaatcttgttaacttctttcttacactatgagtctctgattataaaaaaaaaaagatattagtaatttgcctaatttcacatgaatcccatagaaaaatttatttctttatactttgcttttttgggcctttttgataattcataaataagtggtgttaatcgatg

SEQ ID NO: 29570 - DNA, 1809 bp, Arabidopsis thaliana landsberg
cagaaatgaccattgaatccatgcgggtatgaagacgcaaggtttctgttaaattactaaccgtgaaaacaccaccaataatggcacacagatttgtgatgaagtgtgagaaggacttcgggttttcggttattaagatctgcaaaaacagaccaaccaaggagtaatttaaaagaggaaagtatatatattgtgacttttgcgagagataatctcttgtttgtgtaaatgaggactgaacctgcataggagagagctcaaagtgaaacttcgcaacgggtaagtagtaagtctgagccacgctgctgtgagcggtgtattcatattcctctatcagtgaatgttcttgaccggatcttcttgtaatgacctctgttttgactgtttgaaggtagtgttcgatctgtagaaagcatgtagaaaacagttagatgagagccagtaaaagaaaatttgacgatggttcaagactctaaatttctatgaaggtttctgggacttacagtgacattggcaccaaactcatgttgatttatgaatgcctttccatccagcctgtcatggcttaggccaagatatggcaacaatcgcttcatatcggtcagcagcctaggagaaatcatcctcccaaacgaaaaatgagaaacaacatgcgacatgttcatttgagaagaatcgaatgaatgagctcctgaatgagctgagatcacgagatttcctggaacctgaaacatacagaagacaaatttcagtacatgcgacaaatcaattacaggacattcattcagtgttcacttttcagtccgaggttaccttctttacacgtacataaccttcaactctacaacctcctgtaactggtgcctttttaagatgttttacagtatcattggattttccatccaaagccaccttgtgagtctccgggtggataggcgcgaccagtccctccaccatctggaagaaagaaaatcttatatgaacttttagactgctttctgttgactcaaaacgtagcacaaagatatgctgtgcatgtatataatatttaatccatagacaaactagacgtttttcaataactaagtgaccaatacaccacatacacatagatgtgaatgttggctcatttattcctgatactgaaacgaaatttggatttgtctaccttaactatactgtctgtgtcccgatctccatagtaagattcatgttcgtggtgtccatggtcctctctggaaacattgaaacaggtacactttcataaaattatttacagcaacagatatatggtctattaacctaaaggaagttagagaggaaaagacgaaaagcaaaacatttaagattttgaacaaatttacggtgatgactgcacatgtgtcaacatttgactgtaccgagaacacaattaggagacataaactcgaatttgtcgccacatggatacataaggttaagtagaagaaacgacgaattgtgtataactaagaaacatcatatcagatgttttctcacctaaggtcactgcctttgcggaaaatacgaatagatggatagccttgtatgtgattcctgaaaatacattccacgatttatgttaagtcaaacgacattcactgctccccgtggaattgcatccttgaacagcaggaattaaaaaggtggaaacacaaattcttttcttcttggaaacgactcattaatcaaataagaaaaacaagaaaatggaggaaaacatcaacttcgtagtacctcttacatagcgcaggttcttccgtgcaatcaacatttcctagaagaacacgg

SEQ ID NO: 29571 - DNA, 2449 bp, Arabidopsis thaliana landsberg
  unsure (1)..(2449): unsure at all n locations
atttcaaaattgttgatccgctatattgatatggatttattcaaatcagtcttttgtgaaattcctttctagttcctgggattagtcatgtgattgttcttatgggaccctacatcttctctatttctttggctccattttctgttctcgtgatctattttttcctagggattttaaatcaaagggacttcatagcagaaacaacctcatggcacatagttaacatctaaacaatttttttcgtatatgcttatagatctctggtggctggcttctctacaaatccaatacacacgatgagggtttccttactgcaacattgaagggattcagtgttattgacaaccgtgaaggaactgaaaaagagttcagactggctgtaggaagacctgcagatttagattttggagattcacattctgtgactgataaaaatcagggtttaactcagtcacatgtaaccacggggagtgatattggaccctttccttcgatgctcactcttgatgcgcaatttggtcagttgtcaacttttgtttccgtttctattcaaaggccacagttgcttgtagctttggattttctactggccgtagtagagttttttgtccctactataggcagtgtgctatcaagtgaagaagataaaaaccttaatatggtcgacgcaattgtcatggataagtctatctacaagcaacaaactgctgaagcgtttctttctcctcttggtcctttgatcgctgaagatgaaaaatttgataactttgtttatgatggtaatggtggaactttatacctgaaagatagaaatggaggcatcctctcttcacctagtatagagcctattatatatgtaggaagtgggaaaaggttgcaattcaggaatgtagtctttaaggtatagaaattctatattcaattttattactcggtgttagatcttaaatttatttctgttgtccttttattttgtctcacttttttcatattgacacagaatggccaagttttggattcatgtatctctttgggagcatgcagcagctattctgtttctagagaggatggggttgagttggaagtatatcataaagccccacaacaagactctgagaggaaggaagatccggtttctcaatctcccagcaccacaacagagaggtccacggaaatgatcattgagtttcaggttcttatagtggccaactttcttctttgtatgtgcataataagccaaggaaaaattcccctttaatgtttgaagctcgtttctannnnnnnnnnnnnnnnnnnnnnnncttaccttctacaacacatcaaaagacgtagttaaaactccattactctccaacaaacttttgcatgctcagttggatgcttatggcaggtcagtggtttctctgcgattggtaactgaaatttaagcatgattagttgcataaaaattgatcagccttgcacagctgttgttcatatttctatgtcattcctttgtcttttttttactggtacagggttgtcataaagaatgatgaaattgaaatgagtgctcatacgttgggtctaaccatggaaagtaatggagtgaaaattctggaacctttcgacacctctgttaagtattcaagtgtttctgggaagactaacatacgtctttcagtttcaaacatatttatgaacttttcattcagcatcttgagattgttcatagccgttgaagaagacattttatcatttctaaggatgacatccagaaaaatgactgtcgtctgctcagagtttgataaaattgggaccataagaagtatgtagagttatttgttgaaattttatcagttcatattgtttttgttacctggtacttagtacttatattgcatgcagatccctgtacagatcaaatatatgcattctggagaccccatccaccccctggttttgcgagtctcggcgactatttgacaccattgttagtctactattctaggatatactatttacgcaagagcctttgcaagttaattaattggtatattacatggcagggacaagccaccaactaaaggggttcttgtggtcaacaccaatttgatgagagttaagaggcctttatcattcaaactgatatggtcacctttagcttccgggggattaggtggttcttcgatggatgacaaagatgaaagagatagttcatgttccatttggttccctgaagcaccaaagggttatgtggcattaagctgtgtggtatcaagtggaagtacaccgccttcattggcctctaccttctgcatcctagcttcttctgtttccccttgttctttcagagattgtgtagctatcagctccacagatatgtacgctgctatgaacctttcacttttacttttacgagtagctcactttctatacacatgggacagatgcatgcacaaactaaata

SEQ ID NO: 29572 - DNA, 2935 bp, Arabidopsis thaliana landsberg
gacatgttctttccatacattgaaacatattctgctagcatccactaagtctccattgtaattttccttaaactcctctctagagaaagaaaaatagttactggatggttaaatcactcactgacattttcctacaattgttttgcattatttcaccaagaaccaacaaaaggtccaacatttaacgtaaaaggaaagacattgaccttataaattaacatcaccagtccccttttttgacctaaggatcaaagtccactatttatctccatctagttaactcaagaaattcaacacaattgtaataagaaacagagtaaaagtctttggttactgtacaagaagaagacaaatggtgatctgggttcatcttcaaagctcccaattggtttcgagatattatcgatattgccactcgcaatgtacttgaaccttttcacttcccttcttttctcaccgcactcatgcatatcatacagagcaatcgctatcataacaccacattcttcactggaataaaaacccaaaacagagtaatcacaaatctagataaaaaccctaaagaaatctagatcgacgaatccaaaagctttgaacaaagtagcaataccattttttaaaagcgctaccatcggcagcacgacgaacagcttgaactcttttacgagttctcggccgaattgccattaatgcgcatcgacgattttttctatttctgacagagaacaaaagttttaacctttttcgctctttactatgttgtgtgcacgagagctcaggcatcggttcgcttacgtgtcaattgcgcattttaacgataatggattttctgctaacgtgcgcttaacagataatacgcgggacataattggcgcgtaattaaaaacagaggaaatctctcccgcttcaaagaattaattatttattataaccaataaaacttagacacgtaatcacttctaaaatatgcgaatataaaacttcaaaatggaataattttcattagatttttaatgcggaaatacacacttcaacacaaagcaaagcaaacaaaaaaaaaacattgaaagggaccttcgaatttttttggagaagatcaatctttattatactcaccaactcaaataataaaaggtaaatccaataggaaaaaagacacgtggagtagacttgaatcagttggtcctcccgcaaaccttgcggatttcaccgctactaccagtcaacgggctgatatcacccatttttatcatcgccgccgtgaagtcagagttaaagctcgacggattgttgctgtatccacggacgatggagtcagtagagccgccgttgaagagcacttggtcggaatggaggagccctctctgagtcatgagattcttgaagtagttgttgtcgaaagaagctgccgtggtgacgtctagtggagctaggtttccgtcgccggaaccggaggctctaaggcaagttcgttgacgtgtcgtggcgaaggcggcattgatgtttgtctcgttgtagattctcgctcggaagttcgtgcaacgggattgtccgatcgtgtgtgcgcctgtaaacaaacccaaaaataatttgaatgattagtttaatagttgacttgtttatttgttaacagtcatttatatgattacgtaactttgggaaaaatatgattacgtaattttgggaagaaaaaacagaaaagtcggtggtgcgttacaaaaatgtgttgaaaaaacaaattcacaaggaaacaaaagtaaagtcgacaaaaaacaaaaaacataatcaaattatattattttgtgtcgactctgttgactcttggtccttttgaaatatttctttctatgtttcttttagttaaacaaatatggtgaacgaataagaaatattcttaaattaaagataattaatcacagattaagaaaatttctctgtcgtcccaatgttttagcaatgtaatagtaatcgatgttttgaaatttgcaatcaaccataatctataaaacatatatagttgcgtatataataaataggagttgggttaagatagaggagaaatgaaacgaaccagagagagcaaccatatctctggtggagagtccaacagcactgaaactactaatgagttggctcagactcgaagtcggtgccggaatgttactattcgctgccgcttgactcgccgttcttgcatctcttcttcctactttcacatattaattcggtcctccaagcttcaacatatataaagaagaattcatattttagaccggtttattttttttaagtttcaaaacaagattgagagaagaaacatggagcttacgcctacgacagagtttctagctgcaatggctaagatgtcaccgcaagatacaacccggaacatgctttctaaaccgctgatttgatgttatcgatcagtgatcacattaaattcactagctgaattgcggtttagggccgcgttttgttctcatgtgatgctcgacgtatcgtctaacagaatcgaaccgtcaaatccctatacgtaagtatgaaaatggatagaagtaaaaaaccaaagtaaccattatgctaagtttcttcaaatgcaaggaaatcaaaaaaggtacaagaaaaaaaaaaagttacgttgacgaggttgaaaattttgcagagtttgatatataagtcctttctgttccctttgttttagtttgagagatccaaaaggtgttagatcatgaaatttaaagtcacaagagttttttctagagttaccaaattatatcttctgaaatttacttcaaagtgactttgttttcatgcatagagcatgaaatgttcttagaaggtgttagatcgattagatacaagttcttgagaacatattattcttacaatctccacacaccactaattacgtaaatgtgcatcacaccactaatta

SEQ ID NO: 29573 - DNA, 1679 bp, Arabidopsis thaliana landsberg
cttagtaatgatttccatccaacttttggtttactctggtttgttacatgagtcaggttgtgggaatatcgggatttgcttgcaacaatacgtgagtacctgaaaccaaaaccattatcatattataaactagatcatcatcactcagatgaaatcattgactcaaatccttagaataagaaagattagaagaaagatgagaatggaatacaaacctcgagagtgtcagcggataagcagaggacccgaacattgcggattccaactataagatctgttgcattgccgaccataacgtttttctcatatatgtctctaattctcacctcatctagctgatcatttgtcatccaaatatcgatcttggcttcaacaagcgaatcaaaattcacttttggataattgttagctatgacttcagcatattccaagtaaacaagatttggagtatcaaaggacacattatttggattttcctcgtgcataccgcaaaacttcatgttgttgcaacaaaaggtcagtctcttgagagtcgcaacagaaacagagcaagatgtccatacacacgaccatatatgatggagaacaagttcttcaagctcgggacaaccagaaagaagcttgctaaaccaaatatcctcctcatcaaacataactgactcgagatggagagtcttaagctttggaagatgaacatgtttcacatcaatgggaggaccatctctaatctttagagtcaacttaaccagtgtctcagtcaagaagatctttgcgggaagcgacgtccattcattcatatcgatgactagatggagatccgatacaccacgtaccaataccttgtgtatccaaggagcgacacaacctggatcaacaggatcatgatcatctaccatctttagagagaatttgtctagaggagaattgccttgcaaatcaaggatcctatccacgaaatccggaaagcttgtagaaagcttcttccttttgtcatcaaccgtaagcacgaaacccactaaacctttctcatgtaaaggattctttacccttttatcgcgatgcagataggcagagtcatcaaattcaaggtttggaacaaaagcaagtagataacgccatcgtctcgagagaagagatgttgaagcagcttcttttgtagtgaggtatgacaaaacgtggcatagaaatgcgtctggcaaatcgttgatcatatctttagaaacagaatccatgattgcaccgtgaaagatcgatacttagagcctaagcaaaaaaacaaagattccagatcttactatatcgactcccacgtaatcgctcaacgattgagagattcgaacaaccgatatcagaaattgaaaatttagggctttgcaatctagaaattttgattttagggcgaacggctttaatatttgtcagatttactcggcgtgtgattataagtttaatgtttaattttttttgttctagtcaatatttttgtttttaaaatttcattaataacaaatttgcacgaatggcacaaaattgtggatttttatttaacttgtgttagatattaatagtttgtctttaacactgcctttgagtaatctttgtaacaaaaatgcacgataagcaaattatccatcaataattaatcgagttctaaacatagagttctcgtagaagaaaat

SEQ ID NO: 29574 - DNA, 2615 bp, Arabidopsis thaliana landsberg
  unsure (1)..(2615): unsure at all n locations
tctgggaaactgttacctggtgtttctgagagtatcaagcactataatctcagccataatcagcttgaaggttcattgactagtgggtttcagttgtttcagaacttaaaagtcttggatcttagctacaacatgttatctggagaattaccaggtttcaattatgtctatgatcttgaggttctcaagcttagcaacaacagattctcaggttcccttcccaataatttgttaaaaggtgactctttgcttttaacaacgctggatttaagtggcaacaatctctcaggtatgctcttggctttatcttctacatagtggaaattgttatatgttaacggtggcaccaagaaaactagaaatctaatatttttttattggttttccttttgtgtttcagggccagtaagttctatcatgtcaactactcttcacacccttgatctttcttcaaattcactgaccggggagcttcctctcttgactgggggatgtgttttactcgatctctcaaacaaccagtttgaaggaaatctgacaagatggtcaaaatgggagaatatagagtaccttgatctaagccagaaccatttcactgggtcgttcccagacgcaactccccagcttctgcgagcaaatcatcttaatctttcctacaataagctcacaggctcacttacagaacggattccaactcactatccgaagcttcgggtacttgatataagttctaacagcttagaagggccaattccaggtgcgttactatccatgcccactttgaggaaatccaccttcaaaacaatggcatgacaggtaacatcggacccctgccttcttctggttccagaatccgtcttcttgatctttctcacaannnnnnnnnnnnnnnnnnnnnnngtgtattcgggtctttaaccaatcttcaagtgctgaatctcgcagcaaataatttgtctggctctttgcctagctccatgaatgacattgtctctctaagctcattagacgtatcccagaatcatttcactggaccactcccaagcaacttatctagcaacattatggccttcaacgtgtcatataatgatctatcagggactgtgccagagaatctgaagaacttccctccgccttccttttatcctggaaacagcaagctcgtcttgcctgctgggtcccctggatcaagtgcatcagaagcttccaagaataaatccacgaacaaacttgttaaggttgtcataatagtttcttgcgctgttgctctaattattctcatccttgtggctatcctccttttctgcatctgcaaatcaagaaggcgcgaagaacgtagtattactggtaaagaaactaataggcgggctcaaactatcccctcaggcagcggaggtggtatggttgtctctgctgaggatctggttgcttcaagaaaaggctcatcatccgaaatcctcagtccagatgaaaaactagctgttgcaaccggcttctctccttctaagaccagcaatttgtcttggtcacctggctcaggagattcattcccagctgatcagcaactagcacggcttgatgtgaggtcaccagatagacttgtgggagagctgcattttctggatgattcaattaagttgactccagaggaattatcaagggcaccagctgaagttctgggaagaagtagccacggcacttcttacagggcaacgctggataatggagtgtttctaacagtgaaatggctaagagaaggagtggcaaagcagagaaaggagtttgctaaagaggtgaagaaattttctaacattagacatcctaatgttgtgactctccgagggtactattggggtccaacgcaacacgagaagcttattctttcagattatatatcgcctggaagccttgccagcttcctttacggtaatgctcctttcaataaacttctctaagtattatatgtatgtgcagtatttttcatcaagcttacggttcttgtttgatgacagatcgaccgggcaggaaaggccctcccttagcctggacccaacggttgaaaatcgcagttgatgtggcacgtggtctaaactacctccatttcgacagagctgttccacacggtaacctcaaggcaacaaacattctcttagatggagcagagctaaacgcgcgtgtggcagattactgcctccaccgtctcatgacacaagcaggcacagtcgaacagattctagacgcaggaatcctcggttaccgagctcccgagctagcagcttcaagaaaaccattaccttctttcaaatcagatgtatatgcgtttggtgtgatacttcttgagatcctaaccggaagatgtgcaggagatgtaatcacaggtgagcaagaaggtgttgatctaaccgattgggttaggttacgtgttgcagaagggcgtggtgcagaatgctttgattcggtattgactcaggagatgggaagtgatccggtaacagaaaaaggcatgaaagaagttcttgggattgctttgaggtgtataagatcagtttctgagagacctggtattaagaccatttacgaagatctttcttctatttaggaacgatgtgtctttt

SEQ ID NO: 29575 - DNA, 3153 bp, Arabidopsis thaliana landsberg
  unsure (1)..(3153): unsure at all n locations
cgatcaacatttccatgagtttggttcgattgaataccatatcaaggtatatttttggggcttcctttttttaataataatcttctttcttattcgattatatgtgctcttacaaaatgaaatatatatgatttggacatgcagtactcggtttcggatccaaatattgtgcatgtatcgacgtcgacgttgcttgagacacaaggagcagtgacattgaaggagatttcaagtcacacttatgaggtgattaagaatattggagttggtgnnnnnnnnnnnnnnnnnnnaccaagattagggtttcaattgacccttggcctaaaccttgataatataccacgtggcaaaggtaagcttcaatattgaaatgtactttttcccgctacttagttattataagtttttttcatatttactcattcaaatgcagaagcgattaaaatcattacaaggatttctgaactacaagcgataatattaagtagccaactaaaagagatgctgagaagtttaaattttcaagatgattcacgatcgatcaacaacatgcccatcaggattgtttatcacccaagtgaacctttctacgtctttaaacaggtttattttaccgcgttttatttgtttatctgagttacatccaactaaatataataatggatagagaccaacgtctaaaatttatcgaataactataactataagaataagtctttgaatgttttttcagccggaaaaaatcacggccgtgtttccgatgaattttaaagacaattcggatgtggtcatcgccacgtcgttcttccaggtacaactaaaatgcatacaatcaatgggtgggactagagttttgcattgagacgtcactaaggtttcctttgtcaaattttatctttttatgttaaaaacaaattggacaatacatataaaaaggaactagttgaagtgggaagccaaaaggatatgggaaaagccccacaatgtagttggtcgccaattcctcctctccaacttagaggagaaccggttcaagacttgaccaccaattctggttttgtatcatttggtacgttttgtgtcattttatctgtttataaaacttaatccaacatctttaattagtattcttaaatgtcaaagttcaaacaattctcattgcagatattacttcacggcacattgaaggaaagagactggacaaaacggtttggaacttgctaaatttctacgcatgcgctaagtaccatattaaggtacattagttctagtttttcaaataaaatataatagattttgtgttcttgtaattgaaaattttcaacctcgtattgtttaaatagtgctcgagagggtacatacagagacggatgagaaaaagaatggaaactttagttaaggtatttttatcatatattacgtacacacacgaatctacaacaatagttgacatttcataaacaaaataacttatgtttgtaaatttacattatatacgtagctgctaaataacacaagcctagaagaagaagctgctcaaaatggtatcctttttttttgttacctttaaccttacttaggtttgtaaataaaaaaatcctttttttttgttacctttaaccttacttaggtttgtaaataaaaaacaatattttatcattttttcttttccattctctaatttctatatagaaaacggaagatgcaaatacgtaaaggagtttgtgaaggtaccaaaacgcaaattgatgatgaaacaaagatgcaaggagatgacaaggagagtgaagataagcaagttccggatcaaaatcaacggttgtgctcggtttcgattcaatcagcggtggatatctctccccaaattctcttcgaaaccatcagataaatcatacacaaaattggactaagtaatcacttaacttggaaagtctcaagaaagaggctcggtgttgttgttttttttctttgtcaacatgctttaaaattgaattcggggagcaatattatacgttaatgaatatcttgacaacaaaaaaaaacgttatcagataaacttatggatataatttggtaaaccaaaaataaacctaatcaaaagttggcattgaatgcagcatgttacgtaagagctttgtacaagtaccattcactctttttacttttcaatgtatacaatcatcatgtgataaaaaaaaaaatggaaccaatcaacacactgagatacggccaaaaaatggtaatacataaatgtttgtaggttttgtaatttaaatactttagttaagttatgattttattatttttgcttatcacttatacgaaatcatcaatctattggtatctcttaatcccgctttttaatttccaccgaacacgcaaatcagcaaatggttccagccacgtgcatgtgaccacatattgtggtcacagtactcgtccttttttttcttttgtaatcaataaatttcaatcctaaaacttcacacattgagcacgtcggcaacgttagctcctaaatcataacgagcaaaaaagttcaaattagggtatatgatcaattgatcatcactacatgtctacataattaatatgtattcaaccggtcggtttgttgatactcgtagttaagtgtatatgtgctaattagaattaggatgaatcagttcttgcaaacaactacggtttcatataatatgggagtgttatgtacaaaatgaaagaggatggatcattctgagatgttatgggctcccagtcaatcatgttttgctcgcatatgctatcttttgagtctcttcctaaactcatagaataagcacgttggttttttccaccgtcctcctcgtgaacaaaagtacaattacattttagcaaattgaaaataaccacgtggatggaccatattatatgtgatcatattgcttgtcgtcttcgttttcttttaaatgtttacaccactacttcctgacacgtgtccctattcacatcatccttgttatatcgttttacttataaaggatcacgaacaccagaacatcaatgtgtacgtcttttgcataagaagaaacagagagcattatcaattattaacaattacacaagacagcgagattgtaaaagagtaagagagagagaatggcaggagaggca

SEQ ID NO: 29576 - DNA, 2692 bp, Arabidopsis thaliana landsberg
ccaatagcagaatgagaaaaaaatgtcctcttgcttaatttggttttgtagagattttgatggttttggtagcttgtgtacttttactttttaattgaacactatcagttccatctctatgttgctggattcttaaaagactgaaatttagtagcttgtgtacttttactttttaattgaacactatcagttccatctctatgttgctggattcttaaaagactgaaatttaggagttacttgggttcctgtactaatgagaaaaacgtctgtagcttaatttggtgttgtagattttcatggatttggtagccttgtttactgttacttattattgaacactatcagttccatctatgtgttgtttgattgattctgaaaggacttaaatttgtgtgttactttactacgacttagttagctgcgtctttgatttatctccttttaaggaagtcaggagaagaattgctctatatcgtgaatggcatgcggtaattattatggtttgttcctttttatggcagaaaaaggaagctgactgatcattggaggaggtttgtacagcctactttaatgtggcgttgcaaatggattgaactcaaatacaaagaacttcagaaccaagcacagaagtacgacaaagaagttgaagaatattaccaagccaagaagttggagttagaaaatgtcaaatcagaagaacttggagtaaaggctttacctcctcttccatgttatactcagaaaacccgactcatgaagaggaaaacgagaaagcgagttgaagagaccgctgatgttacatcctatgcatcaaaccataatctcttctcttattatggtatggaactagtttggtgttcttgtctttctggtcgtgattaatgttcatctaccattacttgtctaataatttcttatcttattgtttctgatctttgtatagattgtcggaaatctttggccgatattgctcttaatgacaactcccgcaacctaggtatggtgttctaaaatctcaactatgatatgatattactccttttgaaaactttgatcttataaaatattttctgtcttgggtcatcagataagaagaataagagcgccaaggatgagacagctttctctgaagagacaccgcctctcgagtttagagaaggcgatgcgtacttggaacagatacttttgaaaattgaagcagcaaagtcagaagcccgtaacttgaagatccgagtagacaaggttttgagtgaaaatccaagtatattccctctggctaacacagtgaatccacttggagctgctgatgtatacaccagctcagaacaacaaaagcccctgctggctatcaaaaacgaagatgagaaatcgatcatctctgaagaaaaaccggtgaaatctgcttcagtttcatctcatcacgtctcacctgaagacgacgagacaacagatattttactggctgagattctagcatcaaagcgaagggaagggaaatctattattcccgataagaatctagtgaagacagaacaagcttcaattgaggaaggtccatcaagacctgtaagttttccgctaactcagtgtaactttgctaaacccttttggtctcatatgcctttctaacacaatgcaggtaaggaaaagaacaccgcgcaatcgtgaaatcattacgaaggaagagagtaacccaaagaggcgtcgggtttcaagagagaagccaaagtctaatgctgtgatggcttctaggttttccaacaggaagagaaagcgaggaaaacgaaggtcaggctctgccgggttacgaagaagatcctgaagaaggtttggaaactttcaagaaaccaatcggatcttgtgttaaaaagtaaaaattgttcattctaagatattcttaactcttaagcctttaaagtacaaagaaatatttatagtggctgtgttttgattcttcatgtcaacaatatattcaaactacatgaagtttatgtatttgtgactctaaatcaacttttgaactttaacttctataatctagagtgtatatatttttctctattttatattatcagtcaatcatgttttaatcttgtcggtgctaagttttttttgtttggacaagaaagaatgcttagttaaaacattatttcaaatacattcgtctagagagtttggcagagacaatggctaaaatggtgaccgtagggacgaatataacatcaggtataagtttgattaattttaactgaggaacattctctcctgctcttttagccgccatcgccttcggttgagatactattccggtgatcatagtgacatcatcgagtttacttggcttcacgctctttgacatgaactctatgaacaattttttcttctcttcttcatctttcgcttccttccaccgcgtgaaacaaacctgtttagatcattcaacattgtgttaaaaatatagagaaattattataagattttttgtgtgattttgtagaggggaaggactcacctttatttggtccggggttgggaaatcgaattgcctgcctgttaaagccaagttgaagttgcgtgcctaaatagataaattccttacttctaaagagtaaaccattgttttcgaatgatcaaataatgaatcaatccttacttaaagatgtctaaaacagcaacgtggaaatcgtcg

SEQ ID NO: 29577 - DNA, 2463 bp, Arabidopsis thaliana landsberg
tcaatacattcttgttttttcttttgtagaattttgataaaaaggtgcattcagtcgcattttaagtgatttgtgttacaataattttttttatgttattcaattattgattttaaaatattttccaaaatctactgttatttttggttcatcagcttgacgatggccctctcttcgccggattcttcaccggagatatcttttcagttttttgaattttgtaactcggtataaccaatttgatattttctcttatgcctaaccagtcgattttgtaagttttttttgtttaccggtcgattttgtaaccctcaaaactcaataaaacacaaatcacattcgactcgaataatacaaaataaaaaattctaagccattcaagttattacaaattcgattcggattcggattgatgaattttggttcggatttattgcccaccaaaacttcttttcacatttagtttttatgaaaactaataatttgtttttctttttgttcaaaaatataattgattaaaatgaatatgaaaccaaaacaatgctagcctaccccactaggttctctctttgaatttgaaagaaaaaagaaagatcaaaaactaggaaaatattactagagaatctttgaagccttgggacttttaagtcaaatatcctaagaaaacttaacaatattaaaggttccagattcgaaatattgtagaactgtttcgtgagtgaaacaaatctttaaggttcacgaagaaaagaaaaaaagctacgcatgacaactcacatttaatttggccctacaaggatctcttctaaaagatcctatgacaaagaaacttagaggaaaccggttcttgaatcacttggaatcaagaacatggtagagcgatttacatgtagaacaaaagagtgaaatacctgtaagcacgagaaactctgcaatggttacggatttactattatcaacaaggccttcatcctgctaagaaatcgtcatagtggtcatcatcgctatcgatatggttagcagcggaagacttaagcaatctcatgcgtttgatgaggaaaacattgtagtagtaactgagcagatccttcttacttttttgggggaaggcattagaagcaaattcccaaaatccatcactacttgacaaaggattctttttcacaagagcttcaaaccttcgctcttctttggccgtccacgactttaacactatttcttcacccatttgatcaaattcccatgtagagaaagcacggttaatttccttttccaaaagctcctgtgcttctttcttgtgtcgttttatgcaattggttgacctcggagaagcacaagaacaagagtcggatcttccttcgccaacttttttggagtgaactgtcttctttaggctatatgttggccaaacaccagttccaagccatcttagagtattggaatctccagggctaccgtagaattttcccttcttggtaggggcaatccaaaccggtatttcagcttggaaccttggaccgatcgggatagctggtcttgttttattggacccatgggttattacatctttggacgtcttgttgctaacatctttattggacccatgggttacatctttgggagtcttgttgctaacatctttagggcttggtgggtttgcatcatcagcagattgtcgtgaagaaaaacagagatgcgaggacgaaacagaagacttgggtttcttgcttttcttctcaaaacttgaaccactagtattctctgaagactctcctggagctgtagagactgcatcatcactccaaggctgttcccatgtccttttggtctggcaagagataaagatacctgtcagagcccccagacaatgtcttttggctggtaaagaggactctttggcactggcatgccataaggagtcaccagtttctgttttcgtccaatcttttacatgattttctgacaaactcttgcgagctgtcccaactctacttaaataaagtgtataaaatccaaaagtatggttgttttcaagcatccacacgcttggagacataaaagcgctgccttattgcctagatataaactaaatctatagtcaaagaatgtattaccttgaaacacctgtcagagtcgtgttttgcagcaccaccagaagaaactcctctacctataaaagtttctggaggcattgggaaagagttttaattaaaactatcttgttttctttttctacttctcataataaatgtacgagatcaaatctctagccactatattagagagtaacttcaacgttttattcagagttttttattggcaccgtgtatattgttcgtgttggccatagggaaatactcgtggtggtgactaggctccaagaggagtttcctacaagtccaccacgggtaaaccactggctcaaagacccagtgatgatatggttcaagaatattgcttaca

SEQ ID NO: 29578 - DNA, 2691 bp, Arabidopsis thaliana landsberg
cgcttggagcgttccgttcactccacaccgaatggattgtattctagaatatgtaacggatgataaaatttattgtgttgtccgagtcctcctcgcatgtaagtgtgagaattgcccgccaattcagcgagtacttgtgttggagaatctgctttgcgacatcctcccatacctttcttgagtagttgcagacaaagaagaggtggtcaattgtttccatgggatcgccacataggacacaacttgtgttcacttggtgattccacaaaaacatcctatctcccgtgtctactctattttttgcgactaaccatgtgatgaacgagtatttgggggttgagtgagaaaaccatatccccttatgctcctccatctccggttttatgttacggatttgcatccacgtctctcttgtctcaaacttatttcgatatacgcccttatctcctttccaaagagcaatatccttctctccttctctaacatatactctctgttttttaatttcctcttctatttggttcagcaggtccttcctgtggattcttcttctttccatagccattacctctacaactgtggcagtttttgggatgccaagatcaatgtaccctcgttctccaactctctctattatacgaccaagagagctccatgagtcgaaccaaaaagaagaatgtttcccgtctttcacctccactttatgaaattgtttggctatgtctctgtatttcagtagtttcctccaaatccaagagccatgcgttgtaatattcttttctgcccagaaggaaccaatccgtatcaaattttgctgcacccagtccacccaaagagagcctttagccgaaagcagccgccaaattagtttcagcatgctaactttgttagcttcttctatagatcgcagtcctaaccctccttcacttttgagtgtgcagacctctttccaagcaacttttgctttccgtggatttaatactggacctgaccacagaaaagctgaacacaacttgtctatgtctcgaatacacgcttttggaaggcggaatgcagatatccaaaaatttgtgagactgaagactaccgaacttagcagttggagacgacctgcaaaagagaaggctcgagctgtccaagtgctgatttgtgatcttattttttccaccaaaggaagataatccgaggcagtcatctttctcgtgagtagcgggagtcccaggtatcgtaccggtaatgaacaaaactcaaaaggaaattgttgaagaatcgatatcctttctgcttccggtatgcctgccatgtaaattgtggatttttccaaactgatcttgagccccgagtgtgtagcaaattcctcaaaagattgccaatgtgctttgtattgatttcttatctgctttcacaaacaccatcagatcatctgcaaaacacaaatgagtgagcttcattttcttacaatttggatggagagcaatcttcttgtctgtagcagccttatctatcatcttcgagagaacgttcatacatatgacgaagaggtacgggcttagagaacagccttgccgaaaccctctttcgcttccaaaatatcctactagctctccatttatttgtactgagaaagacgccgtggagatgcaagttttgatccattgaatatatttctccggaaatttaagagcttgtagcgtgtttagcaaaaaactccattggatagaatcgaaagctttcgatatgtcaattttcattgcgcagcggggagagactgcttctttgtgataatctttgacaatttctgtggcaagcaggaggttttccattaagagtctatcctttatgaacgcggattggtttgcggaaatgaaacgaggaaggattgttttgagaaggtttgctagaatttttgaaatgaccttatagaggacattgcaacacgagattggtctgtcatctttcatgactttagcttctttcttcttcggaatcagagcgagaatggtcgagttaactccttttggtagaaatcctgtcctgaaaaaagacttgatagccactacgaagtcactgcccactgttgaccaagtttccttaaagaattcacacgtgaaaccatccggccaggggatttattcactggcattgagaagagagttttcctaatttcctctgttgttacttcccttgtaagcaacaatttatctccttcatcacactgaaactgtaatagttctcctatttgatttggtgaccattcctcatagtctgcaggcttaatttttaggaattccttaaagtacctctccgcctcattctttatcccatcatgtcctgaaacgtttgttccatcaagacattggatttcactaattttgattcggttttccctcaccttcatggcattgtagaaagctttgttattttgatctccagctttcatccagtgaagttttgctttctgttgcaggtacccctcttcgatatttgataacctctgccatttctcatatgcctctgcttcctcgtcaacaacttgtgatgttagatttagcatggttgcagcttggcggtcacaaagatgtttaaaagcttcctttgttcgtattgttatatctccatacactcgttttcccattcttccttaggtgtggcttcagctcctttaacttctttgatagcatatgcatgcag

SEQ ID NO: 29579 - DNA, 2460 bp, Arabidopsis thaliana landsberg
cggccctgtaatgaagttcggaggaagcatcctggttagcttgtgggatttaggaggttcctggcacttttaggcttttggtgcatatttctcgggcggtggtgaatgacaacacacccggtatagtcacaccagtttatttggccccgtttttcattccaaaataaatacatctaaaaatcatttcatatcctaatctgacaaggttgatgatacattagtgctgagattctcttactccgagttagctggtcgcatgattttagtaccattttcgttgctatctagagagcatattgatgtatttttactgagaaacaaattgaacaagaagccagcaggttaaaaacttaagaagtcatgaccgaaaacaacaatttaaaaggccaatatgacaagcacaatctaagtttgaacatctactcatgatctagatttttgacaaacctgttcctttctgtccacatatgcttgcaggagatccccaacattatcgatgaatttctggcatcgaaaaatgttaaaaccaaaaacatataagagacaaagaagtaagaggataaactgaagatcaggtaccttagcattcgaaaaaagaagatcattttccaagtcacttagcggcaaaaagaaaggaattgtgtgctcaagcacaatcatcttctccaaaaacgacttgctctcaagcacacagtggtaaacctcgtaagtttctcctatataaaacggattaaattatcatatacagggagatgaaagggttaggaaaagtcccaatgtcttcatatacataaaaatatggagacaaaacagctaactctctttcactgacacgccaaaaggtaagaaacctttgaagaaaaaatcattatgataactgctaataatttttggtaaagcaaaaacacttggaaattgtgacaaaatgccagttatagttcaaaatacctgcagtagatgtttcaaactgtattccaattctcgatccatctaggcaacatatcacctgtttgataaaacaccaaatatataagcaaaaacgacctggtatcgattcaaagtgagaggtcattctaaacttaagattagccaggtgtcagccaaaactttaaaatcaggaaagtttttagcaactacaaaatttgggggaagacacaacattacaactatcaacattcttcaacaaagatatacaagtatacaaccaagattggtctgattggatctatcttttaggcaaacattgcatcaggccaagatgaatgaacaaaactataggtttcctttggactatccagaaatttctacagccatatagtatatcttttgtgacagaagtagtcttccttgcgggtatcttgaaagaatcatggtaaattctgtgctatatagacttagataaggcttacaccaacagaccttgggtacaaacaaaatcaatttctctacagaagaaatttggaagaatgtaagacctcaggagtaccttatttcccactctgtaagtaattcgttcttcaggatgacaaactagtgcaaaacctgcattaccgttttctgcctttctgtcagcttccatatgcacctacacagttcatggtcaagttcaggaaaaattcaataaagccaacagaagaaaagaaaaagatggcataaaagatttcatagcacaaagaacatataactctttttatcagaacgacataatcaaatctagatctgcccatattaaagtgtctactaagtcttcttcaactagataccaaggcttggaacacctcttttaagtacacaacaatgttgacaataaaaggaagcacacaatgatggatgccatacccgttcccttaatgtggccaacaaaccatcattccactcttccccatctaagaagacttctgcagaggataggagcgaatacagcatttgattaaaatagatacacggatgagcaaatacttatgaagcaaaaaaaaagtcagtcagataattcgtccaattctgcaattcagctatccatacccaccctgactttgggatctccgtgcagcttcaaactctttgtttaagcgatctaacattgtcttatcagaatccctaaaatgaatgatcaccaaatacaaagttagcaaacataaagatcgagaagtgaactatatagttcaaaagcatatttcctacctagtaagacggtctgacaattctcgatgcctcttgagaaggtttgacactaggaaaagagcataaagattgactaattattaccagaaagctttaaaccaaaaaaagaaagaaaaggatctgaagcacaagaaaagctgtttactcacatcttgctcgtgttgtatccagtcggatatcttggtccattgaaacaatctatttgcaacgaaagcaaatgttgtggaatctgcctttttgaaggtaacaattggaaaaagacaattaaaaacctggaaa

SEQ ID NO: 29580 - DNA, 3241 bp, Arabidopsis thaliana landsberg
  unsure (1)..(3241): unsure at all n locations
gctgggaaattctttgagcacatcttgcagagcgtagtaatggctatcacatttatggtctgtattgaaattaccggagagaagtatcctctgaaaatgttgtcctggatctctcttccatagactatagtactctacttgttttcctgctgagcttttcggggttcctcttaggctcctcatcagatagtaaactgcacccggtacatataactcttctggcaattttacaacatctttagtagtagagtcagagattagtatcccagactggttgttcttggatgacgggatttctgataagatttaagaaagatgagattcatgaagcgttaagtacataattaagtcttctaatgatacacagaatcacgcgaaagaaactcgtgctcaagtagtagttacctggaacttcttttttgtttccgaagtttgcataatcagaaacttttctagctacgtcttgcacagaggtgacaacttgttttgcgtttgttaccaaatccaaaacgttcttccattcttccttctcaattacacttgtcctggatttacaagtcacagtggtaaacaaactgattgtaaaaggctagtcaagtttcaagaagagaaggttgtttgcttaccaatctgtctgaaggatttcattcctcaatctcgctagagaagctgcactgagtctaggtataatgtcgtcctgaaatcgggggaaatgctgtgagtttcaagaagaaagtaatctcagtaaaatttgatcaagaaaagagagtttttttttttgttctgacctgcattacaatagttgttacaaactcagagcaattctctgcaagctctttggaaacacaaggaggtgtcgcatacccaacggctgaaataatttcagcatcgaatcccaattcctcccttggcattttcttgagcattatcgccattaaggaggctatagcaccgccgagagaatgaccaacaagccgtagcttgtatccctatgaatgcgttcattgcaataaaaatccatccttctcatgcctcacaaaaaaaagaaaggaggaacaacaaggattatatcatcacctcgtatttcgctaagcatcttcttatagtttgcaattcgtggttaaggaaccatcgnnnnnnnnnnnnnnnnnnaaagtgtgttgagtagccttcaaaagtgacttcttcatcgcttgaagagacaatgtcagtgataagatcgtaaattgtatgtgtcccgcgtattccaaagacaacaagtttccttcnnnnnnnnnnnnnnnnntagtatccaggcctcataacacttgaatctttcacaaatttaagaatgttattctctcgaagcatggtgttctttgcaagaccactcacactatccctgtaacaaccttttgctaactccgcattatatatcagatcataaacctgaaaaaaggaaaaaaaagaaagctacttagaatgtagtaaaaggtaagttatcaacatgacaatgattagaataatgttcttactgtagactctgaaacaacttctacgcccttgacgtcctcaaatggagacaaggatgcttgtctaaggtatataagatagagaccaatagtaagatcaccaaaagtccaaccttcaatcccaagcttactcctctgaatactagcaattatctcagacagagatcgactaccaggcagtgacttctctcctagagaaagaaaacacacattaaacattgccacagcataatggattttaagaagcacaatgaatgcaccatatgatacaaacctgttggaagagcccatctacgtaattgcatagctggctcaagtgctttagtgagccaagctaggtctagtttccactttccatcacctgtatcttcatcactagagctatcattgtcgattcctgattcaaattgtcttcttttctctaatccggacctcgaagaagtgacactactaggccttctcttctctgcctcctgctcttctaactccttttctaccttcccggactctgataaatgagactgaaaccgtttgattacattgtaaacaactccttgatacaatccacttctcttcctgaatggtgaactttctacaactgaaaaacaaaaaaaaacacaaaaaggttgaaacttgtcaagaattcttactaaattccaaaactttcatatcataccatattcaattgccaagctaaaatcttattagagtaaccataaagagattgtttgtttccacaaaagtcataaaacaagaacagaagctaagtatctattatcagtgatttctccgtgttcaacactctattgaaaaaaggctttaaatttccagataataaaggtaattagagcttacagaaattccgtagaagccggttcaatgttctgttagccattggcgagctcagaattggctttctccggccaaaaagaatccacctttcaaagagaaggatccttccaaagccgacggcggaagagaaaaagctttaagtaagtgcaacttcgaagacacggcggagcattaaagtcggagattaacggcggcaagcaaatcggaaaaaccaaaaccggaggaaaagaaggaaagctcaccgactggattcatccagacttattcagcaatgagtaatgggctttattgggccttttcttatcagtccatttaaaatccggtgaattttaaagtaaagaatcagggtatttacgtcttttggtcaaagaaacagaggatttgctagaaacagaggatttgctctgtttatttcatagagaggggttaagaaacagaaaactttagtctctgtagacgacgtttagtgaaacaaggataccagaataattaaaaacttgaacaatgaatcaacaaaccaaatatgtcataaacttctttagaacttaacctctcgttaactcaaacattttcttggaaccataattctgtatttgtaaggcctttgaaaatccctgattggtttcttcctatacaagtcaaaacccaaatttaggtcttggttgagttacgtaatagaggagaataaacacaaatcaacaaagttaagagaaacaaagagactcgaaaatttaaacttaaataaaatgatcaaattatgcatgtttataaagtaaaaagcttttgttgcaaggaaactttgtttgggtttcattgctttcaatcaaaacatttgaactaagaaaagtggtcaggactaaacagaggatgaaacgatc

SEQ ID NO: 29581 - DNA, 1490 bp, Arabidopsis thaliana landsberg
tataagttgtagtagttaacactttcccgcactctcatatttacaactatatagatacaatgaaaatgaaatttcatatttgttgttgatactctaaaaacaaattatcgcaaggtatcaaacttgaaagaaaaaaaagaaatccaaaaccagtcatatgataggcgccttttctataaaaccgttttatgtatttggattgatcttttaacgatatatatgcatatgatgttgaaataggaggatgatgggcaaggagggaggaggaagaagagcataaaggagaaaattaaagagaagttcggtagcggcaaacacaaggacgaacaaacaccagccaccgccacaacaacaggacttgccactaccgaccaacctcacgagaagaagggcattctcgagaagatcaaggacaagcttcccggccaccacaaccacaatcacccatgaacaccaatcatatgacgtctttgttacatgaataaatcgtttgcacgaatttcattagggcttatgaagaatcaatatatatgtctagtgaagtttactaaattttagttgtgtttgcttgcagtttgtgaatgtgaccatcgtgttatcatgttcttgtttatttataaagaaggaactgtattttgctagcatttttttctcaattgacaacggccgctctagtgaataatttccctcagaactctttacagtaaaaaggaaaaagaaaatagaaagtgctagacgtacgagaagcgaccatacgtttttttaaccggatgggatcaaattactgcgacttaccgagaaatgttcaaacgacacaaaaagagcttatcataagtcataactcataactacacgacacccatggctattttcttttattttcaattgtctggccaagaacatctgtttggccattgtacacactatatacactatgtggattcaatgtatttctacttggtttttgcttcatgctctcaaagatcatcttcttgaacttcgaaaccttgataactagatctagttagatttccactcctagttcttcatttttcttgaaatagagaatcattttcacaaagtcaacttaacagtttactaaaaatagaaacatcactatttataaccaaacacaataagaatactagccacacataacaactctctttcgtacccttttttccctcgctctttcttcaaccacaagcatcccaacaatctcgtttcctttcgtcttgtcattttcttcctcattcttctctcttctctctctcccttcacgaaggagggatggagataagaaagaaaccaaacatacccatgtgtcttgtcttagattcttcttccaggcccttcatgactctcctcttcaccatcctcctcttcttaaccggcctagcttcagcggttggcgccatcggtggtagcccaactgctggtttcaaaccggctgatgacattctcattgattgtggtagcaagtcatcaac

SEQ ID NO: 29582 - DNA, 2501 bp, Arabidopsis thaliana landsberg
  unsure (1)..(2501): unsure at all n locations
gccaaacaaatttatatgatgagatttatgagtagactcgttaaaatattcctctttgaaaagtattgcatacctcaatgaaattggtgtgaggtccataaaagagagttcaagaaagaaagtacacatatttacattttgagtcatcgaagttccattttacaaatattaatacgtcactgaaaaatgaaaatacctacaagaagatatatgtgtactgtgtaactgtaacagattgggtgtaagaaatcgagaattcttttatttcttattaataaagaagataaaaacacatgcttttatgcaaactatataaaagaaacacaaaacaaaattacattcacacatggaaccaactatacaataatacattgcagttttcaatgggccacgagtcttaatgcatgtgaaaccagtgatcagtgaccacgtgttaggctttaatttgngaaattccatatgatccaacaatttaacaatatcatctattctaacttgtataaatttatttcgtctaaactgagccttcttaaccccaaagatttggcaatcgagtttatgaactccgattttatcttactcacacattctaaactataggaagaatttctttatatcttccacccattgacaaagatcgtactatgtaataaattagaccgcaaacaattaactttataagaatataccttggataaaaataaaaacaataagagaacaatgtcaaaaacaatcactaaaaacttttcttttatttcacaaaacaaaaacttttcttgaaggtaagtgaaaaatatttaattgattgtagaaaagacgttgttctttttgtttacgggtttcgggctacaccgtcgtcacctgaggcggtctatatgtttgtgtcttcgaggctgtcatgatactaaaagattagaaatagaatcgaaaaattcactttgtagaaaagttatatattagctcgaaacaaaacagttagacaatagacgtacctcgaattaatacgtcatccttattagattctttttcttgtgtgtgcgaaaccttattaggttcttcacaccgtttttcacaaaggtaacgtaagagacgacaaatcaacacggcacaaaacaccaacaaaaacacaatgcatcccaaaataatcttctccatatcgtgtctgcttcttcgtcttgcatacaaattatatttaaacactagtatgtgtactgttaacgagtttacattttgaggtcagaaaatattccattttaggatcttatcactatgtaaagtttacatattttatcaatgtttctaatttgtgatcacattatggatattgtgatcacataacgaaatgggaaaatgccaaaaaaagaacatatccaactttaaaatttgccaaaaatatttcaaatttttcattaacggaggcgaggagctaggtatatgaaattatgaatatttcaaacgacgctgtttcgattatataaactaaaccaagtatcgggaaagataaccgatccaaatcaaggacagtaacacaaaccgaaataatccaaaccgggattatacagacaaagtggattataagagcaaaaactcagttaccaaaaatttctgcgaatttcgttttgaatttaggaaacgagagaaaatgagtttcttcgccgttgcttgctccgcgccaagatcttatatgcttctcaccggcttgaattcgagcttctccgatatgcatcgcagcccactatttgttttcccggtgactatatcttcccggagcgtgaaatgcctcaccgctgtttcgtctgattccgtaccagaccctgaatccaaaaatcaaactcggtcccgtcgcaaaaataaggaagcagttacgccaattgctgaaaccgagaacaatgaaaagtttccgacaaaggtcccgcgtaaatcgaagcgtgggcggcggagtgaagcagacgctgtggaagattacgtgagaagctccctcgagcgtactttctccaccataaaggagcagaatccggaggtttttgagaacaaggagaaggcgaatttcatcaaagacagaggcgttgatgaagaagaggaagaagaagaagagatggtggtggaagaggaagatccagattggccagtagatacagacgttggatggggaatcaaagcttcggagtatttcgatacacatccaatcaaaaacgtggttggagatgatgggagtgagattgattgggaaggtgagattgatgatagttgggtcaaggagatcaattgtttggaatgggaaagctttgcttttcatcctagtccactcgttgtccttgtattcgagcgatacaaaaggtataagctttgttatttcattgacgaattttcacaaacacttggtgtgcatagtagaactatgaaagctttgttctttttccctcaccccattatctagactatgattacaagaaaaaaaaaccatttgagttagattccatgatcaattaactgcagtgagt

SEQ ID NO: 29583 - DNA, 1175 bp, Arabidopsis thaliana landsberg
cccccgtcgaaaccatcctcttcggtaccagaaccctcgaacaaggccgcaataaacgcaatcatggtgtcgatatcgcttcttctcctgttctttattattgttggcgttataaagaggcgaaataagaagaagaaccctgactttagaatgctcgccaacaaccgtgaaaacgatgttgtggaagtcaggatatccgagtcttcatccacgaccgccaaaaggtctacagattcaagcaggaagcgcggtgggcactcggatgacggttccaccaagaaaggtgtgtcgaatattggtaaaggtggtaacggaggaggaggaggagctctaggcggtggtatgggtgacattattatggtgaataccgacaaaggttccttcggtttacccgatctgatgaaggctgcagccgaggtgcttggcaacggtagccttggatcagcttacaaggcggtgatgaccactggattacccgttgtggtgcaaaggattagggatatgaatcaacttgcacgtgaacctttcgatgtcgagatgagacgattcgggaaactccgccaccctaacattttgacccctttagcctatcactaccgccgcgaagagaagcttgtagtctccgaatacatgcctaaaagcagcttgctttacgttttacatggtaaccgaaatgcttctttaatttgttcctttttataagacctctcaaaagcaaatttcttgccagttaaaacattttaggaaacctttaataatctttggtatttttttttttctcaaggagatcgtgggatataccattccgagctaacttgggcaacaagattgaagatcatccaaggagtggctcacggaatgaagttcttgcacgaggagtttgcgtcttatgatctaccacacggtaacctcaaatccagcaatgttctcctcagcgagacctacgagcctttgatcagtgattacgcattcttaccgcttctccaaccaagcaacgcatcgcaagcattgtttgctttcaagactcccgagttcgcgcagacacaacaggtctcgcataaatcagacgtctactgcctcggaattataattctagagatcttgacggggaaattccccttctcaatacttaaacaacggtaaaggcgggacggatatagtacaatgggtacaat

SEQ ID NO: 29584 - DNA, 659 bp, Arabidopsis thaliana landsberg
  unsure (1)..(659): unsure at all n locations
ttacaataaacttacaaagaaaaacaaaatctgaaagctattatgaatccaaactttaaatgaaggagtcttattgattaggttgggactcttgccagttttgcttcctctttcatattcatttatggtttaaagtgcatttgatgcctacttccaaaaaaaaaaaaaaaaaaaattctccatttacatttagaacaaaacaaaaatatgtaagttagactcaatataaccattttagaaacattaaacaatatgaaatcattcacaaaaactaaaagaaaaagataaaaaaactgaaaggtaatatgagtccaaaccttaaatgaaagagacaaattgataaggttaggactcttaccgtaaacgttggtgataccgtaaatgttggtgatacagcaaaccatctttcatttttctttcagtaattgagtaacttcaattgtcaaaggaaacaaaagcacttgtaaatatgtgtgtgttgtgtctgtgtaaatatttgctatttatattagaaaagtagattgttagggtataactaataaaggttaataattatagaagaacgtttacaacatngaacgtacatgagtaacaaaactaatatttcttttttttaaacanacatgagacactagtattcatctcatgagccactatga

SEQ ID NO: 29585 - DNA, 1688 bp, Arabidopsis thaliana landsberg
ggatctgactcgatggcggcagatttcactagagtcgggctgacaagacatcggagagaaaggtcaaaatcagagagcattatatgtccgtcttcccgaactagaacgttttcaggcttaagatcgcgatacacaatcccaagcatgtgcaggtattccaaagctagcaatgactctgctatgtaaaatctgccacacattgaaaacaaaatctttagtgagatgagaataagaatgcgctgcttcagccaaaatgagtatttcttttgtcatctatccaatactttgtaatacggtaaaatcaaaggaaatgctaatcttgacagacgaaggaaagatgactcactttaccgcttgctcagaaaaatgtttccccggctggcgttgcctgagagtatgcaaatctcctccgggacagaactccatcaccaggcacgagatcttctcagtttcaaagtgagtgtagagggtagggaaaaatggatgatccaaagactggagaatctctctttcagtctgagctcgaagaagcttcttgcgactggcaagggatgtcttgtccataaccttcatagcaaagtaacacttagtcccgctcagctcagagagataaacactcccgatgtccccgcagcctaaccgcttaaggagcctgaaatgactaagacctaaaagcccatcacgaaccctaacagcctggattgcttcccatcttaagtcattggccttgtggggtttgttgacagtgctactaaagctgctgcagctactctcgtcactcacatcactgcttgtgcttcctctgcagatactgctcttgccactctccatgaaatcaaggcggccacttagcttggcacttccactagtcttgccaagactgctcgtaccatcactcaatttggctgaagcagagctggtcttgacgctgccaaagccagatgttttcttttcatcaatggtcaatgaatctacatgctcaagaacagtggatagggagctgaaatcgggtttacaaacagccgggtcgctagatcgcttcctaaaagactctggcaaccgtttactctcgggaattccaacagctcttgggtttgttactgatctttgtaattgcatcggctcaaaagtctctgctctggctgacttagtactactattcgaagaggagcgcttctgagtgtcgacttcagctccatgacaactgggtttacgagtggacgccatcggacacaaaataaattatctttagctaacgggaaagacccatattccttgaaaccctagtaagataatacacacagagcacagagatcaaacaacagaaaactaatgtctttgatgttgaagtaaaaaaagcagatcccaaatgggagaaacgtgatttcagatggaagaagatctaaaatgagaagaataagaggagagagagatctggcaacaaggtaaaggcagtaactttagggagaaaccctagaaagaagagagaggaggaaggagatagataccttgggtgtggattgaagcagagaagattcgaaaagtagaaatggttgctgcttcaattacatgcactcttagattgagtgaagtgatcaacttctcagcttcacctctgtttgctctacacacttcgcatttcgccggatacgcacgacaagaacctcgaagaaagggggaggatccag

SEQ ID NO: 29586 - DNA, 1958 bp, Arabidopsis thaliana landsberg
  unsure (1)..(1958): unsure at all n locations
tgataagagcgaggtttggtcatttctttgaaccaagaaacataatgtattgtaatgagagcatactacaatttctcaaattattttgccacaatctgaaatgaacacagattagtattgacaattgtatattatagaaatgaagagtttattaagaactttattaactgttttgttactacagtataactgtttctagaacagagctatattgttcttttcaaagaatgtgtcttgtgtgtgtatgcttgcttatgtgcttatcatatcaacattctatttctcttttttttttactgaaagtgctatctgaacactaaaggttgttattcagttcctctactcttttggtttaagtacgtgtagagtttgaagaggcagatgcaatttctttcagatacttctgctctgatcgggtcattcttttctgaaacattgtccattcccgtttacatctctctcttacctgatcaaaacatgtatataattcagtaattaacaatatactcggtctagaacccgctaagttcaagaaccttctaagtatataacacaagacaatagccgtggttgagttgttttaccccttggaacgcggttttcccttcctgcgcggttccctgatcaatgtatttgagagatcatctcatagttaaaactatgaacaaagaagctagtaaataatgtagttgagtataggaagataaagtttgatcatttaataacctggctgcctaaagaaggaatcttttgatgaatgatccattgagaatccacaacaccaatcttctcatgtgcaggctgtttattgaatcattaaaaagtgtttcttcttagtttcgaaaacgttttgtaaaattatacgcgtttgtgaataagttgtatttgtatgttaacctcgacgcattttcttagcgcaaagtcaagaccccaaccgtgaaccaagtcattctgaatcatatgccacacacaacgccatgcctctctagagaaaactggagccataatctctataaacctgataaggaaccgtgcaaaacttaatggatcaagagagtatgaatacttattgtattggttttgacaaatgagatccataccctgcacaaggaggtaggtgagggtcattgcagcggcctggtttctcttcgacttctctgatcaaagaatttgaaaaagaatcactatctttactttacttaaaccatggcattgtacagtttatatcaagagttaattgttttacttgtgaacttcgattccgggtattctctttgttatcttccatgtgattgattttcttgattccacagcgggttgcgatatttctagaccatgcttattcacaatcttgatgtacctgcaataatgtagaaaacatttcataacagtttctgattatattatcaaaagaagcagagtacttactcttctgcgtcgaagttttcaacgccaagatcttcatcccaaatgaatatatattcatatggtgctatgatatcaggatgcagaaaccttttagcataccaccttcaatagaaacatattcaaaacgttttatttaaagctttagatcaatggaaactgagagataaaaaaaaagtgtttgttttgttaccacttggtttgcttaggtacactgacgtgtatcgcccgtttagaccattcaaattcatcatactccgaggtttttccatcgtaatgaaacagaacaatggtgaagttatctgagaactattgagagagtaaaagatattagcttaataagagtgaaagattagaagcaaaggggaaagagaacaaaaactagagacatacttttttgacacaagcatcgatgttttttctttgttcataagaaacagntaaagcaacaagatacttaggcttcacactggtaaatcctaaagaaaaaaacatgattagagatcaagtcaatgttaagatgtttgaagatc

SEQ ID NO: 29587 - DNA, 1870 bp, Arabidopsis thaliana landsberg
  unsure (1)..(1870): unsure at all n locations
ccatttatgtaaactgatttttttaattacaagacactgtttaaatcaacggacatcgatggttgtataattacaagacactgcttaaatcaattgtcacttggtaaaagagggggaccaaagctaaaaacttggtttgcttttcgtcaatttattaacggagctccgttagcttctactttgtttttgtttagacggtgacaaacttaacggcgtttgtaaacgtcaaatcagtgcaggtggatttggttggctttttgcacttaccctaaagtaaacaaaagtgtttaggtgtgaagcaagtttttatattggtgttaaaagccaatattctacttttgtctgttaatttgggaaataagaagaaagagatatatatgtttggattaatcgtcacttccatctaactcaaatcttttatatgtttccccaaatgattacaataatttcccggatttgcctttaactaaagatccttggaaaatagaatattacccctagggtttaagaaggaatcacaagttaggagaaaagtctttgtttgtagataatgtttggtcctaactccaaacagtccatcaaatcagatatatgatgaaactcttttttctttttgcttcgaccagttagtgttgtttcaaaactaagttggccacagttactgttgttttgaaactaacatggattgatcttagttcatcatcaattttcaagcaatggaaatcagtgagtgagtcacgaaaatggaaacctatcctttatactgataggatatccaaagaacttgtgtatcaacttcacaagaacaatcattcttcgcttaaaacacaaattcagatacaagagacttgtattttcatttcaacgccttaaaacagggtcaactatgcatgatgcggaactaaagatgtattaaaagatctacaagacgtgttcctatggctaaggtacattacacaagagatgcatcattcatctacacaaacaacacgcactcttgatctggtctcagttcactttccctcttctcttcaggtactcttgcatgcaactttggtttgtttcaaatataaaaggcattccccgtatctgcgcgcacatatatcgggtttaagtacggacctagaagcgtaagtaatgatcataaaagagtatcccggatcaaacctcaactagacaatcggatttgaggattaaactctgtccaggatctacttccttctcatttactgagattgaatacttccccaggttttttatatgaaacgaaccgtcatcacccagccgtatgatcgcctgcattcagtaacccaaaaaggaaaaaaacatacacaacaaccattacagatcctgggctgctgcttctcatacaacttaaagacctaaaatacaaatagaagtatctactattgaccgacctgtcgtcgagatattttgctaccccgcttttctcttcccaaatcaatgtccacagcgaggtcttctgttgatctacccaccaaaacctatgttaagaaaaaagaaccccgatatcaacaagtgctactataattcttaagaagcttatcaaatcatacaaggaatattaaacgaataagataatattacctcaggcttcttgatatagtgttttgaatatctgccatataaaacagcgaatgcaccacgggaagcaatggctctttgcatatannnnnnnnnnnnnnnnnnnnnnnnnnngattgttcttttcatgtcttggctctgatacttggagactgcaagtgaaaacattttatggatttacaaacaagccttaaacctcttctaacatctcatacgctacccataagaaaagtttcccacatcactgcagcatgtaataactttt

SEQ ID NO: 29588 - DNA, 957 bp, Arabidopsis thaliana landsberg
ttgcgattctcattagcaaaaaccttcacaagctccccctgaaatcagaaagtagcaaactaataatgcaaaccatatgacaaaactgaaaaacaatcagcagaaaacaaaagtgtaagcacatctaacaaaactgttaaatcgtatctgtactttccaacggcgaaacttttcccctacaagattttagcatgaaatctagccgacgaaacaaaatggtgaggtaaataatggaaactaaaatccatatcaagattccagtataccacaaatcctaatcctcgctttctacagaaaagaactactcaacatttattctcattcatacaaaaaaaatattaacctttcggttcctatcatccaaaggctgaacctcaatagcaagatataaatcaacatcgtcggcagtgacaaggtaatttggctgctttgctcctgcattagaagttcgttaacgactagattcttatttccataaaaagaaataagaaacaaaattcagcaggaggggaatgtaccatcaatgtaattcacagatccatcttctagatgacatacccactgaaaattgaagaacagaagaagatagattagatgcaattcaacataagtaaggaagcgattctgttttttatttagtacgcacctcaaaattacaacttgttgttccattaatggagtaaccacaagcctgaagttcatgtccaggataaggttctcctgaaatttggaggtcctctatagctggtaacgggtcatcatccccacctgtcaacagtggttcaaaatattgagacaagtgaaagagcataatggaattagtattgttaatcattaccctcagaaaaggaggaagaaggttcttcaaaaactggggacaaaagaggagaatttgaggagctcgggtcatcaaacgcagacccatatgatggattttgagcatcgtcgaccaccgtc

SEQ ID NO: 29589 - DNA, 1481 bp, Arabidopsis thaliana landsberg
cacaaaagaaaaggactttttcgtaccaacaataccttctcgtttgtttcagtttaattagccagaggaaaagaatgtgtcattcctatttacgcaacgtaccattttcctcatttgtttggttttaatctacagattccaaaagcttctttctctctaacgttttccatgcgtttacattttcaaatctcctcaaagtgttactcgttctatccttctaacaatctccttcatgttttgtctctcgttagggttacttgcgatacaagcagccccgatccgcaacaattcaaccatttgttttatcgaatcagtattactcgcaatctcgggatctataagctcttcttctttatgttgtgcgattgaagattgcacccattcgactatatccgtccctcctttaccagtatttaggtactgagacgggaacttccccgtcatgacctcgagaacgattattccaaggcaatagacgtctgattttggtgaaacctgctggttttgtacaaactcgggggatttgaacgcgaataaagcttgtgaggcgttgttaggctgaagaagcgggaggaacgcgtaatcgctaatcaatggctcataggtttcacttagtagaacgttgctagatttgagatttccatgtggaagatcgtaggacgcaaactcctcatgcaagaagtccattcctcgtgccactccttgtatgatcttcaatcttgttgcccaagttagctccgaatgataaaccccacgatctcctgcaaattaaaaatatatatatatatatattaaaaaagatcgtaaaatatgcttctacatcaatcaagaaaagcaaaagcgttgtagtaccgtgcaaaacgtagagtagactgcttttaggcatgtattcagagacaacaagcttctcttctcgacgatagtgataagctaaaggggtaagaacgttagggtgtcggagttttccgaaccgttgcatctcagtatcgaatgcttcacgtgcaagtttgttcatatccctaatccttttcacaaccacggataatccgttggccatcaccgccttgtaggccgatccaaggctaccattgcctagcacctcagctgcagccttcatgagatcaggtaaaccaaaggagcctttctcgctgtttaccattataatgtctcccattccgcttcctggaccacctcctgcaccttttccgttatgcgatgaacctttctttgaggaaccttctgcgttactacgcttcttgctcgagtcgataggcttctttattgagtccggtacacgaacttccacgctctcttggtcgcttaggtggtctttaccgagcatccggaactcgggttgcctcttcttcttccatcttgtaataatagctaccacaaacaagaatatcaatagaaacaagatgaccataaagatagcttttgcagtgttattcttctcattccctgaccctgtagatgaaggt

SEQ ID NO: 29590 - DNA, 1898 bp, Arabidopsis thaliana landsberg
acagcttctctggtaactatatgtaccacatgcatgcaacccattctctagtttatacattaatgcatcatcatcatttcatgggttcaggatttttcagtgtagaattgttttttccagttttttttggtttagaaagtatattacacaaaataaaaataaataaaaaatcaagtcgaatctaatctagattggtttggtaccgtttgaatttagtttctatcaactcgaatgaatttcaacgataatgaaatttggttcggttcttgattcaggacatggaaataagtaaaatcatttaaaccaatttaatgataatttcagtttggtttaagttcaggtcggttatgtttatctaggactagaatattgaacatacatctttgttaatggaaaatacagcttgggtgaaattgagagaaggaaacgacaagaaagtaggagttgtgttcaggacagaaaatggaagacttgttcatggaggtgaagttagggcaaatcaagaatgttggactttgcttaaaggtggcattgtaccagatttttcaggccctgtagatatattcttcgaggtacaacactgtaaatgtgtactcacatgtttagatacatacgtatattctctgtgttaatgtggttttaatgcgaaaacagagtgaaaacagaggagcaaagatctctgcacacaatgtgttgctaaaacagtttagcaaagaagaatggaaactgaaacaggaccaacttattgaaaaggtagaaatgatctctacatataaaatttacatgtatctcatattctgatgaatgaatccatataaaatgctttggttgccttgagccttattttcttatatctatatgtgtgcagataaggaagagcaaagtgagatttgaagtaacttatgagaacaaaaccgcagtaaaaggcgtagtgatatcactaaaacaaaccaaatcatcttttctcttaggctgtggaatgaatttccggatcctacaaagccaagggtacagaaaatggtttgcgtcgcggttcaaaatcacttcattcactaatgaaatgaaatggtatgcaacggagaaagcacgaggtcaagagaactacacggtagccgattcaatgctgaaatttgcggaagataatgggatattggttagaggtcatacagtgttatgggacaacccaaaaatgcagcctagttgggtgaaaaatataaaagatccgaacgatgtgatgaacgtgacattgaacaggatcaactcggttatgaagagatacaaagggaagttaaccgggtgggatgtggttaacgagaatctgcattgggattactttgagaaaatgcttggtgcaaacgcttcgacaagtttctacaatctggcttttaagattgatcctgatgtgagattgtttgttaacgagtacaatacgatagaaaacactaaagagtttactgcgacgccgataaaggtgaagaagatgatggaggaaattctcgcctatccaggaaacaagaacatgaaaggagcaattggagctcagggtcactttggtccaactcagcctaacttagcttacataagatctgcattggatactttaggctcactaggtttgcctatttggcttacagaggttgatatgcctaaatgccctaatcaggtctgtcatcaactaccttggctaacaagaaagtctttttattcgttatcataaacataaaattggttgactaattcgattgctccataggcgcaatacgtggaagacattctcagggaagcttactcgcatcctgcggtgaaaggtatcataatatttggtggacctgaggtgtctggttttgacaagctgacacttgcagacaaagactttcacaacacacaaacgggagatg

SEQ ID NO: 29591 - DNA, 2564 bp, Arabidopsis thaliana landsberg
acatttttattttttctagggactggagatcttaaggggtaggtcttctgtccaagagaaaagaagtatccccaaggcggtaaggcaaaccgctctactgaatgtggttactggaagaccacagggagagacagagatgtttcttataatgacgaagtcactgggaagataagaactctgatttatcactacgggaaaatacctcgcggtgatcggactgattgggtcatacatgaatatagacttgaagacaaagtactggctcaaaagaatgttcctcaggtaatgacgattcgttcttgtttttttttaacgttttgattccttgcaagtttactaaacatgcttgttgtgccctgcaggatacttatgtgctttgcgttctctttaagaaaaatggacttggaccaagacatggatctcaatatggtgctccatttaagcaagaggattggagtgataaggaagaagaatatactcagaatcatcttgtagctggtcctagtaaagaaaccagtctagctgctaaggcctcacactcgtacgctcctaaggatggtttgacaggagtgatctcagaatcttgcgtttttgatgtgccgccactaactgccacagtgcttccacctctaacaagtgatgttatagcttacaatcccttttcttcttcacctcgtcatgaggttccacaagtatctctcgatggtggcgagttaaattcgatgcttgatctcttttctgttggcaatgacgactgtttacttttcgacgatttcgactaccataatgaggtgagtctgtatctgcatcatcatgcttttgatgaatcagatttcagtgttcctgaaaagaaacttgttttgattgcttctgaaactacaggtaagacatcctgatggttttgtaaacaaggaagctccggtgttcttaggagatggcaatttcagtggaatgtttgacctgagcaatgaccaagtcgtagagctacaggatctgatacagtcacccactcctcatcctccttctcctccagctcaagctagtattcctgatgactcaagaagcaacggtcagactaaggacgattaagtattttgtgctgacttatgctctttcttgctttggtctgatgctccatggaaacagagaccaaacatgtgaagctttatccagaacgttttctattgttgccatctctgtctgcacgaaagaagagacaaaaccatgaatcagtaacttgaaaccgtccagtagtggagccagctttctatgttatgtttctgcaactgcgttgtctgtagtcttagattttcatcatcatttatgtatgtggcaaagaccttcgctttaactagtgtaataccatggattcttagcttagcttcaatgataatgccattaaaattcagtcacaggctataaggatgaatgtgaacgaacgtcgtcgtttggggaaatacaatgccacaattactttgactttgcttcgcaaacatagtacgaggatgtaagtagaaattaacaaaggttatggggtcttttagaacaatgttactttccagaccagacgacaagacgacgtcgttcctcaaatagtccacgtgtctttcctaataagtgaattttagcattacaattgtcaattggggagtaaataggttgaaaatataatatggggatgtaattttacaattaaaacagttatgaggctttaatcgaatttgttgctttgctttgcgactttcatctttccgattaatcaaatccttttatcctctgaaaaatctcaactttcgaagaaaacgaaaatggcgagccttgtctacgggacgccgtggcttatggttagatctttaccggagcttgctccagcttttctcagacggcgtcaatcttctttattttactgttctcggcgaagcttcgcggtggttgcgtgttccactccagtcaacaatggtgggtctgtcagagttcgtttcgcgccttctcctactggtaatctccatgtaggtggagcaaggactgctcttttcaactacttgttcgcgaggtttgtgatctgatatagagcagaacaatattgagagtttttggggattgtaactgatggagtttttctacaggtctaaaggagggaaatttgtgctgagaattgaagatacagatttggagagatcaacacgtgaatctgaagcagctgttcttcaggatctctcatggcttggtcttgattgggatgaaggttgctttttcttcttcttctctgtgctaatttaggtgtttttccaatggtggtgtaatgaaattgggatttgaaatttcaggtcctggggttagtggagactttggtccttatcggcaatctgaaagaaatgctttgtataaacaatatgcagagaagcttttagagtcaggtcatgtctatcgatgcttttgctcaagtgaggtgattatcttcaaattcgctgaacaacttcagcttggtttttttgactctgctggtgattttgatcaattgttatgttatgtaggaacttgtaaagatgaaggagaatgcaaag

SEQ ID NO: 29592 - DNA, 1649 bp, Arabidopsis thaliana landsberg
  unsure (1)..(1649): unsure at all n locations
accactgaaaacaaacccgttctgatgacgataatggtactgcgccatgtgaatccctggcacaggcccgtaggctccatactcggtcatggtcccattaggcctcttgaccaccaagccgttggtcatactaacggacccagcactgcagctaacccctctttcaccttccaactctctgtagcggtggaggtacaacgtgaggggttcgatgtagtcatcaaaaccgagcttgctcattgcccacaagacgtcctcagcagtgatggtcttgcgctgttcccgctggcaccgctcattagcctcccctgttatgaagctgatgtactccgaaacacactcttggatcgtctccttggagtcatctgagatcttggcgtgagcaggtaagatcctccgcatgatccgtatcacgttggcaataggcatgaacctgtcttgctccctcaccgtgcactcctcctcaccaccattactggttttgttaggctggttgaattctggaggacgcatactgccctctgccatcagaaaattcgctgctaatcctaacaaaaataagaaaaatggaagttttagtgcataatggcttcgatgacgtctgcatgcgcggtttataagattgaaaagctatttcattaactgttcgtcatgaaaagagtacagacatgacaatggagggattgcagagaatggtttcgcatgcaactgaaatgaagagagcctgtgaaaagagggggtatagagaatggcactacctggtggagaaggagtggtgttgttcacggacagcttgcggtagccatggaagcctccacgttccatatctttcttgttctaaatacacgacttttgtgtttgtgaatatccctataaataataataaccaatgcccgaaattaagaagcatttgaagaagagaatggaatgagagagaagaaagagtaattggaataaagctaatagtgttggcaagtgtcagcatttgtaatttcagacctcacaagttcaacaacgtggcagccataatcgatgtgaccgaggatccttctcctcgtctcccttagccgttacaaaatcccaatcaccccaacgtatttgtcttttttattcgaaccttctacaaatacagagccgtagagttttaaattataaactacaccaaagatataaaaattaaactcgaggtaatcatctacaagttctcccgttttgcgtgccaaaaacacctaaatttaaaatctttcactcatttttccctctctcccgaggaaatggtcttgtaaaaatttccaagtttctcaaagtatgagcgagtcttgctgtgctcaggctgtttctgcccaccttccgtcactctcctgtagtacttgttcatgttctcccacttctccttacactttttcgcagatctttcgtaccctctttctttcattcttgctgatatctcatcccaaatcgctcccttgttgatccccgtcttctcttccacatcgcttctcgaacttatcaatgcctgcacttcctcttgcggccaccttctaccactgctgccactgccgcttgagtacctaaactntatctctctttctctctgagcggattcacatttctcgtctttacattgttccggaagatctgctggagtg

SEQ ID NO: 29593 - DNA, 2665 bp, Arabidopsis thaliana landsberg
tgctctcagttattccggaaaacgagagaggtagtagccttgtggatgcgtatcacaaaagattgaattctgatgatctggaaactcaagtatgttgagatctaatcactatacacgagaaaatgcattgaccatcgttctttttcggcatttacagcaattgaactctcatcttttagcttttatagccgaaagaatttggactaataaatgtctaccatagtaattattgcattcttatgatcttgtagtacgcagctgcaagagcttggactaaatgggaaatgatgactgcttatcttcgtccaaatcttgaaaacgttcaaaaggcagaagatgataaattttcattggttagtcttatctggattcgttgacctgttgctatataaagctcatacattatctttatactgatttcttaacaaccttttggctttgtgctgcaggcgtttgcaaggattgaaaatcactactttgttaacaaaggtttcttcccctcggactcatacttgctagacaatgtcgataaaatacgacatatcaagactaccattgttcaggtacatccttcatataagcactggaattgtggactccatttgtttggagattgattaaatatatcttgggattgagattgggttgggattgtttaatggacagggaaggtatgacgtatgctgtcctatgatgtctgcttgggatctgcacaaagcatggccagaggcagaactcaaagtaagcctaaagtcatttccaagttttcttcaggatcttttctatgttggtttttgctaacgcgaccaacggactacagattgtttatgatgctgggcattcggcaaatgagccaggaatagcagcggaactcgtggttgccaatgaaaagatgaaagcacttatgggatgaagtatttgatggaatgaaagctgctcattttgttcatttctttgggacctttgttcatattttcaagtttgttgctgcaaagtaaacatcacattcagagtttgttgttaacgcgaaaccgaatgttatttccatggacgtttatacccaaatgaaaaagacaatgacataggtgcagtgttttgaaacccggactataagcaccaatgtaaccaatgaatgggactctaacgaataccttagaaccatggcctttttgaaccgtttatatgcagaaatccccaacataaaccagcggtaaaaacatatgagtcaactaaaaatccttttatcaagaggattggagactatgggtgttgagtagcataatggtgaaactggtgagtgataaaggaaaagatttacagagtgcaagaggtgtgtcaagtaaaggagaagaaacttgaaccttactttgcaatatatgaatcgaagaggagatatatatatacacagtatactaaatcagagggtttatgcatgtaacaatgcgatgaggagatgtaaattcagagaattgaagacgggacaacctcgtcgtccctggtgtagccatgaaccaaaaaatcggtgcagtttcttcgcaagccgtggttataagggttgtagaatcttccgtcaggtccccgcaaataactgaatctcttcgcgttccataattcgttggttgtaatattccgagctatctgcaccagacaaccaacaataactgttatacaatcatttgcagaggggagggagaaccaaatttttactttagctgagacttccttaccatataagactgtgagattgtcaatgtcatagtcgcaatgaaaatgagtaagtcgaaaaacagaaacacggcagcatcagggtgttcaatgactatatgtttaatccatgattctccgtggtgtacctgtgggatacctctccataatcctgtagcaaaaacagatgcttactaatagtcaaatctaatggcaggattgcgagagagagttgttccagtcacatactttgaacagcagttgtgccaccaacgaatgatgttaaagctcccatgatcacaaagactaagaagtagcgtttattcttctgtgaaatgagtaagtgtatcaagataccgttaaccaaaacaatatgcataacagggtgtttcatgtcattactatatccttgccactttaattagcagagcaacaagtgaaagagattcttaccttaccaacacagttggaaatccaggggcagtgatggtcaaactgttcaacgcagcgcttacaagtggggcagtgcttagatcgcactggtctaattatctgaagaaaaaatgataattgtagttagaaaacgaagaaaatatagaggtaatcccctgaaataaggattgaggaaaaccttgcaagtggggcagagttgggaccagtttcctttccatgaggggtttttgaaattgatatcaatcaaagggtcctgcaaacatcagaagataatatgtgaatcaaacctttcagaacaaaccttacgactgttcaattgatctaaagtcggtgtctacttaaatcaggcatagttcagcatgatcaagacgaaaagcttaaacaattaacaactgcgcattgatttcgtatatatatgcatgaacccaatttagacggattgccaatctgctagacgaatgttcacatttctctcatcatggaaacatgggaagaaagttcaacttac

SEQ ID NO: 29594 - DNA, 4031 bp, Arabidopsis thaliana landsberg
aatggaagaggcagctaatgaacctcaagaacctcaggaacaacaagaacaagctccaccggtagtaagtaacgttccaacagaaaataacgtgtttcgccccgtggctcgcgttggtgcattcagtatctataacccaaccagccagaaaaatggttacagagactacaatatagttccatgtgagggaccgttgattcaagcagctaaacccgattcattggctggtaaatttctacaatctctttgtgatgaacctcaaatcccgtcaaaatgtggtcacggctgctctactcttccagctgaaactaagttctcacgtaactcggtgttgggacctgagtttgtggattatgaagagccttctgcggttttcaaccaagaactaatatctatagcaaccgatttgaacaacattgcatggataaagagtggccttgacaatgctgttgtcagagaagcagaacagagtttgaagatggataattacaattataatgatcctcgaatcaagtttactggaatgatgcctagacaagatttcttctgtgcaagaagctgaaactcaaaagtagggcttgagattcatcaaccccttttttttcttttgattctttgcgctttgacgcatatagatgatgaataagtaccagactggtacttatggatgttgttgtttctgacattttgattcggatttggtggaagaaagatagaaaacagagtatgtatcgtgtctcttattatataaaaatcctagatcataaatatcgtcattggttgttgtttcaaacttcaaatgaaattagcggcttcttgtatatattttcatgtaacaaatttttttggttcttctactgtgaagttttggttcttggattaagaagaactctaataggctaatagctatctggttaaattcggttcggttaaaaatgtaagcagttgggcttaggcccatggagtgtcttaacatgggctaaaaggctttggtttgtggtttaaagaggttgttattactctgtttcttttgctgttttttttttggttactctgtttttaaacagagcacactataagtgacaagtacaagacgaagctagataagaggaaaaatgtaagagtacataaacgagagagaagaaggaaaaaggcttgcttttctattctttataatgttatttacaagcacttttctccataattttccatatatatacaaaatgaagatcaatttacaataaaaatatcttgaaacgtcttcacttttttatccctcaaattcaccaaaatcttcaatagctgtgacttttgaggacttgattttccatgaagtggtactaaccttcaatggaagcagcataggactagtataatctccgaaactaaacccggtttcttcctcttccttaatacacaagtcaccaggaggcaagaagaaatctgaagacaaacccttcacattaaaacccacttcttcaatctcccaactctcttccattgtagtctttgaatggctctctaagctctcatcaagcctcaacaatgagacacgtgtttttcctctgtgagcgatctgaatcccatcaatgctcttataatcttggatcaatgtctcagacgtcgtttcccacaagaccatatcttcatcttccagaccggtcttgatccgtactagataagtatcctctaattgaaccaaaagtcctgttctttgaccaaaacatccccacacggtatgcttcactgtctccataccgctcttgcttctagatttaagtcccgaaggctgcgtttcgagcttaagcacaaagcattcttcgttgttaaccgccttttcacccacgcaaacggatcccgcaaataaatttgctgtggttttaggatcaagcccttgaaggaaccttctaagaggtccagaaggttcattagaagcatgagaatgtgcgagccaagggctttgtctccaatccacgttaccatcacaaccagcactaactttacaacccgaaaccacaagctctaaactccattgactcgaacctttcttccataacacaaaacctcccatctctcctccgtttccgttgttgttattgacgtgtcttatcctcaccatcttcttcttcctcttcccatttagggttttcgctgcacaaaactcagtcactcccatcttcacctttcccatcgcgtacatgctctccacggcattcaaagccatctctcctccagcggctgcagtgtattgctttactatgtacttcgccatggctgattcctattgatacccaaaaacagatcaaaagcaaaatcagaaacttgttgctcaagtaaatctgtgatacaattgtttagacgctagcatatgaaaccgtaaatcaaacgcaagattagtataataacttacaatagattggtttttaatgagattggagatgggatgatcaatcttggcctgatcggaagaaatagggagaggtatcgacggagctccaacgattccaagaagcatctgaatctgagagtcacgaccgccgaatagtgtggcaaggctgctactgttatccggcggtgaccggagcaaactagatttgacgctacgccaagcgccgctcttgttgttgtccgaacagaacaactcctccggcatcggaacttccaataccgtctctaaaccgtcttctctatcgaaattaggacaaagtgttctcatttttaactcttttagcaaaatcttagaagagaaatgttattgccggaaaaagataggtaatcgaaactttttctttcgttggttacaataaatttagaagatgaaagggtattcaatatatatattacgagagattgaataacataagctcatgggttggtgatttatatatatgaacatgtattagagaaatacagagagatgaccaaccgaccaaagccgatttgatactatttgtgtattgtcgtgttcgcacgcttcatgtctccctttgctatctaataagtaataacaattgaatatatgtattaaaaaatatatttttgggtgtagaaataatgtaaaaattccactaaaagtaaagacatacattttctttttgtcgtgaatgaacaaataaatttgaggtttgtctttcctgcttaataatatattcttgaattaaaaaactcatactattaggcttttaaatggtaaaagagaactttgtcctttggtgcagttcaatgaattattaatcgtgttcaatatacggcgccgcttggaacgcagattgaaaggttaaaagaataggccttattacttaaaacgtttttttggtctttaattgattatcaatggattacatgtctttttgttttccctcaattaattgatgcagttatatgtttagatcgcagtaataataattattaggaccaacgttacttgattttggatatctcgacgaaaacaatgattttatttatttatcaatcacaaaaagttttgtccaaaaaaaaaaaaagtcattgtgaaatctttattcatttttgagttgcttagcttaaaccggctcataatatatttatttgttaaaaagaaacgaaatagtaaactttactttcattaatcctttctttctgtataaggattgatttcacaagatcgatcatgcgtctccttttgacttctaagtacaatgtttttcactttttctcattcaatgctgcataagggtcaatgaatatcggtttaaatttaaattaattaattgacataagcacatattgtactaaaaaaaatcaaaattacgattttcaagactaaatacaaatatatctacattttaaaataacgagaaaaaagtaagtaagaaaaaaatactatcttgctttaagtaacgcctaatgatataacgataacgtgaaaagaagtataacttgcaaactgtattctctaagagaaggaaaaccaaaagaaaattaatttgtagaaaaacgacgagaaatggataatgaagagacgacactttgtttggaaatgctgagagcac

SEQ ID NO: 29595 - DNA, 3002 bp, Arabidopsis thaliana landsberg
  unsure (1)..(3002): unsure at all n locations
aagtttccctgaagcgcgcccgcaagtgtgcccagttcgaccggcgtaaacagagacacggagtgagatcatcttaccggaaattcgtcggatcgcgtcggcgtcgaggtgaaatcccggagctgaagtggaagattccggtggagatgaagcgtcggagaaggaagagagagggagaagtgctttctgtgaagggaaatgtttgatccggagtttgcagtaacacggcgtagaagaaggatgtacttcgccgccgatttgcttgttcgtcgctgtctccggtagtctcaaagctagtgaatctattgttagccgtacaaatggacatggatccatcacaaaaaccttcgagtgtttcttcttcttcttcttcggaattttgaaatttgaactttgagagattcgaattagagagaatttgaagatgaagaaggaatcagttgaatatttgtcatgagaggcagaggtcgttgttcgtcgtcttcttgatggttctcgtttttgtagcaacatgagagtcagtggggcccaggggttctatgacaattaattttgtttttattttgagattataatttttgattggtggtattgttttattttatttttaatcgcgggaaattcggcggcacaataaaacaattcatcatttttcattatttggtctttttttttaattaaaggttttgtttaatttttctaggtgaagcacaaatgtatcatgattcatgaatcttgcatactttgattataaacaaaactttttttttaatgtattatattatattatttttagacctttcttttgaatttaataagaaaaacctttcttaaaattttagttaatcattgttattgagacaatccagatattacgtgttaaatttgtattaaaaaaaaatgttaggatactaaaagtctttttttttataattaaatgatattaattacgaaagattatatactaaatgatatgtaaccgcaagaaaaaactccaccttttcacaccttattaatcgaaaatgttaacaaaaccacacaaaaatggatttggtttatttggaaaaaaatgaaattgatgggaaagagattaaatgaaattgatggaagaaacgaaacagagaaagagataagtttgcatggaggggttcacgtggacccaacgtccagctgtgttgagttgttcgttggtggcgttacggtaatttgggctaagtattgggccactaattatcatatattagtccgtcaccgtaacgccgtcaggatcgtcggcgggagagaaggaggagcgacgtggcatttcgctggctgtttttttgtcgttttccgtccgatttgttcggcgctctagatcttctgtttgttgacggcgctcgtagactggtagttggtagtggcgtttgactgttatatttataaatggtgaattagtgtataattgtgaattaaataattactcgaatcaattaactctttcgctaatttattttaatgattcacaagacaacactaatcatatttagaaactttcttcatgttcaacaatagatagtcagactagttttcaatctttgagtctctctggtccgaaagaattatagacataggtccaaaactatagtactaggcgcaaaactttttggaaaactaaaataacacaaaggagcacacgttcagcatgaacatgatgttagagagaccgaccatgaaatgtgttggcttactcccaaagcaaaagaaaaactttagattgaaactaattaatgaaaatttgtgtttagatggtaagactaaccaagaataaactccaatcccgtgtaattgttaaaacaatatgatgtaagtacatagtatcacaataataattgcaattatatataggcatgcaagactcattcataccatatgattgattcttgtacaatacaatagctcactggaaaaccaaaagagaaaacgttttaactgaaatcagtgctaaaacagcaagttcacgtacatatccacatagttgacttttatttttataatagaaaccttttcactttctttttgtttaaggataaacgaacttgtatatgaagcttcttttaatgaggtgaaggaattgattagcggaggaaaaaaaaatcattactacttaatactatcaaccaaaaaaagagagaacaagtcgatatttgtgtttaactgtaattatatgtcttgtctactatgttggtcatggtcgaaatgaattgttaccaaacatgaacactatatatctcatatttgacattgcgtaattcatttgacgaccctagagtttatgattactctaggtaatttcaataaacttatggtatttcgatagttaatatattatgttgttcgataatggctcctcccattaaagaggagacttggttattaaaaattagtgatttggttctttccgtattacggccacatgcatgtaatatgctacgaaatcctttatacattaattgacgacaaaaattataaagaaaaatagacatataagctcgactaaatttatggtaattcgcatttcatatagaattttacattttattccgctgtttggttagagtaattaggacttatgtaccaatttagaaggtctatatgttacgttccatactaatattgtaggtgataaaatgcacttacctctcttgatgttcataagttataggacaataaaagccttttggtaaagaaaagagagagagatactattattgaatggattattgcaaaactttagtaccctaattgaacgtactatttgcttcactgaaaatgattcattgccatccataatattcttttgatatcttctgctctaacttggatatatgttagccaaaaacaataaaaacatctcgatcacgtgcaaagaacttgaaatagatatgtctctctattntttaatgtctatgaaaggacgtaacaagtttctcttctatttcgcatttggtaatacattaatgttt

SEQ ID NO: 29596 - DNA, 430 bp, Arabidopsis thaliana landsberg
tttttaccttgcccatctctttggctttcgttccttaactatttctttctcttctaattcttcctctttgttccttgatgttttcccgtttggccgcttaccctttagcgagggtcactacactgcctgttcagggtttgccacggtgtttacctgcttaacgttcacattctctggttccatgtcttcaatgggttaagcccccgccaatttcaccagttaggaacttggctgccaattttgcaccgaggctacgacatctagaagtgtgatggccgtagctcttgtgcaactcgtagtactcctgctcatttcccgtgggttgatccttcatccacgtccttggccatggcctcaccctcgacctaggggtgtatcggcttgtgattgtgggctccggagaagtttcgcccttcatggtgtacgaatg

SEQ ID NO: 29597 - DNA, 2414 bp, Arabidopsis thaliana landsberg
  unsure (1)..(2414): unsure at all n locations
atacggaaatgggtacagagaagatgaaactcaggagtttcttgttggtaatcttgtgtgggtgatgactaaatacaagaagtggtggccaggagaagtggttgattttaaagctgatgcaaaggagagctttatggttaggtctattggtcagagccatcttgtttcgtnnnnnnnnnnnnnnnnnnnnnnnnnnnnnaaggagagctttgagcaggtgttgaatcaaagaaacgataacgggtttttcgatgcgttacagaaagctatgtccttgttgagcaactcgttgaaacttgatatgacttgttcttgcattgctgatgggaatggaattgtgtcagcccaaaatataacaactcggaagaacaagcctttgatactgcgtgaattctcagtagatcggttggaaccaaaagagttcgtcactcagctgaagaatattgcgaaatgtgttttgaatgctggggtactcgagtcgacagttatgcagagtcggttatcagctttttatactctctttgggcataagcagataccaatggcccaactacacgaaaatgagggtaggaaaagtttcactgcgaagatgagtgacagtaagttcattggttctccatccatttgtgcaggtaatagcaggaagaggtttcggaaagaatggtttaggaaatttgtaagtgaggttgataatgtatctgcgagagacgatctagtaaatgtgcctccttctgatttgatatctaaactcaagctgcttgctgtgggctacaattgttcggaagagactgaaaatattgggctctttgagtggttcttctccaaattcagaatttctgtgtatcatgatgaaaatgcttacaagatgcagttggctaacatggctggtttcaaggatttgatgttagcaacaaatgcaaatcgtggtactgttcagaaaaccttaaagtcaaagaaaatagggaagtcaaagatggagcccctcaatggtgtttcagttgctgatactgagcagaagacctttgagttgcagatatcaaagaagtccaacatcgaatctcttaatggtgtttcagttgctgatactgagcagaagacctttgagttgcagatattagagaagtccaacatcgaatctcttaatggtgtttcaactccaaatattgaccacgaggcctccaagtcaaataattcagggaagacaaagatcaatcatatcattggtcactcaaattttcttagttctgttgcaaaggtgcagttggcgaaagattttcaagacaaactgttggtacaagctccagacaggaaagctatgacggcagatacactcagcagacctgctgctatacttgtaccggacctgaacagcggaggcaatgctttgggtactgcagagtttgaccatatgcaaagacctgagactttaattcagcataatgtctgcccacaagaggagaagacaccaagatctacgatacttaactttcaggtgacagctcatcagggagtctcaggaactcagtttgtttctagccagccaacttcatacaaacacttcacgagtgcagaccttttcacttattcagggaagaaaaagagaggaaggaagaggaagaatgcagaagagcttccaatagttgcacatgccagtgccactactgggatacctgacttaaatggaacaaatacagagccaactttggttctgcctcaagttgagcctactcagcgcagaagacgtcggaagaaagaggagtcacctaatggattaaccagaggaatcacaattctcttcttgaaattttcctcccaagtgtcaatgccttcaagggacgacctaacctcgacattctctgcgtttggcccgttggattcttcagaaacacacgtttcagaagaatttagtggtgcacaggtcgcctttgtgagtagtgcagacgcgatagaagcagttaaaagcttagagaaagctaacccatttggtgaaaccttagtgaatttccggttacagcagaaactgataaccgttcaaaggaacattgccccacgaatgccggtaatctcacatgttagtccagttctgaaaccgaacaatataccaacaagtatggatgcaatgaggcagaatctgttgatgatgacagcaatgctggagaaatccggggatagtttatcaagagagacaaaggcaaaactgaaaagcgagatcacggggcttctggaaaaggttagttctataccgagctcttcttcttcctgaacaatccctaacatacatctatgcggatcatctcaggctatctaatggaccatatgttgtaacttatgtatcccatcttatgaattgggctcttcttgtttcagtctttagtttgacggtggttctaggctaagattagataatagaagat

SEQ ID NO: 29598 - DNA, 2425 bp, Arabidopsis thaliana landsberg
  unsure (1)..(2425): unsure at all n locations
acgatgttgcatatgtacgtgacttgtgggtgtttgattgaagcttggagaatctttctggggatgataggttttgatgttgttgcttggaattcaatgattatgggttttgcgaaatgtggattgattgatcaggcgcagaacctgtttgatgaaatgccgcagagaaatggagtttcttggaattcgatgattagtgggtttgtgaggaatggtagatttaaggatgcgttggatatgtttcgagagatgcaggagaaagatgtgaaacctgatgggtttacaatggtgagtctgttgaatgcttgtgcgtaccttggagcaagtgagcaagggagatggatacatgagtacatagtgaggaatcggtttgaattgaatagtatagttgttacagcactcatagatatgtactgtaagtgtgggtgcattgaggaaggtctaaatgtgtttgagtgtgctcctaagaagcagttatcgtgttggaattcgatgattcttggtctagctaataacggattcgaggaaagggccatggatttgttctcggagttagagcgttctggcttggaaccagattcagtcagcttcattggtgttttaacagcttgtgctcactccggggaagtacatagagctgatgaatttttcagattgatgaaagaaaaatatatgattgagccatcaataaaacactatactttaatggttaatgtgctgggtggagcggggctcctcgaagaagcagaagcattgataaagaatatgccggtggaagaagacactgttatatggagttctttgctttctgcctgcaggaaaatcggtaatgttgagatggctaaacgagcagcaaaatgtttgaagaagctcgatccagatgaaacgtgtggttatgttctcttgtctaatgcttatgcttcttatggcttgttcgaagaggcagttgagcagaggcttttgatgaaggaaagacaaatggagaaagaagttggctgcagttcgattgaagtggattttgaagttcatgagtttatatcttgtgggggaacgcatcctaaatccgcagagatttacagtttactcgatatcttaaactgggatgtctctacaattaaatcaggtttcgctgaattgtttgatgctacaactaggattggtttcacttatctggcagagaaataagcaatttgatagttttggagatgtagcggaagatatcattttaggtattatactaatttatcatattgttatttatacaaaatatttcttctcgtaaaaccacaccttgattgtcctgttctacagttttcttttaggtcannnnnnnnnnnnnnnnnnnnnnnnnnnnnatgtgaatacaaaaccccaaaagaagcttcgtaggcttggagttgcagttcttgttactgaagaagtcagtgggtatggaccagtgctgaaaaattgatttatataaattatatctactgtgtttttcttccggaaggttaacgaaatggaaaaaaaaaaatgaatcttatgctcacctgttagatggaaacttacacgttggagtgcctgcaatcaaagttcacagatataagaagaagaacaacaatcacaaattgaagatgattatgaaaaatcagttctgacgtatatagacactatcacaatggaactctaggaattttgatcagaggttggttttattttttcgaatgtaaagtgtttagtattactcgggtcctgaactgtaagcacagcagcaccattgaaatcgcagtttctgggtataggattcttctggtaatagtcattgaatgcataagaagcttggcttctgtaattgtcgaggtcttgacaacggccacccttttccaatggtgagcaatcagcaccatttttgcaagcccattttaggctcgaaatcactcttctaaagtaggcatatggattttccatgcaccagagtgtgtatgtaggtataatgcttgtgttctgctgtgcagcaagtgtaccagtcgcttctgatgttcctgctactgaaactagtgcaaagagggttattaacatcttcgtcttcattttctgagaaatttcttgctttttggtagaaaaataaatggagaaactggtgatgattatatttgatgatgatgatttgttgtctatcatgtacatttgcatgtatttatatcattgcctggagacgtatttaaagcctatgcatgtgttgaaccaactattgaaatttataacaggcatgattatatgtctttatctctaattaatgccatgacatgctatgcagtttacactgaccatgtatagtgcctctgttgtgtgtgatcattacaggaaagcgtcctaaacggaatctttcaaagaaacttcatcgagaatgttggtttggaaacgcacagcacaagttattgat

SEQ ID NO: 29599 - DNA, 4606 bp, Arabidopsis thaliana landsberg
ccttgttatgttagtttgctgtattgttcttctttttacctttgatcagttcctatgaacaaggttcttttttttacgattcaatagcttagtaacttgcttatgtggtttacttcatgcagtaaagaaaaaactgggcacattccattcagagattcaaaactgacacgcatacttcagtcttctttgggaggaaatgcaagaactgccataatttgcactatgagtcctgcgagaatccatgttgaacaatcaagaaacacactgttatttgcaagctgcgcaaaggaggtgacaacaaatgcacaagtcaatgttgtcatgtctgataaagctttagtaaagcacttgcagagggagttggctaaactggaaagtgagttgagaagccctagtcaggcttcaattgtttctgacacaactgcattactgacggagaaagaccttgaggttgaaaaggtagctggatgtactccaatcacccttttgaaatcttagaaaataggtagtaccatgaattcactattatagcaatcatcttccttggtattgcagctacacttaccttttccttgcgtttatcgttttttattgctcccaatccaagtgatctatagtttggaggtttgagttatgatctatcctttttcctacagcttaagaaagaggtattccaactagcacaacaactagagcaagctcgttccgagattaaggatcttcgacgaatggttgaagaagaaaaaaaccaagaaaaagagacgctatcaacagaaacagaagggttaaatgtatgttaattcacttgttaattttactgagcgtggatatatatatccttttactgcttattgattcgcttttgtccaggttctgatggaacatcaataccccaagctgcgggtgcgcaggacatgggactctgagaatacaacaccactgagccctatatcagctcaccgttccagtatatctccacgatcaactgaatatagttatgaagagaatgtctttcagctatcagatttcaggatagattctgcatcaagtagtccgcaacagcttgcgtttgtaactcctttccttaaggttccacttgatgatattcacgtgacagatactgtagaccaatctcatgttcacaaagaggaagctatagaagaacctcatgttcaggaggaacggttttatgaaatggctgaacacactgacggaaattctgaggataactgcagggaagttcggtgcatagaaacagagaagtcagatattagtataggtccagtggaaaatatgccggagagcagtccagacaaatacgaggctgtaactgcagaagaaccagtatctgtgacagagccaaagaacttacaacatccgacagaagaagcagtatgtgtgacagagacaaagaacttacaacatcccacagaagctgaaaacgaagaagaagaagaagaagaaagagtaaaggaagtcagtggtgcttctcctgaaccaaaacaagaaagcaacctcacaaaaaatcctccattgtgtgatttggaatgttcacctgatgagtttgatacaagcatgtctaacctgagtagaatctcaacacctccagcccttatcactccctctcctgaaaagcctttctcttggattatggagagagattcacaacttttcagaggaatgaagctgactagaagtcgaagctgccgaccaagcttattatcgagcccttcctcctcttggttagagaaagatgctgatacaccgccaagctggtacgacaaagaatttatcaaaacagctgagagaaacttgacaatgtgcgacatcaagaaccagagattgttgcaggatgagtttagtgggaggagcatgccaacaacttggttcgagagaagcttgagtgacactcaaacggtggatgctgcttcacatggtgtcagcaacgaaatgtcgccaaatgaatcaccatttcggccatctgatgcttctgtgtttgagctccagacaagtggtagagcttcaataagccaggacagaacagaggagactgctgctcaaaaagacaagcaaatcattcatcgatcggttagttttgctttacttgctttcgataaatcacctaattagtatgtgtgattgatttgacatgtgtgggcagatggaggaaagggaacagaagttcttggcctcgaattcaacgaagagtttcaaggacgcagcaatggacccaatacaagactacttagacacggccttgaattggccagtggagttcaagaggctacagagggagataatagagctatggcacgtgtgtaaagtctcaatggcacacagaagctacttcttccttctgttcagaggagatcagaaagattgcttgtacttggaggtagagctccgtagacttaagtacatcagagaatctttcgcccaaaatagcaacgatggcaacaatatgaccctaatctcctggtaaagtcacattgtatctttttttgttacctcgttaatttttggtttagtaagacactaaagtaatgtaatatatataaaaacaagcagcacgagggcattgacgagggagaggtataagctgagcaagctgatgcagaggaaactgtcgaaagaagagagagagaacttgttcttgagatggggcattgggctcaacacgaatcacagacggctccagctggcgcgtcgtctctggtcggattacaaagacatgggtcatgtccgagagagcgcctccctcgttggtaagctcaatgggttcgtggacatgaagttgacttccacagagatgtttggcgtcaactatgctttcagaccaccacgtcccaagaaatctagtctttggaaacgcagcgttttgtccctctcctttttgtaactactgtatacaaagaccacgaaacaaatcttaccaaatattttgttctctctgatcctgttgatttaaatcgtctctcacaattagtgaatttgaaggtagtggcttcttttctgtgattagcgcatctactctgtttctttaccaatcttcgtatctcgtatatctgattatgatcgtcgtacgggaccgtttaatggcgttacgattattaatgataggcatggaaatggaaaatcagattttgatgaaaccaacctctaaagtttcacaaaaataaaacgttaccctcaaaggaatataaaagctataatccctaaaacagcataaaacctaaaggcaacaacacagagtcctttgggaaagaaacaattcacgacagttatcgttatctatatatacatttttggaggggatttttgaagataatgttgaagatttgagccataattcaacaattaattcaaatgggtgggttttacccggtttaactctgttcggatcctgaataacatgtttaattctgttctgatattggataacattaatttttggaaaagttacctaaaaactaataattaaaaacgaaaattaatgatttaattaccaaatttaatataaacaatatctctaaactaaccatatttcttatttacgttaactaatttcctaaaatatttttacctaatttaaacataaatatataattcttctttcaattttatttgatcttatactttatttattttgaatttatataaaatatatatagttaataaaatattatattttttctgaatatgatgtaattcaatttttttaaaacggacatattttattcaacctatgaagaaataatatgtgtataatgtctcacatcgcttagaaaaattggacaatggttcagacccatattataaaaggaccaaaatgattctgattacgaatgagcaggaagcttgatttatcaggcgtccaaaattaaaatagttatccgattttactcggattttttattttaaagaattgaaactttaaaatgtttcaaaaaattataaatattataactttatcaaaagttaaatattataattttaaatttttttataaagtttatctttaaaaaatgctttaaatatttataattttaaaacttataaagttttaagaattataaattgaattttacaagaaatttaacattataaatatataaaaaatttattaatacgagacgatatattacagaaaaaatcttaaatataacaatcaaaattcaatgatgaattttgggtcgatattgtatttttataagttccaaattttataatattgaaatttataagaaaatgacaaaattatgtttaatttcacgggactgggttatatggtaggacgggtttgggtggataataattacgattttagaatgtcccatatcgcttaaaaaaattggacaatggtcaagagccatactatttaaggaccaaaatgatttcgattacgaatgagcatgaaacttgatttatgaggtgtccaaaattaaaatggtttgtttactagggttatttattttaaaaaattgaaactttaaaaagtttaaaaagttataaattaaatattacaataaatttaaacaatataaaaaatattaatacgagacgatatactgcgagagaaatcttagatataacactcaaaattcaa

SEQ ID NO: 29600 - DNA, 2680 bp, Arabidopsis thaliana landsberg
gcaaagagtttaagcggcatatacgcacagaatatggtaagcttgtatctttattgaacgtgagtttctgtcttactaacttctttgatattcacacttgtcttgatcatatagttttttccttcctgagtagttcaatggtcactgaatttctaccgtttgatattcttacatgaagtttcaaaagttttgttttttttatcttcaaggtggatgtgtgatcagtcttcttggcatcattctagctgatgtttttttaactcaagttatctctgtggtggcgcaattgtgtttactatgtagactgttttaagttcagtttcttgtgctgtaatcagcttatgaattctgctcaatccctgtttcagtgatgatcaatgacttcgtcaatgattttcctcatgtatttcctttgtgtaggcatatgcgcttattgcgaaaggagtgcggtttgtctgctctaacacgactgggaaaaacccaaagtctgttgtgctgaacacacaagggaggggttcacttaaagataatatcataacagttttcggcattagtacctttacaagtctacagcctgtaagtatatgtgtatcagaagattgtagagttgaagggtttctttccaagcctggacagggtactggacgcaatttagcagatcgacagtatttctttataaatggtcggcctgtagatatgccaaaagtcagcaagttggtgaatgagttatataaagatacaagttctcggaaatatccagttgccattctggattttattgtgcctggtggagcatgtgatttgaatgtcacgcccgataaaagaaaggtgttcttttctgacgagacttctgttatcggttctttgagggaaggtctgaacgagatatattcctccagtaatgcgtcttatattgttaataggttcgaggagaattcggagcaaccagataaggctggagtttcgtcgtttcagaagaaatcaaatcttttgtcagaagggatagttctggatgtcagttctaaaacaagactaggggaagctattgagaaagaaaatccatccttaagggaggttgaaattgatcatacttcgccaatggagaagtttaagtttgagatcaaggcatgtgggacgaagaaaggggaaggttctttatcagtccatgatgtaactcaccttgacaagacacctagcaaaggtttgcctcagttaaatgtgactaagaaagttactgatgcaagtaaagacttgagcagccgctctagctttgcccagtcaactttgaatacttttgttaccatgggaaaaagaaaacatgaaaacataagcaccatcctctctgaaacacctgtcctcagaaaccaaacttctagttatcgtgtggagaaaagcaaatttgaagttcgtgccttagcttcaaggtgtctcgtggaaggcgatcaacttgatgatatggtcatctcaaaggaagatatgacaccaagcgaaagagattctgaactaggcaatcggatttctcctggaacacaagctgataatgttgaaagacatgagagagtaagtaggctattgtagttaaaaaaatgtcttagtaggatgctaattgtttgtggctatttcttttgttagtttatctcctaaaattactgttattcaaccactatatcatctacaggaacatgaaaagcctataaggtttgaagaaccaacatcagataacacactcaccaagggggatgtggaaagggtttcagaggacaatccaccgtgcagtcagccactgcgatctgtggccacagtgctggattccccagctcagtcaaccggtcctaaaatgttttccacattagaatttagtttccaaaacctcaggacaaggaggttagagaggctgtcgagattgcactccacaggttatgtatctaaatgtatgaatacgccacagcctaaaaagtaagatttctttccttcttcttttgtgtagtgtgtttctatttgcatttagagaaatgggattctttaaaatgacaactacgtctacaggtgctttgccgctgcaacattagagttatctcaaccggatgatgaagagcgaaaagcaagggctttagctgcagctacttctgagctggaaaggctttttcgaaaagaggatttcaggagaatgcaggttgctatctttttgactaagcgagcaccgaaagatcgatagattaaaaaaatttcattctactctatcctggctcggtcgagaaatatatttatctgttttttctgtgtgataggtactcgggcaattcaatcttgggttcatcattgcaaaattggagcgagatctgttcattgtggatcaggtgagtcttcatatatgcatgcttccagagcccttttttcctccttcgatttgtttagttattggttgagttgtggaaaatggaagtttctatcatttcagagttcttccctagtctgaattttgaagaaatggtatagactagtgattgaattttatggccagcatgcagctgatgagaaattcaacttcgaacatttagcaaggtcaactgtcctgaaccagcaacccttactccagtgagtttctttgtgagatcaatctagattcttgattccattacactgctttcactttttcacatcaaattccccggcggcagtc

SEQ ID NO: 29601 - DNA, 2008 bp, Arabidopsis thaliana landsberg
agaaccgtctagtcatagatcagatcacatcagtgcttctttatagtcgccatggctgacagatatcagagcagagtatggaatgctggatcctaattcgcaacgatgaatgattgtctctctctcgattttttttttggccagctccaaggggttttctaagaaacaaaaaggttctgtgaacaactcgaaggtattcaaaagcgagagagagtgatcttggagggaatgatgatgtgttgatgacgaagatggagttggattaaagaaatctaatttcatgattaattatttaatataacaaaattagtcttctccaatgctcaaaccggagacctaagatgtacactccctttaaaaggtactgataaaaaaaaagttattaattgcatgttggcattaaatagaatcttcctctagagttcaaaacttcacaataataaaatcaatgcatatcaaagcatatgtataagatgttagctaaccacaattgttattcatcaacggtcaggatcacatcactcaaaatgcaatattcagatggtctttaattttgtgtaaatatacttagaaagaaattcacaacacaaataaatgagaaaaagcaaatcagtaattaaccttaaaaaaatgcctaataaagcgtcattaaagaataacccattatcgcctgtcactcacttttaatcatcaaaacacgccacgtgccaaactctccactgaatcaaagtcgccaaacgcttcagtcgctatttcatgatcgacacgaaggctctcttttggcgattgcaaccaccacctaagaagaacggctacgtaatttgactgtacgacttgcgaaaaaagtcgaaaccttttaacgaaccagacctaaaaatgaccgctacgacaacattaaagagtttcaactacttgtctttaattaaccatcgactcaaccacaactcctacgctattctctcctctcctcttcttcctcgatcccacccagcttctacttcgttttccaattctgggtttcgattcttccaatctaaccatctcttctgtaagttttcttctttacctttgtttggtttttgcatgttacatgtttgacgaaatgtcttaaagattcgtgctttccatatattaacattgatgatccgtaaaaacctgaacacgttgttgttttgatctgaatttctattgaaaattttgcagcatctccaaggaactcaatctgttctttttttgtacatgtagtttctatatattaatctgaattttatctatgtaatcaaaatgttgcagcttcacagtctggttcactcatggaagtgtttaaagcagctttttcagaagcgtctaattcttgtgataggattgcgattaaagccgatggaaagagttactcttatggccagctaacatcgtctgctttgaggatatctaaattgttcttaaaagatgatacgacaaatgtatggtttttggtttgaaattgtagctactatatctactacttgaagctatcatacagtttgtttacagctttatggttattgactttttgtgtcttctataaatttcgtagggaggtcaagaaactaagaagtatgaagggtttggtagtctaaaaggagctagaatcggaattgtggcaaaaccttcagctgagtttgttgcaggagtcctggggacatggtttagcggtggtgtagcggttccacttgcactcagctatcctgaggctgaactcttacatgtcatgaatgattcggtatggaatctacttgccttcctatttccttgtgctttaatttcggctcaatcttcaggattcgtgtggtcaattgttaggtattcttgatcttatttttgtgatctcagaattttgatccaagctcttggtttttctagcattaggtctttttccatagactaaaaagggtactctgtagaacaaagtagaaaatattctaaaaggcagaagttttctggtttgctctgttttctaccacattca

SEQ ID NO: 29602 - DNA, 2388 bp, Arabidopsis thaliana landsberg
tgctcataaactgtaaaaatcgttccatgctgaaaatcaggcaaaatatccaagatttgcatataattcttaaagatcaaaatctttgagtgtcgaacataaatttaaatagcggagactaccctggagagggagaaaaaataaccatataatccggtttggatacattgtaaaattttaattcaaatttagtggcgagtccgagtcatctaaaaatggttgggttccattcggttaaattccaaagatattattccacttttatgtgcttccctgttatacattcgatatattcaatgcctactgtagcctattatatatggtataatacatttcttactcaacgtgtaaaacgttacagagatttccttccttattaggtctttatttttaacaatataatcatttgataaagaatatgtaataactatttgacaatagaaaaaaacatctgcaacatataaaaaaaaactaaaatttattgcatcctgcttgagattttatagtgagaagaacaaccatggagttcaagctcaacattccaaatacaatcattaaaactctacagactatagtcttctttctctttgttcttcttgcattccaaatcgcggaagccgagattcaccaccacactttcaaggtattgattgtacaaaattttattttgaagatattaagactggattaaaaaaaaactgactatgccatcgtttttatctatacagataaagtcgaaagcgtacacacgactttgtaataccaacaagatattgacggtgaacggagaatttcccggaccaacgttaaaagcctaccgtggtgataagctcatcgtcaatgtcatcaacaatgcaaactacaacattactctccattggtaactactctcttgtgtttgtgtcacactttgatttcgtgttgactaatgtttatatgatgtagagaaacatgtttatcgttttaggcacggagcaagacaaatcaggaatccatggtcggacggacccgaatatgtgactcaatgtccgatccgaccaggagagagctatgtgtatagaatcgatcttaaggtcgaagagggaacgatttggtggcatgctcatagccaatgggcacgtgccaccgtccatggagctttcattgtctaccccaaacgtggctcatcttatccttttcctaagcctcatcgtgaaatcccgctcattctaggtacactagctagtatgtggatgagattagtacatgattgcgttacatgttgtgatatatagtctaacgttacgttgacaattgataggcgaatggtggaagaaggaaaacataatgcatataccaggaaaagctaataaaaccggaggagaaccggccatctctgactcatataccataaacggacaacccggttatctatacccctgctctaaaccgggtaagtttcaacactacaagctcaaatcttacaatcaaaaattcatatttttctttataattccacaacagaaacattcaaaataacggtggtgcgtggccgtcgataccttctacggattatcaacgccgtgatggacgaagaactcttctttgcaatcgcaaaccacaccttaaccgttgtagccaaagacggtttctacttaaaacatttcaaatctgattatctaatgatcactccgggacaatctatggacgtcctcctccatgcgaaccaacggcctaaccactactttgtggcggccagagcttactcctccgcatttggtgccggttttgacaaaaccaccaccacagccatattacaatacaaaggtgataccttaaaccggattaaaccgattctaccctatctgcctccttacaatcgtaccgaggcatctacccggttcactaaccaattcagaagtcagcgtccggttaacgtcccggttaaaatcaacactcgtcttctctacgcgatctccgtgaacttgatgaattgctccgacgatagaccttgtaccggtccgttcggtaagagattctcttcgagcattaacaacatcagcttcgtgaacccatcggtcgacattctccgagcttattatcgccacatcggaggcgttttccaggaggatttcccgagaaatccgccgacgaaattcaactacaccggtgagaatcttccatttccgactaggttcgggacgaaagttgtggttctcgattataactcgagcgttgagctgattctacaggggacgaacgtgttggcttcagataatcacccgattcatctgcatgggtataacttctacgtcgtgggttcgggttttgggaatttcgatcgtcgtaaagatccggtgaggtataacccaggtggtccccccggaggagacaaccgtcggtgttcct

SEQ ID NO: 29603 - DNA, 2538 bp, Arabidopsis thaliana landsberg
  unsure (1)..(2538): unsure at all n locations
agcagccagagcctccgtaacaagcagagaagacacatgcttactacaggtagagtgtttagagggacgacatgcgggactgggtaacaaagtccatcctaatcctgcagtttgagcttgggaacagtacgctgcatcagagttgataatcaaagtggagcggatctcttctcttgtcttatgctgtctggtcgggaagagctgaggtggaggcataagtttcttttgttaagcacactaccactcttttgcatccaagatggccttaatcatgatttcctgctcagaaaacataagcttttcaaaggttagcttgtttctagctgtccacagattccagcaagtccaagggtaatggggtccgctgcctaatcctgtgggaggaagacaaatcttctttttccaccaatccaagctttccttaacattagagagtggaggcaattgagcactatcgataggtgccaatttccatactctctgggcgaagggacaagcaaaaaggatatggtcaatagattcaagctctctgcatttactgcaggaagattcaacaaagattttcctagacataagctgttctcctgttggcaggcttcattaaaagctttccataagaaaaatttaactttcggagaggttttcacggaccaaatcacactaaaccagttgacggttttgttgacagatcctttagagcttgtcgtgccacatgataactggattttgttgagtagtatccatccggattaagtaaccagacttgtctatcttttccctgcagttggcttggtttgatactgagaatatgatctgctagcactgggaaagttcgcttgatgtttccttcatcccataccaaagaattagagataaagaggtcccttactcgccagtttcttgaggtcagaggggctggtcccataggctgagtctgctcattcaatggaatccagcccagttgtttcacaagaatgtctcttccgatgaggatgcttcgccaaccatgagaacaagattttacacaagtcacctgtaaaatactttcctcatggcagtacttccctaacagaatttttgagagtagactttggggattttgcagtattctccagcttatcttagctagcatggcttcattaaaagcctgaatgtcctgaaagcctagccctccatccttttttaaagcagtcatcttgtcccaggagatccaacacatctttttctgattgttggaatcccaccagaagcgagtgagggtggattgaattctcttgcagagagagacagtggaagttggaagcaggacatggtatagttagggattgaagccaaaacgctttttagcataaccatcttgcctgctccagagaggaatctgctagaccaactgattaacttttgtcgaatgcgatcaacaatggaggagaacagatctttcttctttctcccaaagtgttcagggagtcccaaatacttacccagacctccatcgttgataatactcagccattgtttgacctgaagctgggtttcatatggggttctcctggaaaagaagacagaagatttttgggtgttgatgagctgccccgaaacatcttcatatttttgtagaatggtcaacaaagcaatgcaatccttcttctttgttttgcaaaagaacattgtatcgtctgcaaatagaagatgattgactctggggctgtgttgtgacatgtgttttgaaacctgagcttgacgacacaaacctgataacgcctcaccacacagaataaagatataaggggagagagggtctccctgtcttatacctcttgatggaactactttttccaaaggctggctattgatgagaaaggagtaagtcacagtagatgtgcactccaagatccaatcaatccagcagcttgcaaaacccatcctttgaagaatcnnnnnnnnnnnnnnnnnnnctactctgtcatatgctttagacatacccgtcttcacagccattgaacagttcttaatagcacccgaggtcttaaggaagtgaagcgtttcatgcgttatgagtacattatctgctatagctctcccagctagaaaagcagattggttgtcagacactagcttgtggagcaaaggctttagtctctgggtaagaatcttggagattattttaaagtagacattgcaaagtgcaattggtttgtagtctgctactttctttggtgcttgtattttgggaatgagcctgacaaaggtctcattaacattatggtgaagtgtgctggttctgaattcatttgagagagcaagtcccacggtattccaatttgtttggaagaaacaggctgaaaatccatccgggcctggagccttctccgaatgaatgtcaaagagagcctccttgatttcaagtaaatcagggatcttttgaagttgcagattatcttcctctgagattttaggttgaatggcttcttctacacttttctggacaaggacaggatccgggttggatgaagtaaaaagattctaatagtgctcgac

SEQ ID NO: 29604 - DNA, 8359 bp, Arabidopsis thaliana landsberg
  unsure (1)..(8359): unsure at all n locations
ctatatgttacaatcaaataaataaatgggtattctaagtctttaaaaccaatggtttcattcatcaatcaatcttctatttcaacaccaccatcgttttcctcctccgttgtgttctccgccggtgaggtctcttctttaaataattcttcactccccatgagcttttcatatagctaccaaatccaatatgataacattatcaaaaccataacttaatgagataactgctgtaaggagcttctactaaccttcacggctgattccactatctcattgtagttcaagtttccatctggactaggcatggaactgatcgtacctccaaattcaccctgatccaaatcaaacttttatttagtgaaaatgacattaccaacgtcgaaatgaaaaggtaaattcccaatcacattttccaccttgactagctcttgcacgtacagtgctctccagagtagaataggttttgtctcagaagtatcattctcaacaacggaatcgctttgacgattctcgggaacaggcaaactgatgagattactcatggctgataatagcgcctttatcccttggtcatcattgtcgcacaaagttgaaagatataaaacatgcctgcagcagcaaatatatatggcttagagaacagttaaagctaagcaaatggaaagaaacagaactaaaatgggaaaagatcatcttaggctaaaccacaacttacatgtcagcaggacaaaccgctaaaccactaccaagctgcagaacccgaattgcagttagctgttctggaaacaaagctaagaggaaaaaactattaatgttagaaccttaaaaacgcaaaagacgatatacatgtaagtgaaacaactaactagtgggtcttcaaaaattagcttacatttaggtggataaacgacaagagcgtttgatacattagctttcacagaacctctaatgacgcatactcctcttgcaattttctccttattgatcatcgactttgggacaagaacactgagagtttcattttgctgatctgtcaatgacgacagagactctaatccaacagtaacacatggatccagaatcaacttttggctgaatatctcttgaccagaagctaatctaacccctttgtaacccccagtttcctgcaaaaagagtttaaaataatcaagtaagaatcctttcggtcaactaaacttatcttatgctacaactgtcagctaacttgccttgtctaaaagcagagcagtaataggcatccggagaacctgtgaaaacaatgaaagactaaataagtaacaaataccacaacagcaacacagtacacaatgcagaaaattgttccaaacgtacatagatacatcctttgacagcagcccgacgacaaaaggcttgtggaagttctccttgtccataaattgggtatatcaacgccccaagtgcgttaggaaacctaaggtagagaatcaaaagctaaattatactcaatataaccaatgataatgtaaaccaataagaaagatgatcacaaatgtgtaagagccaggaatgagaaaatgatgaatgacctgcccatagatgtgatgtatagagccaatcgatctatcccctctttggtcttgagtaaatgtctacaagtttccgtattgtcttgatcataatctagcatcgcaatggcatacaagatgatcctacacagaataagaggaaacaacgccttacctatcaacatttcagagacaaaattctaagaagcattatgcagaggcaaatgtccaaagagctgccattaacagagaatgaggttatacgatttgattttgggtggtaaacgcatctttgacaagaagtgcacatatggacactccatatcttgctccgatatcttgactgctgttgaatcatcgttcggagaagaagccaagtgactttgaacaagcttgaagaatttcatgagctgattcttctccaacagagtcaagctcttgtccttgaatatagcagctctcgaatccggcacatttcgtagctcaccggtcgaatccccaacgaagctggcatcgatgctcttgaactcaacgtagttgttagctcctgatttcagcatgagattaattgattcatcggcacagaagacaaccctaggaccagccaagtcaacgttgaatcttctagagtgttcttcgaggatctccgattcgaagctcgaaatctccacggaggaatacaaggatcggttaacgagatccacggagataaaatcatggttgtttgacggagggagaggaggagatgacggcgacggaggaggagaaacggagtttgagtgaaggaaagaagtgagatcgggaagggaaagagaggcgaagtgagagccgtagaaggggttagggtcgaggtggagaatagaactaccggaggaggaagcagcggcggctaagacggactcagagactccggtgccgacgacaatgagatcgtagttggaaggatcaagcggcgggtaaggagggatgtcgatcatggtggctcgaacagatttgtgtatcaaaagtcgaagcaacgtgacttcagtagcttgatcgatnnnnnnnnnnnnnnnnnnnnnggaagatgttgagatgagtgaggagaatcgaggaagaggttcaagagaagaagaagtttcttcttacattacatatacaaacgtaatgggcctaagatgtaaatgaataaaagaggtaagtgtgaatcggcccaacatggcccatcttcttaatcaacgcatagactatagggtctactgtttttcttatgttagaaacttaaaatatgattttttttttatatataaacggtttaattgaagaaaatagagtttatactttcttcgttcactttactggtcagtggtccacttataatgtgattttttgaactattttctttgttgaatataaaagaattttatatatcttgaaaaaaaaaagtgttagataaagattgcgaagatttcttttgtttgttgtgattatgaaaatcttctaaccacttttaactaataatagagatataccacattcttctggataaaagcagatttaactaactaaataaaagaaatcgaaaaacgaattcacgacgactattaaatctccgaaaccccatagtcctagtaaaaacacacacacgatggagaagaagattagtgatatggatgtgtttgtttgcagaggaatatggtatataatgactctactctcactttttggcctctccaaatcactcaatcttctctggccacctggagattcatcgtctcagtcctttagggacggtgcggtcagtgtcacaacattctacgcagtgacgctactcagatatctttttttcaccgctcctccttccgcttgctacaaggagtttactacaaagttggagagagtacctcaggttttgttttcgacattttccgcaaatttagcgttggcattgcccttaatatatgagctattgacaaacaaagagtttgaattgtccatgtcgttattcaccatctcgttgttcaccggagggttagggctgattcagctatcggataagttttggatggagatcggacatgctttgtacacgctcttcctcggttggttatcttgtctctttagcatgtctaacaatctataccggggtgactataaggtactgttattgtttttaatatcagtacctcattttttgctttcctttgggcccgcgtataatttctccaaatgggaagactcggacactttctctgcctaccgagcaatagaggacaagcttgacacacatgctatgaatacactttctatctaagtatatcaatgtttccttacattaaagtaatggcttttgcaagtccatcatattttactttgatgtaagattaatctggattttatagctatacaattactcatatggatttcctttaacttgtaatagacaataataagtcttaacatcatcgtgaacagaaacacaaataaacaagaaagaacaccttattcataaataaatatacagaaagatgacattacagcaacattgtatgcatctacctctgatttctatcttcgtatatctaccatatcgcgtagttcaactcctatgaattcattcgaatagtccactctggtccggttcaaaagtgcttcacacctgtttgtttccagtgaaataataaaacgtgagatggttcaatcgaatatgagaggatgacattcgtcctcgctttgtgtatgcactaacagtatcatccgaactcaactcccagggaaaaaaaagctttctcccacacaaaaagataaaaattttgacttaccagtttttggggaattgtgataagaataaatgaganaaagtagagacaagtgcagattatgagtgctgagatcgtgttgtagacaaggcgtttgtcgtccttggttggtatgaaggctgttttcaaagtgttggtaagctcaaagagcctataagagatctgaaaacagagcaacaaaaagccaatcagtttgtttgtatctgtctggctttcaacttgtttctatctgttgtagcagggtttgcttacagcgacgtaaatcgaagtagtgagcatgaagttcaacaatgggtaatccgggacaagagatagtagtaatttgggttgaccatcaggaactccagatctgtgggtgaattagattatttcatagttcaatgggtcaggaaaaatcttaatagcttattgtattagcatgctccaccatcaatttcccacttactctacaattgagaacttcggcaacaaaagtgtgacatacctgagccatatatgaaactgggagatatatgtctccagtgttatctttccaagccacctgaaagttcatgaacaaatttttcttgaaaaaatcgttataagaggataaacatatctattgactgaattattttttacttacgccagaagggtcaaactgtagccgcggaaagactgggtgatgttccggagacagatataaacactgaaagaaaagcaaaacgaggtacacaagtaaggactggttcttagaagagtggttgtatagagatttgcaggtaaagtggactacgttattggaatccaagaggtgtaaggatgatatttgttgtaagttaacttgtccatcttgtatatatactcgtaccaaaaatatcccacctaaaagtttcataataacaaagatagattagctggaagaacaatatgcaagaggcttctttcacctgaaagaaagtcaaatgatgacttgtaataccgttagtgctatcagtgccacagatgttttgatagccaccctgaatttcatctcagcttcctccagtttatccatccaactttcaacctataagatacataatcaaggaaatgaaacggtaagtctttatcactgagctaaccatttgtgaacagagttgatgtgaagttctagtattgggaactgacagttgggtggtagtatgcatatagcatcccgattatccatatgtaccgatcaagtccagagcggaaatgccactcatgcaagaggggaagctgaggttttgcaggatcattgtaacctgcaattgttgttttcaagttttgttttctaaacagctgtcttgtgaggcatgagcaaattgtttatcttggtaaacaaatatttgggttctcacttacccattaggagtgtaaatggactccaaatccattcaaaaacgccaggaatttcccaaacgatgataacaacaacgaagcaggcaaaaaatttggcagctatgactgaacccatctcattatacttgctcataataccaagtgccccatagaccattagagtaaacagagtgtgcattgggcagatgtagtatagcatgtaactgttgttgaggacgatgcaggagaatatgaccaggaaatttagccgccacatcatctgtagaccaagaatatgttagaatttcaagtaggtgacagccaaaaataagaaaaaagccgggaggacatagctcttacctgtgcaaaccttgcaaggctaaagtccttgcgaatgtaataataagaaaaattcccaaatccagtcatccatacatagcaagcaatgaaaacacggatcgcattatagtactctgcagcagcaaagtagtggtacatcaagaaaaggacctacaacaccagaataagaaaacaatgatgaggtagcggcaaatgaaaaggcagataaaacactaacataaaagttaaatgacaaacctgcatccagcctttccactcctcggtttgatgcctattcaagtacatgatggcttttccgctgaatggtgatttatcagtatgtatcgtgaatgaagttatcgctgaaacgatgatgagaaggaagtaaaggaacagaaagagatcccggttgtaactctgtgtcaaaagattaacaatgtaagctactgagacacatagaagcacatacgaatgaaccgacacaagcaggatatccatcatgacttatcaaatttacaaactttcttattttgtcacgtcaaattcacaatcttatgggtctattttttccatctaacattttagaccaactttaacgataaaaaacgagtgtatataagatgttgctgaacaatgtaaagactctgtaactagctagataaatctttccagaataaactaagcaggatatcatcatcaccttctttgatgaattgaagacatctgtgcggtcacatatgtaaaagtataccataagtactgcaaactcaattctgcattaaaaaaaataatttagataatttgggaatcttcaggataatggacctttgaacatacaaaactttactctagaaacggaccccaatactcacattgcccttaaagtcagcctgttctcaaccaagaacgactcatccaagaggacaaacctgcgtagaaccccggcatataagcataagaaaaagaaaaactacagaggtcagtggttgcttcggaagaagtaatggaacctgatgagaggagaatgtgtggtcgggcctttggctctaggagaagctgattggagaccacctccatcttctattaaaagagctttgtcatcttctttaacaaaatctttcgcaatttccaccaaattgacatcagagtgcctactaacatagacaaacacccaagtgagaaatcaataacgaaatcaaagcaaaactccatcatcacttaaaaacgttgtatcaacatacgttttggcggagaccgagtatttagcatagtgcagatactcagagtatagccaagccacgatcaccggcacaatcccgaacaccaccgacatctgcaatttccaggaaaacgaaaacaaatcactctcagtatatcactaccaaactaacaagagctcaacagaagaaatcttaagttatcaaaagctaaatcaagcaagatctctaattcaaacgaatcaaaagacgtactagcccaggtgtaacagggcttgaactcgccatttccgatcagagaagcaacgatcaagcgcgataatcgtcgggtttcaaaactccaaaactaaaatttgccagcaattcgcttcgctccttgtccagatctagtagatctagagataaatcgcagaagagaaacaaagcaaggttggagcaagtatagatcctagttctctctttcgttcctattatagtaacagattagagtcacacagataagcttcaaaaggaacgagtggaactgtgtaatgcctaatgcgcaactgtttgagcggtttgcagctgctacctcaaaacaattattttattctcccacgaaaagaaaagaaatacaaaaatgactaaccgacagatttaattacaaattaaaaccaacaataaattccgtatgacaataccatttttggtttttattcacttctatcataatcgggtgctgttaatagaaaggaaatgcttgcatggatacaaagataaaagttgtcattgtgtagtgagatttttaacaaccaaataaacgtttttttcagatcggtgtcgtaataagaacgagacaactaaagataataaagagacaatttaatattttgttttcacactcggtggatcatacattttgattcccattacattttgagatttcagtatgtatgtatgtatataacttccagtaatataagaaggatatatatttctggatgttattttgagtcgtgattctgaagataatacgtattatgatttccacatttttgtgtgacatgtaaagtttcaaacctttatctcattaattgtactcactagcaattgaagagtggatgattttgatcac

SEQ ID NO: 29605 - DNA, 3292 bp, Arabidopsis thaliana landsberg
  unsure (1)..(3292): unsure at all n locations
tatatctatggtttcgaagcctcaaaagtttgatgatttgtttttcatttatattacgtacatgagggatacgaatgcttgcggatcctcttagggttacttggagcatgggcaacctagattctgtctttggggaaaagggataacttttgaacgaatcttctttctctttctttccatctcgatgagattcttcttcttcctcgttcttatctcgaccatattcttcagactctctcatgtcagctacttctttctcctctcaatttatttcccttattttctctcatgtattttgattttggtactttttttagacaaagctgtgatcatattttttttgtcatcataacagtaactcagatattaaaaatttgtaaaaagaattttgatgaaacaatgatagcagaaactgttccaaaaaggtgaaataacgtagcagttgttaatttatctaaacaaaaccacaatgcaaacgaacagaccaaggagaataaaatctctatctcaaaaatattaaaaaacatcattgaatgatagaggagattttgcagcaaagacctctgctttcttcatctcgagctgagcttacaggactaagcatcattgtatcaaactnnnnnnnnnnnnnnnnnnnnnnngcatccgagtatcaccagactcctatatattcttattttctgatatctaaacaagtctattttccaaccaaccaaccttaaatccagcatcagttatggatctgagtgcaacatattctttagctagatcaaccttgttgagctcctgaggcgactggcgcagagtctcaatgagactgagtagcaagctcatgtaacctgccataagatttgggttctttaaacggaattcagatgcaatctctgggtgtttttcaaacatatgcctcacaaagtccacctgagagttacaaaatagaatccataaatattgaacacatcatgttgtctcttgttgttgaatatattctacacaaaacgttagtagcattcttaattttaacctgtgagggaagaagttgaaagccattaaaatccatgctttccattattgttgaagtttcctctgacacatcgagtttcccaataacttcaagaacctctatctcggcaacaatcttgagttctccattaaccagaaacccgctatctttggcattgatttcatttagaggaaacatggataggcgaccccagcgaggagactgcacatcaaaccacttttgttcttctgtaaaatcagaaacagaatttatataatcactccatttacgtgcaaacaaaggactaaatgaattatatatgtttctgtggattgaacaacaatgctaacaactaatacaacagtaacaccatgatcccacacaaacacccttgagcaacatttaactcaagtcccaaaacgagtctcacaaatcaccactcaccagatatacgatgtagcaaaacaaaatgtttgtgtttgtgatcattaaaatatatttggagaaaacagtagtgagaagaaataagtaccattttgtttggaacgtttcaccgaattttgatttactacatttaggagatatcgggcatgtcttctccattcgggtgacaatgattcataatcagataattccaaatacagaaataagtaatcaacattatttcccttgggatagacaagaaaacgcctgcaaaaataaagtctaattaataagagagtcagcaaacctgtgtagaggatcaatcaccgaaggaaaacgccttaccatttacatccaccgacgatgaatggatcagaataaattttctttgaatgtaaagatgaaaaattctcgatagcccaagtgatcttcttagcaagttgcttccccattgatcttggcaaagattattctgcaaccaaaataccataacgtgaagagaaaaaaaaaacctaaaaaacttttttttttcttgaattataaaacaaaaccctagaaattaatttgataatctatcaacaatctcaagcagagtaaccacaattgaaattaagatttccatatggaatcgaagtcttgacaagtctaaatgccactctaacacgatttcttaccgtatagggtgaaatcaatgagccttgaatccttttttctccgtaaaaggtttagatgaggagactccgttgtggtacttaatggaaaattgttttttttttttaattgcgactgtgatttaattaagtcctagagccactctattggcaagtcatctagtggctagtacccacttgatgatattatttttttcgttactctatctgttttaagtttttatactaagattgctgtcaaaaaaaaaagtgttcatactaagataggttacaatttttttcatcaagattcatattgtataatccatgtgatgagagattctttgcgcaatttttcacaatatgtaacaaaactagatatgtgaactcttaagtgcttaagatcgcacgagagaggatttttagcaacaaaatcctctgctttattagctatcagttttaatcttgagacctgatgaaaacataccataacatatttccaattcaccacactgttaggatacagagcgattactttgtcatcaagaaatttatctttataatttaaacccattggttcactagaacaaaaggaaggattccattaatattgcttccactttaaaagaagactaataaattcagagctaagacacagcaaaaacaccaagtatattatcaatctaaaggttctgtgaacacaagaacatcaaacaacatcttcgaacgatagaggaacattggcctcggacacatctgcgttctctttctcaagaaaagctttcagctctaagcatttctgatttaatttctgcaactcttcctccgctcgttgcagtcgagccttacccgtctctactttcttcttctttgccttaacttccgcaagcttcttctccaaccaatccaatcttaagccaccattttccacgtatgacactgcaacggatgcttcgtccagatcatcgtcagtgagctcctcaggtaactggcacaacgtcttaattagtcctaggaggacagtcatgtatgttgacttcaagtgccgattctttggacggaattttgatgcaaagtctggatgtctttcaaatatacacttcacagattctacctgccagtcaaatttgaagatgcataaactatatgtcatagaagtttttagagacatgaatacatacttatattactatgacatattctaatcttgtgtttc

SEQ ID NO: 29606 - DNA, 2246 bp, Arabidopsis thaliana landsberg
  unsure (1)..(2246): unsure at all n locations
aacgtgtaacaaactgctaacctgcatcgcaaatgaaacccgctggccctgcaacaacaaaaattcccccacaggattgaaaaagctgaaagatggtatacagaaaatgaactcaaaagactctgaaaaactgagtattaccaattcagatccacttgataagatgattccagcaccagctgatgcatagtttactccttgaaacatgtcttcaatagtcccagtttgtccaagatagctaggaacgaatggtaagcctaaacgatcagctgttcacaagattcaacattttcctcaatgaatttgttttgctctcaattgtataaagaatcgaacacaagaagtcaacattttcgcttaatttcacttctaagaatcaagtaagagaagaaatcgaagattataatcaaaatccagaaaattggggaagaattttaacctagataatcaactgggattcttccattgcaaaaccttcccgttggttgatgcgtatcgaaatcgcgaccgtagggaagccgatctgctctcgctaaggttccaagaaagttattggttccgctatcgactgaggaatctccgaaaacgaacaacgccggtacaaatggcaaagacggcttcaccgtcggagattgtgctctgcgcgacggcgatggaggtaaaaacggcggaatcgaaagctgaaacggagaaatcgaaggataaatcggcgagattcttgcagttaagtgatgatctgcgatcaatttcggcctcgtgaagattatcagaagagagaaaacaagaacgagaagcttgatcgacattggaaagtgcgcgggaaactgtgcagagctctgtgaagttttacagagataaatgaaacgtcgccgtcttaagtcagcttataaaacgtcgccgtctcattgatcaagagagagactttttatttataggactgcgacacattgaaccggctaaattagaaagtactatagaagcgtattcccggtttatataaccggttaactctgatcttttcgccaccactgacgaaacgtcgtcataaagcagctaacacaggatctaaacgtcttatagatcaagagaaacttttctatttataagaagactgcgatacattgaaccggctaaaccagttataactcgattttaaaaactgatacaaattacctgtactggtaaactttagtctcaaacttgttatcttccctccaccactgatgaatcccatgagcttgtttgaaatctcttgaggagcttaagttcaccgtcaaaaccgaagatggaatcagatgtaccggctcttgtctttctaacagcataccgtccaacgagtgctgcgtcgctgcccgctctacaaacccgatcccgatttcttccatcttgtttcggtgctcaaagtaaccaacatactctgagcacaagtggtcaccagggttgacatacagccgcggaaaccagtcggataaggcttcaaatggatcaggaggtgcgggtaatgcacggttgttttggctgtattgttgggtggcttttttggctagagcaagtccagctgtgatcacactgcctacattttagataacatctaggatcaaagtcaaaacagaagtaatgttaaagtttatatctctggttatgtcacactttaaagcctaatttgatcagtaatataaagaatgaaactgaagggaagatataagttacttacctgcaatgcgtatcccatgtttaatcctcttatccttaattttttcgataggggcagacaaaaacggcggattgaatgcgaaacactcaggaaaaaacccggttctagcgatggttttcccggtaagtaatgccatagatgcaccaagagaatgaccagcaagccaaacactagaaccaccaaccgaagcaacaatgtttctcactgcttggatagctatctcaaaccgtgttgtcgtgtgaagcccgtttctaataacatggatgtcatgctcgatgtcacgggaaatggagtccacttttgtaaccgttcctctgaaagcaatcacaaaacgtggactaaattccattgatttgacggtttgagagagctgttgcggcggtttgtactcatagattcctccgaagatagagttatccgcatcatcgacaaacttacgaatgaggcggaaatgaaaaaactcagaccatattggagataaagctaactcangaccttctctttgtagctgacggtcacgctcagctacata

SEQ ID NO: 29607 - DNA, 1753 bp, Arabidopsis thaliana landsberg
  unsure (1)..(1753): unsure at all n locations
tgtgacacagtgacgacagagagccagtgcatgaaacatgcttcttcagcaagacacatgtcggtgctaactgctaaatcaaaagtgggtccaatgttttgttcttaagagtcaaagaagagtacatgacatgagaaacagaggcaaaggaagaaaacatggactagttgtctccgtgtctctgattttaagttttgatgaaacatgtggaaggcctctattaatggtataccgacaaatgatgaaagtagcaaaggaggactcaaaaagtttgatgcctttttgattggatcttttaaaaatatgagcacacttccctataatacttctataatccaaaatactcttttgggcctatcttaccaaaattatgcaaacttccacaacacaaacacgagtgtcacaaaccctaaatctaatctcaagagtctggagcagaaaaataaatttaccatggttttgaaatttaccgtttcagtccctttttattttattttcttactcaagcccaatgttgatgtattattttgagattaaaaaacttttgaccaaataaaaaaactattttgatttgctttcaatttgggtttaaataagagtgagggtctcgcaggttagcttataagccgccgccttgaaaatccagaaggccatttttgttggtgaaaggtagaattcgtaaatttcttctgctcactttattgtttcgactcatacccgataatctcttctatgtttggtagagatatcttctcaaagtcttatctttccttaccgtgttctgtgttttttgatgatttaggtgaagaagaagaagcagagacaaaaacgattatgaagtacgttttggtgacaggaggagtggtgagtggtcttggcaaaggtgtcactgctagtagcattggacttctccttcaagcatgtggtcttcgtgtcacttccattaaaattggtgagattcttgtctatctggattgcatgcaacactctgtattattggtcacccgccaaaaaaagtcaccttttattgtgtaacggcttgtattgtgaagccaatttaagtgaatttcgtagctatgagatccttttttcacatttacattccttgtatgtagatccttatcttaacactgatgctggaacaatgtctccgtttgagcatggagaagtatttgtattggatgatggtggagaggtatgtcatattgtgatttttgatgtattttctaatcatctcaggtattgttcctcaaacttgatgcattgtgacccctttcaggtggatttggaccttggaaactatgaacgatttttagacagtacattgacccgtgacaacaatataactactggaaagatataccaggtatttgtactacctcctcaatagttatctcttgttagagccannnnnnnnnnnnnnnnnnnnnnnnnnnnnnnnnnnnttattgacaaggaaaggaagggggactacctcggaagaactgtacaggttcatacattacttgtgctcttacttaacttcctctggttctaatttgattcagtgtttgaacaaagtttttaactttatttaaggttgttcctcatattactgatgctattcaagaatggattgagcgtgcagctaggattccagtggatggacagtcaggtccagctgatgtttgtgtcatagaacttggaggaactataggtattaatctagttctcttcttagagagtttaagtcagtgtcaaattttatatttag

SEQ ID NO: 29608 - DNA, 1874 bp, Arabidopsis thaliana landsberg
aagttcgctctaaaacatttcagtgaggttttactgggactgatcgtatatgccgatagagtttataaaacttgttttaaaaaacaaaaaatggatgaaagaaagtgaggaaaataatcatgttcccttttactatttccggcacacttcaactcaatgatccaactagccagaatattccaccaccttggtcgtcacggttctccacacttctttcaacttcccggatccttctcgccatccacagtttacttttcgaactatcactcacaaaaacgaaggagaagaagaccctctctctcaatcagaaacttcttcgggtaaggacctcgtcgtccttattagtctgctgaaacaatgctacaccgagccgtttcgtcagtctcttgcagaggaagtaggcgaaggagggacggtgtgttgtttggtctccgacgctctatgggggaggaacacggagattgtagcgaaagagattggagttcgtacaatggtgatgaggactagtggtgcggcaacgttttgtgcttatacagctttccctctccttatagataagggttaccttcctaatacaggtaatattgttttatgttaagaattgtttccttgcagcaaagttcgagtaaacatacacttatctttcaattttttgtttttctaagaaatacatatatttatagtttggtttcttttctttttcaactatatacagttatcggatttaaagccaaattagtatagtggcgacaataaacaaaagttggttagaagtttattgtaaacaatacaaaatagtagataataatattaaaaaatattaaatatgaacggttactttttttcctttccgataatgtatacatggaccatattaattttgcgatatacttaacggtaaatcatcaagtcaatttaagttggacttatttttattacaccacttgtcacttctctataaaacagttttttatataaaataattgcaattgggtagttataatacatgttattggattatataatccaaacttttcgcctcgaaggattagtttccgttttggtttaggattcctggttgaaaaaaagtttcttaacatttttttagcaatattaaagatttgccacccactatttttaacttcaggttctagattagatgagctagtgacagagcttccacctttgaaagtgaaggatcttcctgtaataaaaacgaaagagcctgagggactaaaccgaatacttaacgacatggtggaaggagccaagttatcttccggagtcgtatggaacacatttgaagatcttgaaagacattcactcatggattgtcgcagcaagttacaagttccgttgttcccaatcggaccgtttcacaaacatagaaccgatcttccaccgaagccaaagaacaaggacaaggacgatgatgaaatattaaccgattggcttaacaagcaagctccgcagtctgtggtctatgtgagttttggaagccttgcagctatagaagagaatgagtttttcgaaattgcttggggtctaagaaacagcgaactaccattcttgtgggtggttaggcccgggatggtccggggaaccgagtggcttgagtcattgccttgtgggtttttggaaaatattggtcatcagggaaaaattgtgaaatgggtgaatcaactagagacattggcccatcctgcggttggagcgttttggacgcactgtggatggaactcaacaatagagagcatatgtgaaggtgttccaatgatatgtacgccgtgtttctcggaccagcatgtgaaccccaggtacatcggtgatgtatggcgagtcgggatgatgttagagagatgtaagatggaaag

SEQ ID NO: 29609 - DNA, 2393 bp, Arabidopsis thaliana landsberg
gggcccatgatgctcatcgaatcggccaatcgcaaatgatgcagcccctcgaaccactagctcaggggctcttaaagcttctaagactatattaagaacagtatccagcttctctttcatcagatcaaagcaaccctgtgatataacaccaagagctggtacagaagcttgccgaaacttgaggtttgtactttgacaatgcacggaagcaaattcaagaacagggaggaatacatgctttggcaggttcatagctagagtgtcaataacttcagcagatgcacgatcaggagcaagatcatcatcgtcctcttgatcagatgactcagcgagtaaagggcacataacttgcaagattggtatgacaagcttatgttttttaagggaattgtatttatactttgccaaccatgaaactatttggattgcctggtaaatgaatggagtaaggcataagtaatcataacaccacaattcgaacctatttcaagcgaaagagaataattctcctaacctggtgacgggtgctactttccagattttggttacaggaaacttcaagagagaactgcacaattgctttgacagaatctccaagaaggggagcaggagattcaatcagctcatcaaaaatttcaaaagcaagtatagcaacatcctcctctccagatgcaatacatttccttgatacatccaatatactgggaatgaaatctcggaacttcacctgacagaaatgacataagcatatattccaaatcagtctttaaattaaacatgtatataacattaacaagaaagtgagaaagtggctaaatttaccacttcatctccgtcgttggtgaattccagaaaagaaccaaccgccctgataaattacagaagcttgtaaaagagtagagataaaggtccaagaaaggagcaacagttatcaattccagagaaaaacaaattacttgagagcagcaactctgacacgactactgctttcatcctgcatacacttgagaagaagagcctgcaagtctgcaaagtatggcctaaatgtgttcccaatcgtttctgtcaaagagctgaaaaggatcaatgctacctacaaatacaaacaacaaaatatgatttttaaacaaaagaaccataaatagacaaaatgagacagagaatttcaaagggaagttacttcacgacgatcttcttgagcactctgactacactggaagagaaaggttaataaattaggccactctccagctggaacagcgtacttggctactacactcacaacattagcactcgcacgtctcaccggtggactgtaacaactccaataagaaatcaaaaactcaaatcccaattgaaaaaatagaagagcaaaagagagagagagaaacagacctattctccacagtgatgctctcgattaaggattgcttaacatgctgtttaagctgaggagaaagcttagcccaatgtccggtaatccttttgcggaggagaacggcggcgagctggcggacgttgggggttttagcggtgcggagatgctgaacgagagcgggaacaacttgaggatctttggcaagacgtttgatctgatcctctgcttgacgccgagcatcgttgtctggcatgaggaattggatcaacagaagttcgagagattgcgccatagtttgtttgttgattgatctctcttccttcctcaagcagagacagaggctgctctagttgtagcagcaactagcaagacagcgaatagggtttttcttattttttgttcttttatttaatttgcgagggtttttgtttaattcacttttcgattggtcggtatcttattatttttggtggtaaaactttattatggagttttgacttttgacttaagttgtttgactttactccaaattcttacaacagcaaattttgtaagcaattacggaaatttctttcacttaagtatggaactgaaaattctaacagaataattttatgtagaaaaattgcttaacaacaaaacagcaacgaatggttatcttataatttgtaatgagttacaaatctctttttatgacactgagtacaaataaactataaattatgagagatgtgtatgatttgttgtattgttttctataagccgaagatttttttacatctcaatgtcttcgagttctggtaaagggaacctgagaagagctgctattccagtcagctgtgccaattctgcaaagttcatcaacacttatttagcacattaaaaaacataatcacatcacaaattcactaagataagaaagaagcaacactaacgttctcctgacacatgcatcgccgaaaatataaaagcatctcctcccgaatcttttaccgactccaccaaattcacatac

SEQ ID NO: 29610 - DNA, 2053 bp, Arabidopsis thaliana landsberg
  unsure (1)..(2053): unsure at all n locations
gtcttgattcttggattggcagatgaattggcagctacaagagctgcagagtcaattgctgatgcatctatcaacgaggatatgcgggtttctttcatggaagccggagctgtaaagcctttggttcagcttttagccaacaacaacaaagagactgttaaattacccgtcatccgtgccttgaaaaatttatcacttaggtgtttatctttgagcattctttacatttttactaagcagtttctcctcagaggttgagattatttatacttgtaatgcagccgcactgtttgccagaggattgaagctgaaggtgcagtatggtttcttattaatcttctgaagcagccagagatctcactaaacgttacagaacacgtatgacttcattttcttcttcctttgttctttgatatctttgtctaggctattatggaataactggacgtgaaatggtattttgtaaactatgttatgcaggttctggatataattgctcatatcttagatcctagcaaggaaatggaatccaaggtgtgtttattttccaaggttgattattatacattaaatctgctttcatttggcttatgctatttctctacatgctacagttttatgaaggactggtgaacggatcaaaagcagactccaggtcagtcttcttctcgatcttcctatcttcagctcattcattctttttgtttttttagaagtattaattactcaaaacatcggatgggaatgaacagaaaggaagttctggacgctgctgttttttctcggctcgtccagattgcgaaaacagcctctccgaacctgctaagaaacgcaatctctgtcatcgagtttggtataatcagtaatccaaacatggacacgatcatctccaaggatatcacaactngtcttgatcttgctctccggcagaaaagtctggaaggtacaaaacttatcttttgatataactctgtttgattttataacagcatacaatactttttatggaaatgcagaacctgataatgaagcttaggagttagagaaacatctgcttaagctagaagaagctggtttgacgatttccgctgcttcaaggctactgacaaaacttcttgactccgagtcctttcgccaaacaatagataccgcggtcttcatagaattagtaaggaagatcctaagatcaagcctccctctacactacaaagactgggttgccgcttgtcttgtcaaactcaccgctctctcctctccctctcaatccctcaacaatccgatcaatcttgaggtaactctgtacaaaacgatcccgagcctcgtggaacaaatgagcttttcctcatcaccagaaacgaaagaagcagcggttttagaactgaacaagatagtctccgagggagttccagaatctatccaaacacttgcttcacnnnnnnnnnnnnnnnnnnnnnnnnnnnntcttgaagaaaggaacgagcggtgcgttgaagcgagtttgtcagtattgtacaacttaagcatggacagtgagaaccacacagccatcataagagcaggagctgtaccagtattgagacgtatcgttatgtctcaacgaccacaatgggagaaagctcttcggttactcagaaatttacccgtttaagacatttttacagattattgtcatgtaaaattttggaatcaattagaataatataatgtatgatttgtcatgtgagacgaatatacaaaaagttaattacattaagataatcggattacgtagcacgtatattactattaccatattctagagattacacatgatcaatcaaatatttaatctttgaaatgttacgcaagcaaaaatgaatttaaaatctgaaaatacaatccaacggctgagattttcttactgtgtcagtgaaaacgagagaaacgttctagttcactcacttggttacacgtgtcttgggatcgtttagcttttaagcaagcttctcttttgcgtaatttatttaagagctgcttgcttttatcatcatcactctttttggtccaaaatttg

SEQ ID NO: 29611 - DNA, 1275 bp, Arabidopsis thaliana landsberg
tgctttctctggttgtataagccttaccaaatctcactgattgtaggaacttcggtatttatcagaaacattattaagaaatttgaagcctttaatcaatgattgtttgaattgactgtaaaagtcagcaactttagcgtctataccttttgatattggtttggctttgtagggactatttgaaggtctcaaagcttacagaacagaagacgaccggattaggattttccggcctgaccaaaacgctcttcgcatgcaaactggtgcggagaggctttgtatgacacctcctactctagaacaatttgtcgaggcagttaagcaaactgtgcttgccaacaagaaatgggtatggactattggaccattgtacctctagttccttctgatgtggttctctatcgtaggttactctcatctttaggagttgctgctaaagagtagtgtaatggtttttcggttttaggttcctcctccgggtaaaggaactctgtatataaggcctctgctactagggagtggtgctacccttggagtagctccagcacctgaatacacttttctcatatatgcatctcccgtaggagattaccataaggtgattttgtatgtttttgtttcatatactctgccttaagactctttaaagttgagacagctaattggtttgtctgtcttgtaggtaagctcaggcttgaacctcaaagttgatcataagtatcaccgagcccattcaggtggaacggggggtgtcaagagctgcacaaactattctccagtaagtaaagagatactaggaaatataattttatcttccatggaaacaggttaatgaaatatcttgttctctgatttcctcttttataatttttgaaaggttgtgaaatcgttactcgaagcaaagtcagcgggtttctctgatgtcctgttcctggatgcagcaactggtagaaacatcgaagagcttactgcttgtaacatcttcattgtcaaggtaaagagtttcaacattatatagaaagttccaaccttttaaattcctatgcgtaaactcattagaaatcattcattttttagggaaacattgtatccaccccaccaacttcaggaaccattttacctggagtcacgaggaaaagcataagtgagctggctcatgatattggctaccaggttccacctcctctttcatatatagacattctcatgaaatcaagattagcagattgtgagtgacaattaatgttatcacaggtcgaagaacgcgatgtttct

SEQ ID NO: 29612 - DNA, 2310 bp, Arabidopsis thaliana landsberg
ctacaaattggttattttccaagggctataaagttgtaccttcgcgctctgaaatgctttcagattacttgtacgaagattgagtaaaattatggaacaaatttgaggaaaaggaaggaataatctctgaaagaaccacagcagcagcttcatcagcatcctttgggtgttctattgcaacagccctcaaaattcgtgcatcaatctgcaatggaacataatactgtatataatgcggtttcaataagactacaaaagacagaaattctttaagaaaacacaaaagaacagatgattcagccaaaaaatatataaaaaaaatggtgtcaaaatgcattctgagcacaagcatggtggatactttcacaatttcactgctaaagttggagtaatcaaataagagatcagttttttacctgaggaaatatttccgttagagatcgataaacagaaccgaaacccatcagtgaaagttaataaactctgcagaaaaaaaaaacaagcaaaatattagttttgatgcaaagaagactagcatacaagaaattctctggaaataatttatcatataaactagtaaagccacatcacaagcctcttgtgaaaaccctaatgttaaaaaccctgaagataaaatccgtgatatgaagatagatgagagagacacactctcatacaagtgcagaagacaaaagagcaatgatccgaaaagtacaaactcagtatcacctaatcaagctttctaaaattgtagaattgtaaagcctaatcaaaaaaaaaagaaaagagaaaagagatatacctagccgtcataatcatcaacggatcatgaaaagatcaaactataatttttagaaacgatcacaaatcatcaaaaaaatacacacgggaaaatcaagtttcaaattccacgattcaattaccagaggaaaacgaagagaatagaacaaaagctttagaaaattttcgatttctgtgcaagtaagagatcagaagcgagagctgtgaggaagatgaggaggaggaggaacgatttgtaactaaagttttgctccgtctcttatgttaacgacttgaggactaagtcgtgctgtgggtggtatcgtaattttgttgtttatcagagggtatttgggtcaagttgttgactttcactgacgtggctttctcggctaggtccatgcaacaaccaatgggcaagggacaaatattattttctttattggattttgtcgaactgggaaagtaccttaaattatgattggcttgttgtttattttatttacaaaaataatactgaattaattagtttttccaatatttttctggatgaagcaaatgaacgttatgcgtgtgaatctatttctcaacagatttatctaatttacgaaagaaacaaaaattacaaaaagagagattaattcaaaaatacacttaaccacatgtcaaatatcgccataaatatttcccaacagaattataaacaacaacacttaacagtaacacccttgtaaattggacttttgtccaaaaccataaaaccatttttgtttcacagataaatcaacctttggtgtagatggtgagatactaaaagtcattaatcattatagtgtacatgagaattcacaatcgaccacttcattctatgatcaatggttgatccatttgtttttcagccttcttcccaatcgacgtcgtcttcctcttcttcttcttcaccacccgaagcttctgcttccacattcaagtccaccttatagtttccattagctgcaagagtcgtaaaatgttaagttaccaaatcgagcatatcataatctttttacatcatataaccatgacagacctgtgtaatctaacttaattatgagcatgtcttaacaagtttcttcttgttgaagctctgcgatttcaatatatactactaaacaaggttccttttattctaactaactagtgtgtcgtttcatttgatcaacgagtatgcgaaatggaaatgaagtaaataaactcaaactgaccagtaacaggagccttttcttcccattctacttcttcttcatcttcgtcttcatcctcttcacgtttggccttcatactaacctgacgacctgagtatacagtacccgactgaatgccagaagttggttcaccagcggattcttgttgatttcgccttgcagcaagctcttgcagcttcataagttcggcgtagtaagctttgagatactcatcctgaagcaaaatgaaaatactgtatcaagattcttgaaacatatccagaagtacgaagctactgtgggagtc

SEQ ID NO: 29613 - DNA, 1975 bp, Arabidopsis thaliana landsberg
aatctccttatcgtttagttttatcagtcctttgcgaagaagactgttgtgaaggtacgtcgaggtgtcgttggtgtcgcagcctttaggagtgacaagcttcggcaaacatttctgcggtggtgataaagccacaaacacctttcttactcctaaatccttaattcgcttcacatccaacaaaatctgtttcactactttccttgtgagtgctgaacgaccctgccagattttatattttcaaaagaaatcgaaaatgttaacttatataatatatggatcaaaaatggtcaaccagtaatcaattttgatcaaccctagtgggaaaagaaaaggtatattgtacctcttcagaaccattacgtctgtcgtaagtaaggtagtcattgccgatgatgctaaagaaagcgacggaagagttgagatcggccggtgaataaacgtttctcatgaggagttgttcaaaggaatcaatctgcacactagcggtaggaactaatttgaacattgtctcaaacgcgccggctccaccatatgcgaaattcattcctcttttcacagctagtctcggtcgtccgtatttcccccatttgtatgtgatcggcgttctaactccaatatacttcgctacatgttacaatataagtcaaactataagatttattgcataatatatgttttctatatatagggtataattactgttggcaaccgatttacgttaaactagagatatcttgcattttgagagagtgaaaacgttaaactaaatacttatatggtcaacatttaaaacaaattataatgaacaaaatttattgacttgcgtttcattatataagagatgcaatgcaaatgtacagctaagacatatctaatctaagagtttttcactgagctttgcaatctgtttacaatattataaatcttacagactcagatattgtgacagattaccaaacaaaacattatagttcaaacgtaccgagataatcagtggaaacacgaccatcactaaaccgcccggtaggtattcccgggaaagtgattccattgggaaacctccacgagggaacgatcaggaaaggtgtgtttccagtgtctgcatacgagtctccgaacacaaacaactttgtaggtttgaaaccaaaaaagccatcttcttgtgtttgctcgctagatggagaaattgagctgtttacctttatgtagtctagcacgtatatcaaaaggaaaaagaaattaatcgatgaaactgatttaatacaaattaattgctgtaatttgatatacgatacatacattaaacagatcaagaagaagaaaatgaaagttatagactaataatacctgatagaagaatcagacacgagaaaagaaaccaaggagtgagtttagtaatgttcatgatggttgaaattgttgtcttttttttttttgcatggaaaatatataggtgaggtttaaggtgtgtgtctcttaaattttaattatggcgaacggttaataatttagcggtttccattgaattaattaattgagtttgtttctttaattaattaatactcctatttcgtttctctggcttcatgttttagatatttttccttcttttacatttttttaataatttcttagcagtttaattttgttgaagatttcttttctatatatacacaaatctttaacattggtaaatgaaatatatgcaatatgatctagatatttatattattttaaaaacatttgttcataatttctaattttctttcaccttaatatgaacaaaaaaggtttatttatttgaccagaaaaagaaaacattgttgtcaaaaaaaaaattgaactctactactctagttcatatttggtttgactcttcttcatccaataatggtcatataaaatatgaaagatatgttttgataagattaatatgaaatttatttgaagtattttcttgttttggaaatat

SEQ ID NO: 29614 - DNA, 1799 bp, Arabidopsis thaliana landsberg
aacagtcatatttaaagagccagctaacttcattgaggacgcaaattagcactctggcttcagatgtgggcaatcaacgagccatggtactgcaattatttctatctgtgtcttttaactataaagaatatacgagtaacatgtggatgtgacccttctgcaggtggatgccatacagaaggatcatgatcagtctctctctgagctcaagttgatacatgcaaagatgaaggaatgtgatacacagattagtggttctattgcagagcaggaaaagtgtctgcagaagattagtgacatgaagcttgacagaaagaagttagaaaatgaggtctgccctcttcaatttgtttgtctggaaatacatgtgttatttcttgcagcgttctccctatctaatgacagatgtcttgggttcacttaattactttgactttaatattgaagtaggactggggtgttggatgatagaggtggatataagtattaggacttcctggtaattcggcttataaaaaaattgaagatgttgtatactcatgggagaacattttactctgagtaggtgacaaggatggagatggagcacaagaattgttcagtgaaggtagacaaacttgttgagaagcatacatggattacatctgaaaagcggctttttggaaacggagggacagactatgattttgaatcccgcgatcctcacaaagcaagagaagaacttgaaagactccagacagatcaatcaaggtatgtttctaaggatagtcatagatttaattttgcaacttatataatattcactctcatgcaatgcaatatcaatggaatgtgctttatttttcttttttgtttcttctctttaattaaatgagaaatctctcctctcgtttcctggctattcattctcttataaagtctagacacaagagtgaacaagaaggtcacggctatgtttgagaaagctgaagatgaatataatgctcttatgaccaagaaaaatataatcgaggttagctttggagggtctgtgcaacatatttaaaaaagcttaaaacacatttacgaactatgtttattttttttcattttcttagactgacaaatcaaaaatcaagaaagttattgaggagcttgatgagaagaaaaaagaaacactgaaagttacatgggttaaagttaaccagtgagttgcttatttagtttctttacttaaccatgtgattcacttctctttacgatatttaaagttggatccttatcgttagggattttggttccatcttttcaactctactacctggcaccatgtcaaaattagaacctccagagggaggtactttccttgatggtcttgaggtccgtgttgcttttggagatgtctggaaacagtctttatctgaactaagtggagggcaaagatctcttcttgcactatctttaatcctggcgttgctactctttaagccagctcctatttatatcttagatgaggtacatctcgattttccatttccatgaatcattgctcttcctttgcattttcaatacgtaacgactaaattcgtgttgacagtgatcttgaaatgttcacaatcacatgatcttgttgagtttgatgacataagagaagtcatgactttatttttatcaggttgatgcagctcttgatctaagccacacacagaacataggaagaatgataaaatctcatttcccacattcacaggtcataattttacggatttctctgattgtgtagtcaccatgattcaaaaagctttagttatctatttata

SEQ ID NO: 29615 - DNA, 716 bp, Arabidopsis thaliana landsberg
agacaaacacatgagagaaatttaagtgtcaatgaggtcgccattgttactttgattcctattattatggccatctggtcctcttaaactaggctcttttggaattaaatcacaacagacattaaaatcaaattcacagacgtacgcagagtatcaaacatatcagaggatatatatatgtacaagctcagttcgaattaaacaaagatgcatggcacaattatgatggaagtcttgcacaggaaaatttgatatttcgaacagctcaataatttttttggcatgatgtgtaaattaaaatgagcatcacaatcctataggacaatatggttatctcagcacaataatcacctgcttcgaaatattaaatgaaatgaaccacaagaaaataatccatgtataaagtatataatatgtatgaggatgaccagaaactgaccagttccaggaacaaacaccatgataataataatgcattatccaacaaagaccttctgtgtacttcaaaacctagcaaataattaaaaaaagatcagtaaattgatacgttatgggtgacttaaatgtaatttattttcatcaaattaaacatatgagcaactcacaacatctctgcgtatttgttccatttcctccacagacttagctgcgaatttctcttcgtaatatctctctctccatcctactttatttagcttaacctgataatacaacag

SEQ ID NO: 29616 - DNA, 1214 bp, Arabidopsis thaliana landsberg
tgagtttcttaaaaggtaaattaatgacaaacttaattgtctcttgaagccattcggttctttgtggatagacagtttagaagaattttcttcctttgttgctgttgcatgtggtgcagtggctaagcaagcatcaagagttttcctccaacccattctatgtcgccggtgattcttattccggtatggttgttccagctaccgttcaagaaatctccaaaggtatatatggtaatgatatcattctccaaaaccttagtatcttctaagtgaagaaccatgatgatgcaggaaattatcaatgctgcagtcctccgataaatcttcaggttcatcggtgtttctttgcttctatatatagtacacaccttgtgatgataagcattaaaaatagatagttgaggtgaataggtgattaggtagataggaaagaaaaatattatattgagaaaacaagaaccaagaggagaatgtgcaaaactgagatcaacgggaaataacatgcatagtagactagtagtaaccaaatattatgttatttaattgtgtgaccatatttgctatatatctaccatgcatgtgatttcccgttttatttgtttgacattctatttgtttaattattgtgcgtaaataaacattatactatgacattctgtttgctatatgtctgacaaacattatattacgtgcgtaattttcgtaagtagttaattaactattttaatatgttgcaaaattagacaaaaatatgatatattaatggataattcacgtaccgttcataagttcttatatattgtaccaattattttttagtattatttgggaattccattgatagtttttcgtccttgatatacactgacttacagggttatttgctcggtaacccaataacagactgcaaaattgatggtaacagccaaattccgtatgctcatggaatggcactgatatctgatgaactctacgaggtatgaaattaatgaaatgcttttatttcttgtccccgcaatgaaaactcaataaaacaagctgtttaaaaactctaatttgttttcgtatagtcgctaaagagaatctgcaaaggagaatatgaacatgttgatccattgaacacagaatgcttgaaacaaattgaagaatttaatgaggtatatataccgtatacgtacactcgtggaatcttaattgatgttgttcttgtgtct

SEQ ID NO: 29617 - DNA, 1513 bp, Arabidopsis thaliana landsberg
ccgcaaaacatgctgctgacacaacaacagctaaacaaacaacaacaacaaatgaataaagtttcattctccatccattacattgagattatgatctaaaaatatgacctggagtgtagtagcgagagcatttgtctataaacctttgagttttggtttggcttttttgagcttcttctacaagcttagtcattttcgcaaccacgcagtcccgggctagagctgtagttttcacctttatataaccttagcatacacaaaattgtggcaatgagctgaaaactttaggatcatactttagaagagcaagagaatgatattgttttgtaccattaagatttatggttgcagccataacagttgactctctctgtttggagacagggaatgattctcctgtcaatgttttctcatccacatcacagcttccatccaccacaactccatcgatcggtatactttctccagctttaactgaaacaacggtgttgatcccaacctcatcaacatcaacttctagtccagtatccgcgatcactgcctttcgtggcgctaagctcatcagtgatgacattactatgcttgcctgaaaacaattgttacttcagaacaatgatcaactgatagaattaatgaaaaccagaactgattttcacatttttgtatgactatgactgtttaaaatcatcaagaaacagaaaccctagattaagtaaccttatgagcagcactagactcaagccaatctgcaactgagaataaaaacacaattgtagcagcttctgtgaaatcctgcatacatagcgttgctatcactgttgaacaaaattaaccaaatcagattcatttacctcatcaaacaaaacataagctgatgctcagggaaaaggatttgtattttaccagcaattagagtgagagcgttgatgtcaagcctgaaccttgtgactgaagcaacagctttagcaagaatggttaaacttttccaccacggcaacaatagcgagccattcaagcggactataaaagtatttgaagaaggagagaactagcagtacaccagaaactattgcgaaagggcttggccattgactcttcaagcttgtttctccgtatggtctaacacttgcttctagtcttgcttgattcagagccttgactgtcaagaaatcaattttacacacaacaacaaaaaaaagggtttaattgactttaagaaaacgtaaacctttgcctcatcaatagaccaatgattcaagacgaaagtcaaaacgtcgattgaaaaataacagtttctgttacttaccgatttgaagtggagaaatcaaaaaagtatcgtggacaacgatgacggttctagaaggaacgatgactgagaattctttaacgccgtcaagtggacggagaacgttacctacgatagaaacctccgatgaacagcagattccaacgacgtcgaagtaacttgtctgtaaattcatcttctttgactcttcaccttccgccatcgttg

SEQ ID NO: 29618 - DNA, 980 bp, Arabidopsis thaliana landsberg
tgttatagaaacagtgcaactggaaaagatggcacgtactcagttcttggcagtatcctctggatatcagcaggtcatctgcagttgagaagtgtacttggaatatcagaagttgggaccagttcaccagataatattcggtgagcccccatcctccattcgtggtcagcactgaccatagttttaagcagtttataaaatagtgcatctggaaaagcctgttaaggaatttcacgttatcttatcaagccttagcagttttggttacatattggagggaaaaagagatagactattcaaggcttaagaatcttgccttgttttcatatgataaattcggtataggtgctatgatttgtgctgtacggaaaactgcggcgattagggttcttgccatgactgtaatatttgacatgctttccaacatgacagccattatgtcaaggataggacctgcatctcctacctacatttcgtgagacaatcagcgatttattcatttttgtacatatgaaaattgtatagcttttagagcttcttggggctaaaataggggttaccttttgggataattgcaggaggcattgttcaactgcagcttcgaatttcaggttatactgaatcatctcattccctagattcgaatcatctaatgaacaatggatgctcttcctcagatgcctaatcatatcactcagggcaccaatgattgccacggatggcagaactttagtctgttgggcaagtgcagtagcaacataaactatttcaagttgcattctaggcttctttagaacattcttgtgatcaagatgcttgatcaggatagacaacaggaaatgcgtgttttgccctgtcgtcaagtactcacactattagtaagttactaacaaggtgaccagaaacaaacaaaccaaacggagacaatacgaaccagatctttcgatcagcaactgaacgttctgcagcacatatacagc

SEQ ID NO: 29619 - DNA, 2603 bp, Arabidopsis thaliana landsberg
aattagttgattaaaagagattaatgaatcaaattataactattaaacacaaatagcactaagatccatttgaagacatttctctagccaagaaggaaggcatgatctaattatgcttttaacgacttgctacttactactgattcttattttccctttgttcataaactttgattagctaacactgtctgggacatttaaacctaattagatgaactcaaagaggtggaaatattgcaggggggcattgatagataataacttaacgcttagattaaagaaatcaaaatgggggagaagaatatacatttgtgtttcttttttatcttgtctcctttttctgattctctgatattacagcaacccaacaacacagctgagatgtaatctattctccaaacctcttaaatgatgtcccaatagcatgcacctaaaatgaaaaagaccgtcgatgagattaccaagctctgttctaactatatgcgccataagaggagttaaaaagtcttaccagaaaaggagctttgcaaggtaatccctggatgtgtccacctttctaccagttccatcaccaccatctgtagtccttatgccaggattttgcatgaaatttgaagtagtctggtcttcgaagagcctctctaatacgttttggacaagctggttcacaatctcttccacttccggtgaagacagttgagataactcagtcacctgccaatatgatttcttgtcatcagactaaaaatcttgagactgagaataaaaatcaaaggaaacctcaacgttaagtaccatctcgggatctaaagaacgcaaataatccaacaaatcattcctgtttcctttctcacattctatcctcaaagctttcttcttttgtgaatctagctcctgcaatatacacattaagaacaaaacaagtattaggagcttaaaagtatcacaaactcagacataaaccatgcactaatttgagtgtttgacaattacctctttcatggaagatagctcagactgcaaaagctgaatataactcaacgcttcaggtgacaagtctccaaacacctgaggactcagtctctcaaattcctcaacacaattccctaaatcctcactcattcccttctctgaaccaaatctaacattgtctttcgaagattgatcctcctcctcctttctaggatcaatcggtatatcaaaattcctcctcagtgatacacgatactccgcattccacaatgtatacctaaatcccacaaaaatccctaaattcacagtgttccaacaaaagagatggatgattttaacttacccggtaatgatggaagaaataaggagacgataaagaggctgttcggagatagtaacggaaacggaaaattgatctgaaggaagaagaccaagcatagaagaaatcgtctgtttcatcgaatccttagctgaatcagataagcctttagagataacagacgtatcaagcggctggatccgattcaccaaattcgcgatcacagcgaaacctcgatctaacttagaccgacgagtagatacatacgaatcgtcagaggaaactccaccaccgctgagacagctgattacagcggaggaagacaccgcacgattcggagcggacggtaaccgaagaggagatgacgacggtggtggttggtgaaggattagcttcttctttgataggtcagttacacgagagagcatgaagaaagctcgtgctgatgcggccgccattaatattgagcgtctcgagctcgagctctgtttctgtttctgtttctgtttcttctctctctctctccgctgtgtggtggctgcgtaatatgcgttgggtattggaagatgaatctttttgttttttatttgtttccttaaatatttttgataattatgattttttctttaaatttaagaaaaatcttccttcgttcgttttatttatctgagcccactaagccaaagattttggtcttttcttatgtttggtcgattaatatatacactaatcaagaaactgacccttttcaatatatttctactactttagaagtttcctagaaccacatcaaccaactaaaaatatctcaaaaataagacaaatttatttactaaaaattctactaaaataaactactgaatttggtgaactagctaaattggctgaatatctcgatttttgtttaatagaatatccaaaaatagtaaaactagctagttaaatggaacgatccgctacatttggttgaactagctaagagtttttttgcttgtttttgaaacataatcagctttttctcttaatcccacaaatgatgtatcacttgtattccatttccagccaatttagctagttcaaccaaattcagcagttaccattagttaaggataaaaattgaaccataccaaacgacaaaagcattaacagattaaagtttaaactttttgtgcttttaaaaattcctttcaacatagatatataatcatagaactgaaatggtatccatttgtaaattgtaacaataaaggaacgctagaaaattaaaactacacggttagctactttaagtttttatttttttctacaaaaa

SEQ ID NO: 29620 - DNA, 1698 bp, Arabidopsis thaliana landsberg
tgccttttccctggtcttgatagacgctataataatgttgtttatgaaatagaggaccatcatcctcaacctggctgtggatctttcacccgtcggtactatatttaagagcttctctcttacgtctttgcatttcacaacagtattcttgaaatgctttgtcttgaactccaaacttcccatattctgatacccaagtttatagttcttgcaattgaagccagatatcaatgcttgttccaatattccatatcggattggaacgccattgacgatgacccacgcttcgtttttcctttcaatgcgccgtgcgaagaaggagcatccacatccccataagtcggtggtttgggtctctaggcttgcgaaagatgtgttagaaactcggatggttctaaaaccatgccctctcaaacttgctcatcggaggctccaacttatcgaaagtagtcaacacttcgtgaatatagcaccgagttgatagcttgattttcttcgcatattccgagggcgggaaatacatactcagcggtggtattgtttccatttcctcgtcaatttcctgcaacagacattcattcatattactacaaatgttaccaagaatcatacacatagttatatcttagtaatgactacccagaaatcatacacttagttgtatcctaataatgataatattacccagaaacacatagttatatcctagtaatgacagtattacccagaaatcatacaccttgttgtatcatagtaatgacaatattaccgagaaacacatagttatatatcctagtaatgacagtattacacaaaaatcatacacatagttctatcttagtactactaccaatgttacccagaattcatacacatagttatatcctagtactgacagtattatccaggaatcatagtattatccggttctaccagtttcataccattcacatacttaccatatcattttctgccggatttcccaccaaactcacttctacaatctcatcttccatattctcatcggaggaggactcttcgcccaagcttctactactatcatcggaggactctcctccgtcgcgattcccttcttcccctttctcttcttcttcactctcttcttcctgatccttctcagaattttcttcctcattcttgtcagacttctcttcttccagtgattctaaaaccggacttatggtcgggattgttcttcaactccttctctctcaattttggattttgctccgtcgatgatggctcctctgtcgttgtcggctcctccatcgttcccccatcgattggctttgttgtcggctcctccgtcgttcctactcctctcctcctctttaacctaattttcttccttagagacggcattaggattctctatgggtacagttagggttagggtgagactcggaatgttgagaagagagattagggttcttgttaagaatgttgagaagaaaacggagaagattgagagagaggcgtttggaaaagaaatcgaaaagtttacagtttcgaaacttgaagtttcagttttgaaagagaaaaaccgaatagatctagagaaatatccatttgggagagatgggtcggatgtgggtcgaataaatccaggttttgactgtaaaaattggatttcggttggggtatacaagtcaaatccacactataatgtttggagag

SEQ ID NO: 29621 - DNA, 1607 bp, Arabidopsis thaliana landsberg
ttattagatgtcagacctccataagcacctagggtagagaaaggtaatctacctggcatttctcgaccctttgatcccaaagcaaaacagtacgatcaagggaaccggagatgaagcattccccaccagaacacaagctaagcgaaacaactctgtgtacagcataaattggttaagttcatccggtttgtgaaggaaaacataagctgatcaaacaagaatcagaaaagaaacaaacctgtcatgatgtcctttgaagtagcgcaagtacttattatcgtgcaaagagagaagtctcagagagtctaaccaaccagatataaaagttagttaaagcaaatcagataatgaggaaaagcaatgtgcacatgaatttgggctcaccgtcccatccgtttctggaagagtagatgacagtagtaggatgagaagtgaagcaaacaagatcaacaccatactttttactattaattgtcttcagacatctgaaacaagaaaacagaaaacactgaaaatatagttggaatgtcttatagagcaatactcaagacagagtttggggtttggaactcacgtggcgctggcaacatcatagagacgaattgagtcatcgtcgctagctgtcaccatacaagtcgaagttttgtgaaagtcaattgagctgatcctgcaattctgaaaagaaaagctccatcctttaaaaccccattataataacaggagcaaaagaagaaagcttcgagaagggaaggaaaaattacatagtctctgaaaacggcgccaggttccatgctctgtataatttcttcgctgagttccaaagaaactcggtcctctctctctgtaaattccaccattggacaatgaaattgttaagacttcacgttacaccgccgagaattgaaatctcgtgtcatcaataacactcaccaaccatctctccgacgcgtaaaccaatatcgccggtgatgtatagaagccctaacaagggcttcgactttagggatcgacgtcttccaccgccttaactgatgccaacgattttctatgtgggccaactttttgagtatgggcttttaaatatgggcccaaatgatgcgcttctccattccaacatggcaacatccagcaaagccgtggatcgttgactttaccatcaactggttacaaacttattacaattgaacatgataaccaatatttacaactaccactataccaaatttgaagttagacgatgcatattatattggtaactaatacagtaacatacattcattcttcttttagtaatcgtttttacggtacaggatactataaaaaggttggtcgtaaatttgtaatgatttgttttgatgtcaacttatgaagactgaagagtaacttaagaaaatgattaatactaatatataatcccaaaaatattaagcaaggcgtatacacgtagggtagcttttattccaccaatttataatttgctaatcaaacaagaggtgacaatgaagaatataagaagtgagggtgttaggggacgttttcctggaggatgatggccttcttggttctgataaactcgatacagtcagccacggctttggtgtgataag

SEQ ID NO: 29622 - DNA, 2435 bp, Arabidopsis thaliana landsberg
agagcagaaaagaaaatcaccggagaaggaagtgtcccctgactcaggagattttggattaagtagtaaaaaaagcgtcaaaccgcaagacgcatcaatcaaagaggaagcaaaagaaacgcagaaagccactagagaggatgcgatagcgactgcaaaagaacggtttctatcccgtaagaaggcaaagatagaaaagtagtagtgcaacttggcagatgtcagtccaacggttcaccaaattttggttaacatatcttcctgattatcgatcaacctttgtttaaaaacttttctagataacgtttattcaattgtaattttatttgcaaaacttgtaaaattcatcataaggtatgtatttcgaccactcacttccaacctcgctacagctactcatccaagtcattgatcgaacggtgcaaaaaatctgtaatttgaagcttatgtctctgatttgaatcaagaacctatacctctctttcttttaacatagttctatgctctgtttttaagttatttcaaatgagtttacatataatgtaattaaacaaggtttttttagtaaagaagtttacattctttcaaacaaaaataaatttgtaatgtcttaacgaaatagtttttcctcccattgtcacctttttctaactaaaatgtcttttacttacttttgtagaccatcttagatttccttattatctcccactagttatgaaaacaactgattacgagaaaactaatttgtagtaacatgagattgtggatatgggaaaaagaaagagagattgtggatactaacataaagtatcatgatatcaaaagaaaggtcatatatattattccaatatatgttttgtatgtatcaagagttcaaaattcttagacataagcattaaagatggaagtgttgagaacaagtggaccctgctctgatagttgcggagcttaaatcttccaatctgagcagaaccggacatcttacgtgcaaaccgaactctttgaacgagaagatcccactcttccattggaacactatatcggctataacgtgaccgtagtacataccgtgtctcacaagaaaagccccggtcggcttaccgttgtcgttattgtttgctatgaccgctgtccaaagcctaactgtacgaggctcctgacgcctgctttgcaaaaaaacactctctgtctcgaatttttctccgactaggacgtgtagacttatttttctgtagtaaacacttgacttgtagcttgggttggtcgatgacagtttcacctagataaagcaaatcgaaatagtaattatattagggtttaaaatagctttatacttttgtaaaacgaaaaaaaggaaattgaaaacacttacaattacacttgtgtttgagaggggatcaacgtagagatcctcgagcatgaaccgtggaactcgcggttggattgctatgtagttgaaggcaaagacacagattatgagtaaaattaaagccgcgggcacgccgaagtagatgattgtttttccatttttgcttaaacaacgagacttgtctgaataaacaacgcgactgtgttttgacgccgccgcgccttcttctttggcttctgtcttcttcttcgttggttcttccctcttcgtcgttggtccattcttcttcatcgttgcttcgtccttcttctgcatcgtttagactttagattgctatgcgtggtttcttctctttaagctttaatggacttctttgtgtggtttttgatcatagtaactatgaaacgtaggtttatagagaaaagagggaggatagttttatggttttggaaatcttctaagaaacaagaatggtaaagagaaacaaaagtgttgaaaaggaaactggaaatgtatttttttttatgtggaaaatatgaaaatgttaagtaatagagaaatagaaaacatccttatattcttttgttcttttttcttaaacaataaccaatattaacgatatagaaacatttttatatcttcacggtcatattagcgatattagtcgagagaagtcacgttcaagccctagaaaataactaattaatttcatcaatcgacattatttagctataaacttaatgtttctcattcctctaaaattctgtggtatatttgtaaacttatcttattcgtacgtagttgaaggtgaacaaaaataataagcagcaacatgaagatcatacaaacattcaatcccacctcatttcgacaatagcaatgcaaagattatacttttttgtttttgttgcacatcttcttgatacctaacatttccttagatattgattgacaaagctacacggcttgcggatgcgttcggagaagatgcgacgttgctaagagtttgccatgttttctttgaatccactgtatttccaccactgttttgtagcgctttagtgca

SEQ ID NO: 29623 - DNA, 567 bp, Arabidopsis thaliana landsberg
caatcgtaggagtctctaatttttctgaacttcggccatccttccgccgttatgtcatcatctcctcctctctggctctccacggtgactttcgttcatctaatcggcgagttcgtcttcaacaaaacgacaatctcgtcaagaagcttcctgatcagcttcatcacaatgttatggtgagtatttatcctttcagttcttctatttataattcaattctgctcctgttttaatgtatatgatgtttctgtgtacacatgtttcattcggtaaaatggcttttttcccacgtcgattgattcacaccaacgagtgtttggtaaatcccatgatgattatgtgttctctcttttatatttcaattgtaggatatatgtaattgttttgtgtcatgggattgatttgtgttaatgcgtttaggaacattcatgggattgatttgtgtcatgtcgagagattgagtttgcctaaattagctcatgattttttgctgcatgtactctttacattacatagttctctaacttctgtctgtgatgaaacgaatgaatcccataattcttctgt

SEQ ID NO: 29624 - DNA, 2368 bp, Arabidopsis thaliana landsberg
tgattgatatgtaaccaccccctatgggtaaaacaaaatgcctcaagagtcatcaaaaagcacataaatcctctcggaggtttttctactgccttgtcaaagcttaaaccaaaatactgggactgttgagattgggtatatttaatagaaagaaaaatccggcaatcttactcgatgattccggcacctgcatcgagatccacttcgcccataccagtgtcctcttcttcgtctccgctatcttcatcgccgctcatttcttcattgtcaagacgtagcttagccatgtgttctgtcagcatcttttcatcacgttcactcacctatatttgacatagattataaacattaataggcggttgtgaaccaaattaaacaaaacacaaaagaaaagctcgttcttgtgacatgcaactcgagacggttcatcacttaaaaaaaactaagttaagatactcacagctctagccccctccttaacgacaagcttgcctttgtgtgtctcaattgtctcagtgcatgctgctatggctttgtttagaatttcaatcccttgttcctgtttaatatttgagaaattgagaagattaggaaaaatgggacaaaacatagcatttacacatttatggtttaagtgaagacaaatccgcagagctacataattggcaaacaaagttgcaatgtccagtgttttcttaagcatttactttccttgcaactacagtgttttcaaaattctggcaagtagctttagtggatatacaatctaaacagagatcataaacctcttaaagataagtaggggaggatttctataatataccaattaccaaaccaagtaaatcatagtgcaagatagaagattgcctaaccttgtcaagtgtctgagtagtaaggacatacagaggtggagcaaccaatttaatcttaacaggacagtcttcatttccagcggcttcagcatttttcatagcctcctgaaattacaagcatgggtgagaaaatcaaatgaaatcataatgtattcatttcacaagttaaagataatccaataagagatacgaccttaatgtgaacaactccatcaaactgaaaacacttcaattcgatatcagcccggattttcattggttgtggagtcattctcctcgtaatgttcttcacaagtgcatctttcacttcttccgtaacagcaggtacaactttagtcacctacaaacagaaaacttgtaagattagcaccaaataaagttaatactaaccgctaaaacaatgccagagaacaaagtatatacctcttgcccatcaggcccaacttctttgatctcacgggtgagaggacccaacactgaatcaggatccgtcactaagatcttgaaagcctgaacaaaagaaaattatatatgagaactaaataaccatagagatacacaatgaatctccaattcacaaaattcttacctcaaaagcatgaccatgtcgtcgatacaaaggccaaccaatgttcacatacaagtcctgcaacatgaaagctcaaaccaatttctattcaacgatcacatcactaagctatgatatttgataatatctctaaccagcaaaatccaaatccagtagataatcccagagttgaactacgatattttacctccaaatcaattgaaagagtctcagcaacatggcgcatgatagaatgaacaagtttgctcttgttatacctctcttcacaagtctgaatatcttcctcgctgactctacgtttgctcagatcaatgtaacctttctctttgtcaacacggagaaccatgacaggctcaattcttccgaccttaatcaaactgctaacacttcggatccgacgacgagagagctcggagaaaaggatcatgccttcgatgttgttgtactcgaggagagaaacataagctcccatatcggcgatgttcttcacctggatcatcaccgccatatccacctctgggtatttcgcctcgtacatccgacactcgagattcggtgtttgactcgccatgattggtagatttcgatactgcttgagctcacgcgaattcactcttcgttgaatcgggtaaagctacgaggcggagacacttagggttttagactttttaggcgacggagcaaatcagactggtttctagggataagaaatgagcaaggaacacaaacggaaaatgagtcgacttgcgtcaaagatgccaagttaaacggcaccgtgtcagttaaacaattaggttttaattgggccacaagatagtttcaaggggtataggggttaaaagcctattcgggtttcagacattttcggcccaacttctttcacaacgtaagtttggattgatgtcct

SEQ ID NO: 29625 - DNA, 1982 bp, Arabidopsis thaliana landsberg
gtccatagcatagtaaggaatggcggactgagggctctttctagattcaacgggggcgggccacgccagagcatcgttattaatagtttcttaaagcaattcttaagttaagagacagtcttataatagcttataattaacaaagtctcataaataagagactttaatacaattttgttagatataagacatatctcttaactaagagtaatgttaagagatcatcaataaggataattttatgtcgttagtactaatagaaccgggccctagagtttgtaacagatatgggcctttttattgctatgggcctatttttggtgatatgggtctttaataccatatgagccttttaagacaaaataataatctgataaaagtggtgaatcaagaagactaaacaattttgaaagaagaagaagaaaggaggagacatggatgaatctctgtgggtgtgagtgtgagacaaagagagaaaacaaacaacgtagctgtagattggaaaagacggtaagaccctcgtcgggcttcatcaataaacaactttgccttgttgtctatcgccggaattacaaaccctagccctgctacaccgccaatgacgccgtctacgcctgcagacgatgcttggatccgctcttaccagcgcttgcttcctgaatcgcagtctcttctcgcttcccgccgggtaggttctgtctcagggatgcttgtttgtgtcgtggcttgtttgcttattatatgtggtctttgatggcagtcagttataccggttgcaatctctagagtgaatcagttcgacgcagcacgactagatgtggaaatgtcagccatgttgaaggaacagctcgttaaggttttcactctgatgaaggtgagcagagagctaacttgatgctttccttggcattttattaagccatttactttctttggcattttattagccaggaatgctctttcaatacgaaccagagcttgatgctttccttgagtttctcatttggagattctctatttgggttgacaaacccacccccggaaacgctctcatgaatcttagatacagagatgaacgaggagtcgttgctcagcacttggggaaaggtattttttattttattttctaaacactcttcttctgtcaccctttttttctaatcactcttgtactctcgtatagtcagaacaggactggaaggacccggacttacttctccccaaaagatttggtactgcgttgcctccgttggtggtcagtacctcttctcccgtttgcagtcattttctgctttccgtagatggggtgattctgagcaggtctgtatgaggagcatggtttattctttttttctcccgtttgcagtcatcctcacgccatcgctatggttgattcttttctccttgttttgacttgtagagaccattggcaaggcgactttggaccctcgtacaacgaatcgaaggcatctacaaagctgcttcttttcttaacctattgtcatttctttatacgggaaggtacaacttggtacatggactctttcatttcctctacttatcctgataaaaccacactgcagtgcagttacttcttatgaccatttaaaatctgattcagttcattggtaacttttgagttcacagtgaaatatcgaaacaagaaccaaaatcacaaacagaaataccttgatgattctcacttccgctactcttctttttctttcttgatccaggtataggaacctcattgaaaaagctttaaaagctaggcttgtctataggagtccccatatgaaccgatctgtcagcttcgagtacatgaatcggcaacttgtgtggaatgaattttcggtaggtcttctctgtgtgttgcttaactagttcaacatcaatttaaaagtttggcaacctgtcagttctgagtagcatccttggctgatggtttctggcctatgattgatacttgctggtctcgaaca

SEQ ID NO: 29626 - DNA, 1755 bp, Arabidopsis thaliana landsberg
tgcttcacttcataccaatttatctgtattttctccttggtgacgtcacgtaggttgttttctttcctggaggggaaggcaaatgcttcttgtgtggtcaagaggggcaccgagcagcagattgtgagggaaagataaagaggaagacaggagaaatgcttgataatactgaggcagatgttgtggtgaagaagccatatgaggtacttttcaggattatacacctcaatactatattttcgaaattacatcgtatgtaaagggctcattattatctttaccagtatcattaactatccttactttttggcagtttgtcaatatatggatactacgagagtatttggaacacgacatgcagattcctggagcaaaaaaaaatttggaccgcttaattgatgacttcatcttcatctgttttttcgttgggaatgatttcctgccacatatgcctacgctcgagatacgggaggtttgtagttttctgttgataatactttcttccagttgtcgaaatgcctggtagagtgtgcccttccatttgttagtcatgtagcattatcttagttttttcaaaaacatctgttgaaaaatgaggtttcttagatataggagatgttcctatatcatacttttctatgtcagagtcataaatcacttcataaaaatctttataaaaaatttcatttgtagttgagattactttggtattgaataacgtggtacatatttactcatagtttgtgttctatcaaaaaagtttgtcgcatctttgcatcattgaaagtcttatgagcttacttagaaacccttgagaagtttaaaaaaagtttttcaacttattattgttgttgtgttgcagggtgctatagaactgctgatgtctgtgtacaagaataagtttagatcagcaaaaaaatacttaaccgattcaagcaaggtgcagaaattaaacattctttatcttacttggtgtagctgttggattgtatagtttttaaacttttgtttactaactttcagctgaacttaagaaatgttgagcgtttcatcaaggccgttgggatgtatgaaaatcaaatatttcagaagagagcacaagtacagcaggttaatgtccacatacaataattttgttttctgcagtaatctgcattttccttgcattttaagatattaggttgaaagcgacaagattaaataacattagcctccatctaatgctatgggtgtctcatctgttacatgtcccggccaggctattaatcacttctctctggcatgtaaaaaactttgtttcattgtacaaccgtatttcctctaggtgaatagtagctcagtggatttttaggccagggaaagtcgcaacttaaagttgagtaggagatacttaagacaaagtggaaaaacttaggaatggttaaagaacgtgaatgttttggggtaacaaccatgtataataaaaatattgtcagtttgcttctctagggaagatacttgtgtattttttttataagaatagaatagtacttagcggttttctttctgaaagatggccatatgcctctctttccatgggttaaaaccttgtctacactagctgacgaatttaatacccctctgatccagggaaaatgaagattagaaaacatgaaaaatttataaattctgtttcatttctatggatagtttttcattggtgcaagtgttatgatgtctgttacagaggcaatcagaaaggtttcgtcgtgacaa

SEQ ID NO: 29627 - DNA, 398 bp, Arabidopsis thaliana landsberg
ttgaaacgcatgcgctctgcggtactggtgtacttgctccccatactttcgatggagtaagcggttcgaatatttaccactacctgcaggacacatactccattccttgcaaccatctacgctcccttgacctatttagagttatagcctaataagactatttacagcgatagctatgtgactttctctcatgagagctggttttcagaacatagcttgacttctcacactcaatcggcctagggaggaagtttgggcggatttgaagccaacccatattggttactggctagagggatgaacaggtctatccgatttgtttattttccatcgaatttctaacctatcatcgattttttggggtaaaacctaacttcgagttttagcaatcatttcct

SEQ ID NO: 29628 - DNA, 1558 bp, Arabidopsis thaliana landsberg
agcttaacataactagcatatcacaaatttcaagaaatcataacttcagatttatataagttaagatttgcataagaaaggtaaagctaggttcttaatttctctcagtagagatgtgcaaaactaagtatacttggtctctagtatctcaactggaatttctataataagctgaaaaagggttgcttctataatctacaaacgtaccaaatgacccagctttgctgccttttcttctcgctgataaagttccaatgacagttcctgtgaatgatactcgtcagaaccaccaaaagaatctggtcgttcaagttgcctccacttctttagcattgaaagtttcaacatctcatacgcctcacggtcttgagaatccgttctttccccatgtttttcttccatttctttctcattgtttttagagtcaacgtcagtattctcactgaaagcaggagaaggtcccaacaggttaggaatatgacctcttgaaagagatctattatgtgatctaacacacatatcatcttttcgtcgctttgcccacgcaaaaccacttgatacagagacttgcaaaggccctgagaaaggcacatctccttgtgatgcgttcttcacatgagaagcttcatccttttcatgatttgatggcttttgcattttctcaaataaagtggaatcactatcaatcgaattatgaactgaatgaccattacgtttctgaaacttctgggagtggtgccgtacatcctgcaagtagagaaaggagagggtttttgctattttttttgttttttttggcgtaaggaattcccttctgagagatgcagatagtaaatgcagggaattcgtgttggtgtacctcagctggtgccagtttagcaaatgcagggggctttcgtgttggcttcctcgattctgtaccacgtctcccattcccgctgatttttttcctggaattccacaataacgttggaggataatgaataagtgcttacaggacaagacacttcagaaattaagtccaaaaaaattatggtgctgagattaaccaagtaactcccaagggtaaactgtgttttcactgtatgtttcttgtaagatatagtgacaatgatggtaatgaatgaaattctgaccttgttgtgtcttctcgatgctttgcatcaatctccttgctaggcgagtatacaggcaaacttgagggatcacaagcaaaaggctttgaagtaaaatactgaaaagaacaaagggaatgttttaaaagatgtggcaatacaacaaaataacatcttcctgaaaatcaaagttccaaatcttcaaacaagatgctgttataacagctgaaggataaaatggttacctgagaaacaagggcagtagacgcagtcccacgtttgtggggctgtatagaaagaagagtttctataagattgatgtcagcatcggataaacctttcaacttcaaggtttctcggagacaaccatcataatgttgctgtggtttgaaaagaattgaatgaggaagtttggactttttccagtaatcttcaggtggaga

SEQ ID NO: 29629 - DNA, 1370 bp, Arabidopsis thaliana landsberg
ttcgtgtgtagtcagtgtgatcgtgagtgttgaatgccgatgttgcagaaagttttactagtattgaagttctatcattatgtggagttaatgtatatgatattcttgtccaattcattgactttataaaataaaataaaatcttgattcataataactaaattatactatatatgtacaatgttaagttctatatctcattatttattttttaaatataattgaaaattaagaaaatgataccaaatacgttaaattctaatcaacccacatatctccggcaatggaggttcttacagcaaagacagaccggatcttacaccctcttctgtgagggaataggagcttgcatgttccagaagaacgagctgtgccatctgtctacttgtgccccatccatacggtaaattgatgcattgacatcaatactctcaactaataaagcactagagtgtctcatctagatgattaggcgcttcatcaatctttcttagcatttgcgtttttcttttctgtttacatattatagtatagagttttctttttctcttcgttctaaatgatcaatgcactccagttattaattgaagtaattggcttataccaaagtctattggatttggctttatgttctgtaatacaaaaccgggattttctctttgcgggagataatgcatgatccgcagattgcagaagatggattcacatataaaggaacagcgatacaatcatactatcatggttcataaacgggcacaagacctctcaatgaccaatctgaagctaagtagttctgcatctcacgccaaaccacggtttacgccttgcagagccaatcttgaaaattgtacatacatttaactctaaggatccacttgtatgatgtatctatgcagaatgtacaatagacaaacgctaattaagcggttggatatagacggacgttaattgattgatgatgttgacccaacgccactaaaatggacttgtttcttcacaacaaaacaatagtagttattaaaatacgttgtggaagtagtcagaatctagacagtcaaaataagccaaccaaaaacggtagaaactaaaaatggacagctaacaaaggtaagaaacaagttaagtcaacattgtgaaaagcaagtgtaacataaagacaagaagttacataaaacataaagatccaaatttaataaaaaccaagttccctgaaatggaaggaaccagtacagaaaaacaaagagaggccaacagaatttggtgaaacaaaaaaaaaaaaaacagagagagagaggaagtgaattaaatggtagggaaagtgaataactttttgaaccactactgctacacgtactcattttctcatacca

SEQ ID NO: 29630 - DNA, 1255 bp, Arabidopsis thaliana landsberg
tatttacgaagcaaatgctcctccaaatcacttatacatttggccaaaatgaaaacataaaaaagcaccgtaactagtccaaggccatcttgggatatcaaacttccaaaggccggagaaaaaattggtacctttcaatgccaaagttgtggcacaaggaatcacattatacaatgtgttgcttagtgtgaaccaacagggatcatcttcaaggcagcagcaacaggcatgccaaggaacccgagtatgatgctaaccaaccattgtcccaaatttaatggtgttgtatccgcaaatgtacccagcagctcgattatgattacttggaacaccactgtacatgttagaaccgctacgaatacgtagttctttagtatccccttgaacacatcaattttttccatttccctcgagcttatctcattgaatacctgaaacaaatatcatacattatgatgagaacgtggttatggtcaatgttggttgttttcctttttaagatccagacgcggcaagttacctggcagaagacaaaaatgttgaaaataagggtattgagtgttagatcagagtcggggccatcgagaccaaacattgtctttccctttgtttgaagacaccatatgatgacaagctggtagagtgactgaccaaggatgttcctccacattacattacttatgaagtttcctttccttcccactggagatctcttcatcaggtcgtcctgtggtggttcagtcgctagcgcgagtgctccaagtgtgtccattatcatgttaacccacagtagttggacagcagtcagaggcgcgtttcctgagacccacagtagttagtgtcaatgtaacagagaagttagttgcaatccctgaggagattagtcttttgaacaagagaaaaataaatgtgggttgggaactaaccagtgaggcaggctgataagaagttgacaataagagccacaacatttactgtcagctggaactggacaaatttctgaatatttatgtacacagaacggccccatttggctactgtgacaatcgtagagaagttatcatctaggataatcacatccgcactttcttttgccacctacgaaaattgaaaaatagaatatgtaagtgttgtccttccatgagaacccaaactcaattgttagattttctcacaaaccagataatgaaatagggacaatgaagattgagtacacacctcagttccggaaatgcccattgcgagtccaatatca

SEQ ID NO: 29631 - DNA, 2852 bp, Arabidopsis thaliana landsberg
taacccgacgaagattatttccaaactgctcaaacttctccggcgagttttggagacattatcggaaaacggcgccgttttattaaccgtgattttcgttggctccttcactgctaattgttagcatcatcgcaacaatctccttcttctgattgattctctctgtaatttcctcttcgcgcttgttttttccgtatttgctttctactgaaattggtctctggttatctctcgtagattagggtttatacaagctttgatgtctaaagccactaactagttttgtttatgcacgtacttgtcctattgtctagttctcgcttcgtcttacgagttccttgtcagaaagcttgaccctttttgttttcttttccattgctttgattgatgactcttagggtttttgacttgtatcttctttgtttctctatagattttgtgaaggcacactggcttttgagctggtgttgaagcaatgggtagttcatttaacgctcagatattagttgagaagcttgccaagctcaacaattctcaagcaagcatagagagtatcctcttctgtatatcataatttggctgtagaaagctctgtaatttcattgtttaagtacttaaataggtgcttggaaaagactatacagaattggtatctaagttaatgagtaacaatggtataagatgaaagtattggtatctcttctcaagcagaatatatctaaattcctcaggattttcttttacttgagctgtagtttataccaattttgagtttcagtgatattggtgtctgatatacacggataattttctcaactctcccaacttgcttttattgtaaattagtttccctttgattcgtctcatgtgatgtgttgtttttctctcgccttgtatactattctggtgtatgttttccttgacgttatacagctttatcacattggtgtatctttcacatgaacaaagcaaaacatgttgtagaaacatggggtaggcagtttcactgtgccccacgtgagcaacgtttggcatacttgtacctcgcgaatgatatcttgcagaatagcaggcgaaagggttcggagtttgtaggtgagttctggaaagtactccctgatgctcttcgtgatatgattgaaaatggtgatgactttggaagaaaatccgcacgccgattggtacgtgaagttaactttttatctaccactctctctgaatttctctttgtttgagattttagcgaacatagaaatgccacttattgatgtgatttaaagaatttgacaagaaaactgcattgctaattatcgtaattatttcttcaaggttaatatatgggaagaaaggaaagtttttggatcccgtggacaaattctcaaagaagaacttctgggaagacagcctgaaaatggaaccagaaacggaaatctcgtgccacttaagcttgtaagtcagagtttgttgtacaagcaatttcgtaccagtatgtctcagtacggaaacactgttatgtgaaaatttctactttcgagttcttgcatgctaaccacataatcaactttgtcatttctgcagactgttcctcagagacaggtaaatggatccacactggacaaagtagtgtctgctgttgaagatcttcacggcgttcagattgatgaggatgctcttgtcggaaaatctactaatgctgcaggctaccttgagaaagcaacacaagaggttgaaagagatcttagttcaggtatcaccgtccattggctgctacattactgcaaatgtattgatatgcttttttcttatcaagtgacaagcgacatagcttcagttttctacattcgtttgttttaagaactcagctgtttggtctatctttaaccacacaccctttgtatctgaaccgaaatcttaaaatttgcgtaacaatctcgtatctggtctatgtgtgatcttaaaccactaccacgcttccaattcttacttccatgatgctcctctctcatttttccaaatagtttttgccaaaatcatcttttaaacatggtggctcttaccatttgataggaatattcagcatatctttgtgtcaaatcatttaatgataagagcacttacccccaatccgcaacgagaataaccagtgctacacattttggttaattttggatccctaatttttgtcactacatttctgattactgggactggtctttatattaactgcttgtagatatattacacttctttacttgtaggatagagaagatccaattcttgttcaagcatccatttgaagttgttttcactatcttacttcttgagcattgctttaaataggacacacccctgggccagcggtggtgaaggagttgcagggacaacatgtcatattgagagactgcatcgaacagctaggggcaatggagacatccagaacaagtcttatctcacatttgagagaagctttacaagaacaggtttacatttatacattttctttcaaaacaacatctttcattgcaccggccagaaacctcaccttgtttttgtttgtgtccaggaactcaagctggagcaagtccgtaaccaccttcaggtttgaatacttaccaacaaatgtgatatttgttcctcagacattttatacatttcaatttacacaatacatcataacgttctcaatagtactttccgagacatgctggtctagcttcaagcttgtttagtgaatttgttcaaggaagatagacccaaatctaattagggttcttggttgcctttccaaacagaatgttgccttgtctttatgctatttagttgaattgatttcatttgtgctacgaattcag

SEQ ID NO: 29632 - DNA, 2503 bp, Arabidopsis thaliana landsberg
acaacatttctcattcatttgtttgtgttgtatatataatatttctattatgaaactgatggtttggtgaacttaaacaaaattttgatttggaaaagtattatgttcgtaataattggatcactgcttacgtagtatagttgaatacaagtttgaaaacattattttactaaagtataatcttttcaaactttaatagcaatgtttaaactgtgtggtattaaatattcattaggtctatgattgatgatgtaattacattagattctaatgtatgttggtggtaaatagataagactggcaggtaaaaaaaaaacaaatttcataaacagtagaaacatcaccaaaattgtgttcataataactgtaaattgtgttcataataactgtctcattatatatatttttcacttggcaaatctcctatttactacgttttgagaaatgatgttaagagaaatgatgatctaatataattaacaaatacttgagaggatgtttatacaaaaactacagagaatccaatccatccatatgaatagcaacattccacatgctgcattacaatctaactctactctataaagcaaatcgcaacgctttcttctgcggcaaacacacagattctaacccgagactgatgatctcgattttacctttagaggcgtctggatttgttaggaggtgcgtaacctgacatacccattccgggatctttccttcttagctgttgctgctggtgcggttgagccatcccgcgctgctgctgcagcggaacactcgggttaagccctgcctgtgccgggaaattataagccatcatgccttgagattgctgcatcctctgcatgttatgtgcaaccattggtcttggcatcgatctactgcccattccatgagctcctgccatgttccctgctacgtttcctgctgctactgcttgaggcggattgatgcttgtcgtgccttcgaaatcggtgtttgtatctactggacgagttgggtaattcacattcttctccatcggttggctggctacaaatgcgttccgtcctgggagaggatccattcggaaatactcgtgttctagtgcttgtgaagccgtgatccgctttagaggatcatattccagcattttggataacagatcatacgcaggacttttctgattcaggtgaaccacgttgtggagacccacactgtcgtatttgtgagcttgaatgtgttgaacatcattttgccagtgcggaagttaactagtgttgccatttatccatcgtcgggtggcctaagatcttgaatatcttgtcaagttgatctaactggaaagggttttgagacgatttcgcttctgctccttgaaacaacggtttaagagttagtaactccgcgaatatacacccaactgcccacatatcaacagcgctcgtgtagtgcttcgaaccaagaagcagctctggtgctcggtaccagattgtgaccacaactccgttatccgatagtggtttcaacggagcttgatatatccttgcgagcccgaaatcagctattttcactattccgtgctcttctgcatcacccataaccaagatattcgacggtttcaaatctctgtgtataatccaattactgtgaagatagttcaatccgttgagaagctgccagagcaaagacttaactgtgtatgtgtttaacgaatggccgactttgtctctgtggtgcctgatgatttcatagagatcgtactcggcataatcaaaggcaagatacagagacatgtctgcaaaattgatgtggacattcacaagcttcacgacgttctcatgggaaatctctctaagcaacatgatctcgcggatagcagtcggggaaactccatctccatctttggactgcttaaacttcttgatagcaataggtcttttaggcggagtcttggttctagccaagaaaacaagaccataagtgccttcaccaatcttaccaacgagattgtactgttgcagccactctggtttctcactagtgctgtttgagctgttggatctactggaactcccatctcccattgctttttagtattattctctacctcaatgtccttaccatgtgaatcggaaaaggggtagagtctaacaaaacaaaaccatcttggtttcctctttgtagttctcctgaaatttgaacaaaactttggaaaatcagccaaaggaatcaaaccgtacatgtaatctatctagattctagactcaatcaagtgatccagaaaacttacaagcaagaaacttaacagaaaaagatctaggactcctcacaaaccaaattccaaaaggaacgtttcaaaattagcagacaataaaattcacatccctcagaaaactttatatgaacaaattcagacacaaagactccaaattatcagcaattgacgtcttatcaaatcttatattcaaaatagaaatcatctacatcgagacaccaaagctcgagactttactttaaa

SEQ ID NO: 29633 - DNA, 2668 bp, Arabidopsis thaliana landsberg
acatttcaattatcagcgtatccgttgaataccaggtaagatgtgaaacaatagtttttatataaatttctttctccaaaatttgttgtaccgaataaagttgtggtcatatgttatagaagtaaggacctttcattgagagcggaccatctggaatcaatggtcctgtgtccttagtcggatacaaaggagagtaaacaatcgagaaggatctctcgcagcatcaatgggactacaagattggtttgaatggtttcaacaacaaacttttcagcataaaatctgctggtcaccaaaaatgggcaaacgaaaagcttcctactggtcggatgttgacatggtacaaggtcagtatcaattaaaactttctaaaaaaaaaaatatcattttgttttcgcaaatgaacggtttcttacaatgaaatgttatctcttcaggcaaagttcaaggctcctcttggtaaagagccagtgattgtggacttgaatggtctcgggaaaggtgaggcttggatcaacggtcagagtattggtcgttactggccgagctttaactctagcgatgacggttgcaaagacgaatgtgactaccgtggggagtatggtagcgacaaatgtgcttttatgtgcggcaaaccaactcaaagatggtaactaaactactaatggtttcttcattacatcacataactttgacttacaatcattaacgtttcattattctgatggccgaactcttgtaggtaccatgttccacgatcgttcttgaatgcgagcggacataacactatcacactattcgaagaaatgggcggtaacccgtcaatggtgaacttcaagacagtagtggttggaacagtttgtgccagggctcatgaacacaacaaagtggagttgtcctgccataaccggccgatttcagcggttaaattcgcaagctttggaaatccagtggggcattgtgggtcattcgcggttggtacttgccaaggagacaaggatgctgcgaagaccgtggctaaagagtgtgttggcaaactcaactgcactatcaatgtgtcttccgacacgtttggttctactttggactgtggagattcacctaaaaaattggccgtggaattggagtgctagattagatcttagctctagctagctagtgattgcaataattttcttaaataatttagattcatcaaataatgtcgtacttgtttttgatctatcaggtttttttagatgttttgggtctaggattatggaaataaatatcatgatcgaataaaattttctcctatttaatattttcccttgagatgcttttgattctgactttttttattaaatacaagtgagaacccttttttattttctctgttgcgttacgaaataagtttttcgatgagagaattgaacatcatgctatcacagtttcaaacatgttagtgttgtacttatacaatagcctcatttttatatcaacactaacctcattttactatacatattccattcctggatctattacattaacaatgtatactgtagtttctcaattgcattcttagttttctttctattttatttaaatttatttctaagatcttcgcatttagaaaaattgatgttaatgatgcaaatgagaaatttatttgaacaatgattctcttattagctgaggcgaagcatactttaaaaaattgaactttctcattacaaatcgtttgcatatagtgttttgcatattgtagtgtaatatattttgtggttaccaatgcacgtcgatacctttatgtaaatgctaaacattaggctagtataaaataatctcatttttccaaagtattcttaacatgattaataacaaaaacaaaatatatcaaaaatgattaaaataaaatatagaaaattcagaaagtgtggcaagaggattaggtaaagacccgacccgaacccgtttaagagagtaaaagacccacccggtaagagagttctagaccacttggtgcaataaaaagagaggagtcagtctatctctttctctctactgcaatttttagggttttatcctccgaaagtctcaaccttttctcttatcctcaacaaggtatcatcactctctcttcactttagctatctactctctctcctcactgtataagggttcacaacgaggtttgaaatttgggtggagaaagtaattgagttcgcttaatagtggttgggttttgctctaaatttgctgaatctgggtgaaagcttcatttctgcccatttgttgatctgtctctctcagtttcatattgattgagaattatgtgtgtgttttgacgaatagcagaaatggcggccactcaacttacagcatcaccagtgactatgtcagcaaggagcttagcctctctggatggtctcagagcttcgagtgtcaagttttcatctttgaaaccagggacccttagacagagccagttccgtcgtttggttgtcaaagctgcctctgttgttgcccctaaggtacttttctcacttctttgttgtttggttacttgttctggttgacaacttatctgaatcttggattgttgttttggccattcgttttgtattatacaatccaatctgctaaatgatgtctaaagaaactaagctttagatgcttctttcta

SEQ ID NO: 29634 - DNA, 2011 bp, Arabidopsis thaliana landsberg
  unsure (1)..(2011): unsure at all n locations
ttacgcacaagccccaccggcttcatattacggttcttctaccccggttcagcaaaatccggtttacccaagaccagcttcgtccgggttcgtcagaggaattttcaccggtttaatcgttttagtcgtcctcctctgcatctccaccaccataacgtggctagtcctccgtcctcaaataccgcttttctccgtaaacaatttctcagtttccaatttcaacgtaaccggtccggttttctccgcgcaatggacggcgaatctcacaatcgaaaatcaaaacacgaaattgaaaggctactttgatcgaatccaaggtttagtataccaccaaaacgcggtcggagaagacgaatttttagtgacggcgttttttcaaccggttttcgtggagaccaagaaatcggttgtgatcggagaaactttgaccgcgggagataaagaacaaccgaaagttccgagttgggttgttgatgagatgaagaaagagagagagaccggaacggtgacgtttagcctgagaatggccgtgtgggttacttttaagaccgatggttgggcggcgcgtgagagagggcttaaggtgttttgcgggaaattaaaagttgggtttgaaggaannnnnnnnnnnnnnnnnnnnnnnnngcctaagcctcttccttgtgtggtttacgtttgataattcttgttctctatggatatatctctctttttaattcatgtattggtctgaatgttcactatacaaattctcatagaaaattcttcgtacagtaaagttcaagaaagaaagaaaaaaatagatacgatttttcaatttagctcaagaaaagaatttaagatgttattaaatcaaatcatacgcctacaagatcatcgaatctttttctggttgaatgcaagtatatcaatgagatttagtgcatctagaatattgagaatcaggtgattcgctaattacttgtgtacgaaggtgtgtccacttatgggtctaagctagtcgagggtttgtttgtctgggtatcttcaatggtagtgtagctcatccactttggggaacctatgaatgctgttagagtttttgctttcattgatatttgtattatacaattagccaattctttgtctaagcggacatttttggctctagaaatcaatcggttcttgtttaataaaattttctttgttgactaaaattttctcaacactttgccaatcgaatactcgatcctcggtctattatgggtggagcaaaaaaaagaaaaaaaaagagatcagtcatatacaaatatctaaggtaatgcatcacgtaacacgtttgatggtgttgaaggcctaatatttggagacctttaatatgataccgatgcaaaaacttcgttttccgcaacttttcatgcgtgtgcgatattcaaatatcaccgcatgcatcagaaatatatactgaagaaaatttacctccaatctctttcttttttgtattatttgaattagctttatgcttatatacagattttgtgagatgaaaaagttaaaacttccatcaaattttatgatctgtctatttttaaataaataaaagttaaataatggctaaaccaagtatgggacatcaagccaatttagtattatgcctacatgggaatgcgttatactttatttacttataatgattagaatcaaatgcgattatctacaagtgcactcactcacacaagaggcgactactataagcataatttataaagattcgttggtgatgtgtattaaaaagggaaataataggggttggtgctttgtctttttgtaatgaaacctaacaaatgaaaatgtaacgaaggaaaagacactttgcattatgatcaaatgtacctttaagaaatattcgaagtctctagttgagctgtggggatagaaattgtagcttttaacgtgaccactttggtcccacccttaacgaaagaaaaggcggggaagtgtttttgttttcgagtcaatagtcaacgtccga

SEQ ID NO: 29635 - DNA, 697 bp, Arabidopsis thaliana landsberg
  unsure (1)..(697): unsure at all n locations
gtctctatcaaatccgagttcctgcattttattcatagtttccaagattaacaagagttcaccagattttataacagtgtgataatcaatcccatgtgaatagagtctgtcttaccatatcatactccgatctttcacctggacgtccccaaaactttcccaggccttgtcaatcaactgacaacctgtgattgtttcacggtaataaattgtaaagaaaatggattgcagttgcaggtgagagaattaaataaatgcagaacaagttcagatcaatgtttaccttcttccaatgtttcttgcgtgcggaacacagctgcgttgttctgcataatcctctgcatgttcaatctgatagttgaagtannnnnnnnnnnnnnnnnnnnnnnnnnccgtgtcagccatgcaatagtcttctcacccgcatccttctcaagaggtttctgtttctcccctgcaccaatcgaataaagaaaaaaaaaatgatcagaagagacttatcttttataataacagcagtcctcaaaaaagactaacctggtttgcttatctctgcaaccctatttgcacaagcacgaccaaacacgacaatgtcgagcagtgaatttgcaccaagcctgttggcaccatgaacagatgcacaagctgcctccccagcagccattagcccaggaatcactgcatctggatcatcgcc

SEQ ID NO: 29636 - DNA, 1556 bp, Arabidopsis thaliana landsberg
  unsure (1)..(1556): unsure at all n locations
gcaatttgacatcacaagaacctacaatattctgaatcttgaaatcctgcaggatgtaacaattgaatatatttagtataagcaaaagtaagaaaaaaaatgttggatagggaaaaggtttaaagaaattgtaccttgaattttgcagggaatcccaatttctgcacaatcctagcatactaaacaataaaacatctcctattagcataaacaaatgaggagcaaatagcatactgcaattattgctaaagtaaagaagaacagatctataagaaagttaaattaaagaggttaaagattaaaaaaatctacctttctagcagccatcttcgaaaagtcctcgctcttagctccagtacagacctaattggagattagtcgccaaattcagaagagaattcaaaccaatgtaattaaatttcagaattatgaaaaagtattgccaaccaaaataactataccattttccctgaggcgaatattaatgctgtagtcttcggttctctgatcctcattatcaccgcagcaaaacgctggaaacataaaacacaagaggtattacataagacgagcttagctaaggcaaattagtttagcaaaagccaaaaacagataatatcttagattctaattaatcagtacacagtatatagaccaatcagatctcaggtaacaataaggtcaactcaaggagagagtactcttccaaacaacttttctaccgtttattaaaacaaaaagtcacaatataatgcaaataccttgggattatattcagcattccgagcctgcaaagctatggctttaagatctagcttgcagtctaagttcaccgtggagacaatgtttctgaaacaaaacatcaaagatgtcaacaggggtcaaacaaacacttaatcccaagagacaaaaaacaaatacgaaggcacaaaagaactcactgaagagtaggaacaatcnnnnnnnnnnnnnnnnnaagatcaactggattactcccttccaatccttgatcagtcattcttctatagttacacaaaaccaaaatcaacacaatcaaaataagcaatagccagaaaatataatagacactagacacgatccaagacaatatgcttaaaagtcttatcagatagacttatcattcaaaagggtttcaattatttgagaatacagagccaattttagatttcatcttccaaaacaacgagacttatcctcttaaggtgatgaaactcataagatctaatcgaaaaaactcaggaaaaggattaaaggtcagacctttggatagcgaagaaatccgaaatctagggtttcgtagctttaagacgagaaggaaagattcgagggaagagtttgggcgaaaggaagccgaagaattgagaaaaggagaagccttttatacaaagaattgagaatcgaagagggaaaaagatttataaatcggtgcttatataaggggagagtgaatttgtttctctcgcttctggtttttagatctgtgagagagaggaggtcatcgacttgcgtttttgatttgggatccttaagccctt

SEQ ID NO: 29637 - DNA, 844 bp, Arabidopsis thaliana landsberg
ctcagtgtttgcttatcttttacatagaacaccatcaatgttttaagtatgagtgcgtgtgtgtatatatatacatccttagccacaacgttgtatatagctcacaacaaaagaaaaaacaaaaaagaagagaaaaatggagaattctcagagtcagggtaaaaacaagaagaagaggctaacacaagatcaagttagacaactggagaagtgcttcactatgaacaagaagcttgagccagacctgaaacttcaactgtcgaaccagcttggtctacctcaaagacaagtcgcagtctggttccaaaacaagcgagccaggtccaagactcagtctcttgaggtccaacactgcactcttcagtccaagctcaaagcagctctctccgacaaggcaaagttagagcatcaagtgcagtttctccaagatgagctgaagagagcaaggaatcagcttgctctgttcacaaatcaagattctcctgttgataattctaatcttggttcttgtgatgaagatcatgatgatcaagtggtggtattcgacgagctttacgcttgtttcgttagcaatggacatggatcttcatcaacctcatgggtctgattctgttttcgacgcagacaagattccaatatatatagtcttgtctctgttttgtttcgtttgatctgtttctctttgtctgaatagatttaaattttgtaattaaagtcattcagacattcactaatacaaagagatgattttctttcatttcttggtatgggtataagaatatcaagaattgcaatgttggtacaacacaagaaaccaacaactactccatggtctaatttcatc

SEQ ID NO: 29638 - DNA, 3080 bp, Arabidopsis thaliana landsberg
gcttctctgcttcaaacaccatcttcattgatgatgaaccatataaagctcttcgtaatcctgtaaaacactcgagatctctattatagtgttgtctatcgacaagtttgtagttcttaatcctaactctaatcaatattctttatttgcattcaggacaatactggtctcttcccaatgagctttgatgcttctaacaaacaggataatttacttggtatgcaaaatttaaacttttgatgttcacctcttaactttagacatgcgttatggtttatatgtgattggtctttattttgttagatccataaggtgagttctgttcttacttggatggtttggcaaaatcatctgatgttcaggcttacataaaggagcatccttttggacagcccatgatcgattcttctcatcctgattggtcttactaccgcagagtgtctaagattgtctcttaatcttgcatgattattattttattttgatgaagtttcgtattctcaataattctctccttttgcttactatttaacacattaaaagtctagctatttcagttctaataataaagttgaatatcttctgtttcattctttgcttacatatttcctaagtgtttgaaatttaagcaatgttacgatatgttgaaacaaacggaagcaaatgttaacgaaataagttttattttgtccattggattgtgaagaaaccaatatgctgaatgttttaaagttcaaaaaagaaataacatcgaaaatttaacaatgaagtccaacggaaatgaaaattatagcaaagatcctcagtttttaagaaacttttatgaacttaagagactaagtccaatgttaaaagtttttgatgagattacttgtcttgctccggtgtagagctgtaccaccctagagtcagaaactgagaagggttaaactcatcgttcatctcctcagaatgagaaggtcctatcatctctggtccggtgaatgaggaagccaataagtttgggattgcaggaggaacaaccacagcttgggactcatcgttcctcttctgagaatgagaagggcatgcacatctctgcttgacgttggacttgtccagtgaatgaggaagccaataaatttgggattgcaggaggaacaaccacagcttgggactcatcattccttttctgagaatgggaagggtctgtcatctctggttgacgttgacttgtccagtgaatgaggaagccagtaagtattgaactgtgggtagaagaatcacatcgttggactcatcgttcctctgccgagagtaataagggccaatcatatctggttcctggacttgtcctgtggatgaggaagccaatttgttttgttgtgtggctgaaagaacaaccatagttctgttggactcactgttcctcttctgagagtgagaagggccaaccatctctggttgttggaccggtcctgtggatgaggaagccaatgtgtttggtggtgtggctgaaagaacaaccatagttctgttggactcattgttcctcttctgagagtgagaagggccaaccatctctggttgttggaccggtcctgtggatgagaaagccaatgtgtttggtggtgtagctgaaagaacaaccatagttctgttggactcattgttcctcttctgagagtgagaaaggccaaccatctctggttgttggacctgtcctgtggatgaggaagccaatgtgtttggtggtgtggctgaaagaacaaccatagttctgttggactcactgttcctcttctgagagtgagaagggccaaccatctctggttgttggaccggtcctgtggatgaggaagccaccaagtttggtgttatggatggagcaaccctagctttggacacatacttcctcttttgacgcggatttgtgatcaacggccagaaacttccaatcacaacctattaaaaagggaattataagatagtttcaaacattgaaccatgcataaataaagaagatgctttgtgttcttacttggactggacttgctgcaatgagactcccagccaaagcaccaccatggacacgtccaccagcagctccaccaatagtaatccgccaccctcctgtcttatttttcactcctccgctctcagatatcgccattgtattattggtcagcgatactatctcatactcctcctacaccaagttgttatcattttcttatccatgtaagacaacttattaattctatatatagaccaaactttacaatgcatctttccaatacatgaaccattaggttataagattgcattgcaagaccaagtttatcatataaatatgtaccttaaacgtcatgaccctgcggcttgaaccgtgaggtagaatcgtgacgttagcaaccgcaccatttactgacaaaacactgatcccacgagaaccatttgcagtgaaggacatgatcctcttgattatatcctgtaagaaacaccatatataaaagacaaataaaaacctctcatcttcaacacatatatgcatatacaaagaccacataaacaaagctgttgccttaagtccattgtttcatctctctgttaggtcactagaactaatcttatctattccttccatgtttataaaattagtaggagtgttaaagtgagctagttcactcaattccagtcaacgtataatgaattagaatattaatacttcatggtttagttaagttcagctcatttattatgagcttgtatttatagatttgaatccatatcattcgacattgtaaacatatgtaataacaaaaaataatccagaaaagtaaacctctaaacaaatatatccagaagaaaccctacctttaagagccaaaatattcaaacaaaaataaacctaaataaatagttgtcgaatgcaactagtgtataatggaagtcaactctcttccatttgaaagttttagatgatgtaaatcccacgaaaacaacaataaataaaaaccccccgttattgtatgttgtaaaccaaataaaaacaaaaatattccgaatctattcatgactcatagagttattgggtattt

SEQ ID NO: 29639 - DNA, 3518 bp, Arabidopsis thaliana landsberg
  unsure (1)..(3518): unsure at all n locations
aaacacacactaaaagtaaactctaatttatttttctaaataaaataagagagtttattttttatgaattaaaaaaagctaaaaccacaacaaaaagcaacttgggtttggttcatgtttactcattgttttgtcctatacgtcaaccaaatctctcatttgatcggatcttaatattaatatggttctctcaatattttcttaagaatattctccaccttaagagtttaatctcaataatatattacaacgagttattgaatattagagagatgttttacaatataaacttgagggaaaatataaaagctgcaatcttgtaattgtaagccattagagagacaaatatgtaaaataacaagttgagttatcataaatcccaccttagtcctttaccataaacactcgtgcactatataatcgtcactagaagagtataagtaatgaagtattaatattcctacaagatagtaatagttggttaatatcaatagattataattacgttttgagaatgggaggtttaggctcaccatgtggaggatgcaagttcttgcgtaggaaatgtgtagagggttgtgtatttgcaccatacttttgctacgaagaaggatcttctaattttgcagccattcacaaagtgtttggagctagcaacttctctaagctcatttctcatctccctgatcatgaccgatgtgacgccgtacgaaccatctcttacgaggctcactctcgtctccatgatcctatttacggctgcgtctcccaaatcttctccctccaacaacaggtattatactttttcttcggaaatgtatacataatttttttttgcttttgcttcatcatctctagtgtacttacaagtaacttcactgactttgttcttaaggttgttagtttacaagcacaagtggttctacttagagaagaagcttcgagaaggttccctcaagatgatcctggttgtaatatgaagcaacaagaaaaggttcttgctcaacaaatgccacaagatcttcacaattggtttcaccaaggaatcttggactcagacttcgacccaatgagtggtactacacgcgacaatgagcggtccatggatcataatgagtctccttgtagctcaaatgaatcacttaattactaccaggaggtcaattttccttggtctgtttgagtacaagtgactactttgtcagagatggaaccttacaatctttctattgtatcgacttttcgacatttttcatagtagagatcgaatcatgcaaccattttctctttgagaataaccacttcttcgatgatctttcataggtacaacatcagatctgaacaagtgtcaagtcttaagaagtgtcattactgagaaaaagcataacaaaatgtagtgtacgctgttttaaaaccagaaacatctacaacgccagagagttaaatctgtgactacatgttggattcgatttatcaaaagacatttagttacaaaagttaagtcttcgtgttggattcgatttcccaaaaaaacatttagttaacagaagtgacgtcttcttgtttggttcaggctcatctcttgtgcttaaaccttactttcaacaagaactgcaacttcacctgttcagagacaaagcaatctttgtcagacatgtacacaccataaaagaatcaaacacagaatatgttgcaaaactaatagctaaagccgtattctaaagcatgagctttctagggaattcagttctcattcccaagtacccgataagaacaaaagaggactttagtgtgtgcgcaatatcccattgttgtaaggaacaaggaagattattttggaaacacaagttacctgggctgtatcgtagacgatatactcattgtacataagctcagaagccttgacctttgatgaaacaggttttccacagggaacagtcacatcacctctccacttggcaaactcggaatcttgaggcactttcttgccgagccctttggtcgagtgtttccctctcggaggtttatccatatactaaagaattgaggacataagagaaagtcatatatgaaggtaagtaatatcttaagttgttcatatagttttcaagataagaaccaaatggttagtagcataacctgaaaaactgtaatatgggctcaccttagcttttgttagctcatgtatttctcccaatgcaacttcactcagaagcattagacccaccggatttttcttacaagtgtagcagtactgagcacttttactgacaaggtcagcaaagtatatcccttttccaaactgaaacatggggtttaaaaaaagttcagattctctaacaagttaactagatagtgaagaactctcaattgataagatccccacaaataagacacagatagagtactgaccatgtaaccagtagcaggagcttctggaggtgcaattctcagtccttggttcaatattccaacaaaattcgttaatcgagaacctgaaagcagatttattttggttaaaccaagggttttgatgatcaaccagccaaatatatagaatcaaccaaacaatgaaatttcttgtatctgtttcccaaagcatgtaaatgtggctggttgcagttggcttaccatgccataggagcatctattgcaaaagttnttctctgtggggagcatatttatcaaactctccttctctttcaagagcaaaaacttcctctagctcaagactccactcctgacaaatccagtgaccagaaatggaattagaaaattatgataaacaaaacatgaaaagggataaacagagcttgaactcactgtatgcgttggggcatgagttgtgttaagatacttctcgattaatcgataatcttcgctatcatgaggaagtggtgagatatcgcaatgcagcttcttatacttatcatcaagagattcggtgctatcaacatcaaagccaactattcttgaagctatttcgatatcctgcagagcctcgagcattttcacctgtgacacacagatacaatacctctttgtaacacagaaaaagaggctaggaattaaaaaacaacaccatggttcatgttctatggcaagtacctttgacttaaagtcatcttcatctcgaataatatgaggatgaataaaagggatcatggtaaaaaatctgttactagcatctccaagcaagctttctttcatagtaggctgggggtcgctttcagtcaatagcctctgtatctccgtcaatgcctcagaacctttagaagagctatcaagaaatcacataatagaatgtaatgtagaattaacattttattatttttatcatataaaaaagtaaactagagaagtaggagttacccttctgtatattatgtttgctgagcttcccaagtggcatgtctgacatgtttatctcgaactcccccaccgcagatctgcggaagtaattattagaatacaacatacagtttctagggagagaagaggagaagaagccaatggca

SEQ ID NO: 29640 - DNA, 695 bp, Arabidopsis thaliana landsberg
cattcattatatgtacgatgattttacctctctttaatcccatcttctcagtctcaacgccataacgactaatccaccaccatttctttttctccgaatctgaagtgtgaaaccactcaacgactcatacgacgccgtttcgtcgttccctttgtctacttcttctactttgtaaggaaccaccgcgaaactcatgatcctcgatacgacggcgtatgtgttatctccgtcgtcgtcttcttcgtgggatttaattggacggctagtgtttaatttcagccctagatctcggctgaatgatttttccgacggtacgaaggcagtgaaaaccagatcttctggtagcatttcgatcatcatcttcccgaataaaccgagttcatcggtgagctcgtaacggagtttgcggagatggttaccggcggcgagaggtgtttccggtaatttgagaaaggagaagattagtatagttagggaagaaacagtgatgagtagaagtaggaaaaacactggattcttcaagaaatgaggtttcttcatcgtttttgttgcgttgatgtcatcgatagagctgcttaaaggttttctttagagggagaagtaagaagatgaagctcaatttgggaaaaaggaattcgtaatttacaagttagaacgtctcgaaatttggattagggtgagcttttatgattttg

SEQ ID NO: 29641 - DNA, 2398 bp, Arabidopsis thaliana landsberg
caaccgagtttcttgactggtgaaggagcattgcagaatgtgatcgacttggtaactcaagaaaagatcgataacatggggatctcttctatctaagaaacaggtcagttgatattcatcaactgttccaaatgtatactagatatatatgcataggagatatctttatcaaaaaaccatgaagtaatttcattgttataacttataagaattctttggttttagttattcctaataataataatcaacatccatctcaacgatgaggttgagatgttaatacatatcttcctctgtttacttttccatattgcaacttgtgcatctctcccctcttgagctgttgcgtgtggtccatccaattctttgtcatatttaaaaaatgaatgctgacttgtacccaaccatgagacaaaactctggctgctatattctttaaacttggtccctcttgcaacttgttcatctttctactcaattcactgattcacgctttctggacatgtgaactaattaatacctcagtgatatcgaatagtgaatactgaagccaccccacggtactgtttgtgtcattggagaaactttaaggcttatgttaaggtctttcaggtagaaattcgattttaagtatcacagtagattaataaataaatgtagtcgatagatttaggtcctcttgtcttcccaaatagtgtactctgaataaaccgaaaggacaagaactttgtttctagaaccttaagctctttaagacaagagaaaacgcagaagttccattgttacaggaactctttagtacatattttgcaagagttcttttcagtacactagtctaacaggttcttggctctatacatgatgcttcacatacttaagatattaacctatatatactaattaaacatcactattcccccattagtttgatgacgatgatgaagtacttgttgttgttccttgaggctgtggtacatcggttctcctcctttttcggcatgaattgaccggagcatcatactttccggcatccaaaggaaagttgagaacagcttttcttcccctgagcttaaaagctgcatagtcgtaagcccttgcagcatcaatatcactctcaaaagtgcctaaccaaatcctggatcctttctttgccggatctcgaatctctgctgcaaatttcccccatggcctccttctcacgcctctgtaatgtctcgtttcttcaaacctctttgtttttttccggtttgagacagtctcaacctcaggtgacgttgttgttgatgatgatgatgatgattctgcttccatttgcagaatctcttggacataggaatctggatcaagaacaggtgaactaggttccagtttcggaactgggttaaagggttctagagaccagagtccggagacaaaagcagtatcatcaaagacaaaatcttcaatgaaaccatcagggatcatcaagtcttcaaatagatgtttctgtataacatccaaatcagagctttcctcaaaagtctccatttcttcctctctcttttttctttagacaagacaggagaataagaaaaactgcaagtggtgtttgaagaaaaagttttgatgatattgttggctatataaagaaaggaatcctaaacatgtgttaacgcagccatgggtgaggtgtcaaaagtctctctctgtgtctctctggtttaactctgtggggccaagtcttatccattaaacatttatggaggcaacttaagatattttgtcaggacccttcaagttgtgccaacttgatcttgtctatgatgctgacaaatttcactaacatccattttattcctctagagtttaaaataccttgagctacccatggttcgaatcctaagctgaatgctaacaaaatggtgattattttttttaactagaattttgattgagttggttaaggacgtaggttcatttgaaattttaaatctaaaacataacacaaaccaaaaccaaaaagacttgaactactagtgtttataatcgtaacttaagtctttaaaagccaatctctcaaaagttttttcttttttttttttatcttaaaagttttatgataagattgatatatgattttcgtagtagtaatgactcactaggtaagctcttaaatatcaaaagatattttgcatattcacattcgagtaaaaagataagaagataatgcctttcactcgaataaaaaggagagacaaattcatcaaattgcttgtcttgtagggttgtcttgctaggatatgatttgaagcaacttgatatttctttgttcctacctaacttcgtatagggctccacatatataataaccaaaccttaccctcttgctcagttgcttgacaattatactcctgatctc

SEQ ID NO: 29642 - DNA, 1855 bp, Arabidopsis thaliana landsberg
  unsure (1)..(1855): unsure at all n locations
gtgctacttgctcgtactagataacgtagcgaatatattgtactaaactaacaaccgtttttcttattctctcaaagaacaaatcatgatgggatcagtgatcaacactatcgttggaaacttgaagctgtcaatttcaaatattcacataagatatgaggatctagagaggtaactagattataacagaatctttgttcttgattgtctacccatttgtataattaacagcctatgttataagtgcagcaatcccggccacccgttctcagctggtgttactctagagaaactctcagctgtaaccattgatgagagtggaaaggaaacttttattactggcgggactctggactccatccaaaaggtatagatttgttcatgaatatctgaatgacacaagcttttctggtcatatgcctcagtttcctagtttcgtttctcttatgagggttttatgttaagatcccttgcacagttgcacttcttcttgcttgtaggtagtagcttggtagtttatgattttaatctagttcaatcagttaagtttaggtgcctatagtaagaagcacggaaattgaattgggctgctctctagaagggttagtgttctgtaacagatctttgtatgaaactaatatctggatgactgcattgggaaaggaatacccatgccaagaaacaaaagcaggggtactttacatttatcttttcttgctaaaattgtttgcttttgcctttttttttgcagtctgttgaacttgatcggcttgcattctatcttgattctgacatgtctccgtggcatattgacaaaccatgggaggttttaactccttttgagtgggatcaggtagtgacaagctaagtcatgtatatatagtggaaccagaattatccattgtctcttacccaaaatctaattttcggtgtatgcaaatatctagatttttagatatggaacaaaggatggtaagccagctgactgcctcacgagaaagcatttctatattctgcaacctgtctcagggaatgcgaagtactctaagtcccaagcaaatgaatcttcaaatgctgttcaacctttgcagaaggcatatgtaaacttagacgatgtgacactttgtttatcaaaggtgaaacaaaacatttaaggcgtctactctttttctatttggctgtacccggtgatcttgattgtgtgtctttttttgtactcagggaggatacagggatgtcatgaaacttgctgataattttgctgcatttaatcagcgtttgaaatatgcacattaccgtccatctgttccagttaaaatcgacgcaaaatcttggtggaaatatgcttacagagttgtttcagaacaaattaagatagcaaggtatctaaatgtaaacctttatcttttttttttaactgatgccggctttttgcgtaatttgcatcggttgtggaaacatcttcctttgcagttccttacgtaaggttttgtttacattttctgagattgttacttttatgacagcgggagaatgtcatgggagcacgttttaaagtacactagtctacgcaagagatacatcacacaatatgcttcgttgctgaaatctgatatcagtaggatagttgttgatgatgatgaagaaattgaggcccttgatcgggaacttgataccgatgtcattttgcaatggaggtaagctataaagcttaaataatagtaatttttagttgcatcctagaatatcagttagttttttcaaaggtttcgctcttgtatcgttctaggaaagtttagaacaaaatctttttttttcctttctgtgtttgcttccatgnaattgctcggttttc

SEQ ID NO: 29643 - DNA, 1815 bp, Arabidopsis thaliana landsberg
tttaattcgtgagctaaccaaagtctaaaatcaattttagctttgaaaaaattgagagtgtgatttgttaccaaaattaaaaaagctgagaaagagaaggatgagagagagtgtggtgatgtgtgcgaaagaagagactcgatttagggccacgaattggcgcgaattcgtagggaagaaacaccgaactcggcgaagaagaagaacattatgccactctctgaatttttcattcactattctctcttcccgttttttccgttttctacacctctttcgatcgaatctcagttttttggtgactcgatttcgtttaattttgttctgctttaccctaattctcgaggctctgtggacttatgcagttgtttcgtttcgtttttgggtaatttgagtggtgttgaattgtgattttggggtttctcgatgtgtttatttaggaatttacataatcttatagcttccttgtgtaacaagtcagtttctgtgaaatctacccatggatagggtttcattaaaatgagcattgcatttgaagcttccaaatggtatgtcattcattcattgatttaaatatgataatgcaacattgagattcgaaccggagatttttcaatttctcgattagtagcatgtaggcttgaaatctaagagtggaagaacaatgagatgagaaattcagtgactctgttcttagattagtatattactcggtattcacattgagtatctaattactaaatgtcgtagatcgcctatcaaaacgctagttctttgttcataaaattgcagggaactccggttaacatcattgtaggctctcatgtttggattgaagattctgatgtggcttggattgatggtctggttgaaaagatcaatggacaagatgttgaggttcaagccacaaacggaaaaaaggcgagttaaaaacatatttgagtttccatataattgaagcctggaatacactgaagctgatttgctaattttttgtttctgtgtagatcactgcaaagttgtcaaagatatacccaaaagatatggaagcacctgcaggtggagttgatgacatgacaaagctatcttatttgcatgagcctggtgttcttcagaacttaaagatcagatatgaacttaatgaaatttatgttagtacctaaattttttctttactttttggatcttaagactctgcctttcttgacagtttcttgcattgtcttgacagacgtacactggaaatatccttatcgctattaatccatttcaacgactgccgcatatttatgatgcccatatgatgcaacagtacaagggagcaccatttggagaattaagtcctcatgtttttgcagttgctgatgttgcgtacaggtgctcttatttgtcagcttttaaccttattatatacttgtggtttgtgttgtaagctgagatgcgatatttacgttcagggcaatgatcaatgagggcaaaagcaattctattcttgtaagtggtgagagtggagcaggtaaaactgagaccacgaagatgcttatgagataccttgcatatcttggaggtcgtgctgttacagaaggccggacagttgaacaacaagttcttgaagtatgatgttctaatcaatctggattgtcttttagattctccttttacgtttctgcaatcttgattacataatctttcacacaccgtgataatacgcctgtaacttctgcttgcagtcaaatcctgtccttgaggcctttggtaacgcccaaactgtcaggaataacaattccaggtgaaaaaacctatgcataaatcatt

SEQ ID NO: 29644 - DNA, 1957 bp, Arabidopsis thaliana landsberg
ctccgagcataagcgatcaagctagacttgccactgagatctccgttgcaccaatgagattagccttcgatgatggaatgccggtttgaagtatttgagctcccacaacgccgtaagacatgtgacctagccttgataatacctgcatttgtttgttaccttttagtcaacaccaaaaccgcatattactggtcgagagagagagtgaagaaagaacgtacgatcatggacaagaagaagaagagtgggcttttatgggatagagaagagctacaatacacagcaacagcaacggcaaggagtgaagcttggaaaaacaatcctactgcacccgcctgcatcgttttaaaacgcaaacgcaataacattaatcagcttgaacgcaatacaagctcaagataacaaatggcgggaaaacatttcacctttaaaatgccaactcgtttgaccaagtttgctgataagaaggttgcggcgacgcccataacagcgcataatccactgaaaccaccaataactgatggattcacacctgttgaaaaaagacagcttggtgactaatttgtaagagtaataggtaatagcacaaatactctcagacttattaatgacggttttcatccaggcactaaagaaaagtaagggaccgagttgaagtagcgtacatcgttgtgttagaaatgcagtcatcaagctgcccggggtgaggacgatgttaaagtagagaaggacatatgcgaggctagcaggaagaactggctgttgaatatattctttccatccgagcttgatagtttccatgccaacatcaactgatgaacaaagcaaatggtatttgtgatgtctacatgctcaagtcatataatatgcttatccaagcagtataaagtaaaaagtttccttacaaatactctccgtattagtacgaagtccttcagcagaacagctgttcaaggagcatttaggacggtccagaactccagaggagaacttgttggtcagccatataagagctgtctgaagaaagcagatttcttctattagaagtgcaagatggtaagaagtcccatatatattggtaaaagcgcaagtggaattgcttctaggatctgaagcagaacagcatcactccaatgttgattacaacacatttatctagttaaatgacctaataatactgggtctaggttaagctccaatacttctcctaaactagaaaaactgcctttttgatgaagaaaaaagaattccacacttgaaatataagaaataggaattactctattacacatagttcagcctcatataacacaggagctttgtgtttcctttatttagcttggacgaaagaagaataaccaaaagtttatagggaattgctacttaccattgttggcaaagatcccaccattagtgaggcagcaaactttaagcaggtcacagggtcatattttgataggagaatgccaaataacatcgtcccagcgatctatttaaggttacaattatgtcatttgatgaattactggtgttcaaagggcataaagcacatagattccatagagaaaattactatacctcgcaaagcagatctattctgtggagaacagcatttgcttgagcaagagcgattggtctgtttatgccggccaactaccaaatgataaattaattacttcagtcggtttatcttcttataaaaacaggtattctatggcatcacaaagaaagcataccaatacaacccaatcacgttcaatggcgactccagatgctattccacatagactgtcaatggcccctgcgaataacaatgcaaaaaaccaaggctgcagaagaattgatgacgacgatgtggaaggaaccgtgtatgcatgaattatcattcctgcagatagcacttgagcggctgcctaaacatgtagacataaaataagtttatgacatggacacttaa

SEQ ID NO: 29645 - DNA, 767 bp, Arabidopsis thaliana landsberg
tcaccaacagccatacactcgtacccatttacactatagggtttttgatatagcacctctgcatcggttgagttcttgatagatacttttggcatagaatgtgtagttggtgagagcagtgttaatagtcgttagaataccacctgggtgatctatttctttgtccgtcctctctgttgtttcatctcctataatgcttaaacaacatattttttatttttacattttgagtttgcatgttctttctaatagctaaaggatagttgaaagatctttagactagttttcagtagttattctttgtagatttttcatgttggtagccagagatggaagttactatatattacgaatcttatcgtaaaatgtttctttgaggaatggatataaaacctgaaagtttagtttaactgatcttccactggtacaaagcctcagtaaggacccaagtttgaatcctgcttacggttgcatataacttggcggatcaaatatgtcttttgctgctgaaattcacgttcttgcttgacttgtattcatctttttcactcatggcaatgaagaacaaaagttctaagtatttcagaacacaattcggaagatttttacaccatctgattcttgtattgtctgtcttttgaatgaaatacttttttcagaaggtggcgaatcatgctgctcggtggaacgaagcaatctcggtagtgaaacgtgtgcccataatccggccagcacttccgtcatcagtgggtatgaaccagtggtcc

SEQ ID NO: 29646 - DNA, 1192 bp, Arabidopsis thaliana landsberg
actgaaacctaattaaaccaagccgagaagcttttaaatcggttcttagtttatccgggcaaagcttatatgttaaataaaacagacgagacaaaaagagtttccatgtacataggaatatgaaaacaataatagaatgaccttcctagttctatatatcacctcaacttcttactcttggtccacattttcgatgataaaaacctgcatctccaacaagtcaccacgcaataaactgtgaggtatcaacatgaaattctcttgaggggtttcaaaaatcactttacaaaccctcttcacctccggagattcataagtcacagtgtgtccatccacattgtaggagagttgatatgagaactctcctacttctggagcagatggtgcaatgaagcttacagtcacatacacaccacacggttccctaaaacactgcactgcaagcaatagtttcttctcatgtacccttttaattagtatcttatcgctgatgagcatggaggtcgtaaagaaattgccacatctaaagcgcttaatattccagaaaatattcgtggagtgagtcagtttatagtgagcgtagagatccttgtatgagccagtgtaatcgcagaccgatgaagggcatgagcattgagagaagatgcattctttttcatgagctgactctttcccataaaagaaactcttggtacaaccaaacctgacgtttgggcatgggatcagaatagattcaagaacactctccattgctctgctgcgactgtgaccaacaggcaaagtacatgcagggcacttattactcagtttgggacagcaagaaccgcaagccaaatgcccattatcacactgaaaatattaagccaatgaattttcattaaaagctgtcacagtaacaacgtagagaggatataaactcgtccttgcaaaactatctacccacatatatattttcaataactgcaaatccaaacatgaactagggatactctacttctatatttactccaaaattattatactcttcataatgcaaagtttaaaagaaagttgaaaccattcattcagaaagaaggagaaacaaacaaaacctggaagacaggaatcttcaatgcttggtagcaaatgggacagtcgagaatatcaagatccgtcagcatcgctgagcgggtcttacaacatgaatccttcc

SEQ ID NO: 29647 - DNA, 2078 bp, Arabidopsis thaliana landsberg
gggcatcaaagtagcaactgcaagcccctcagtatctcatttgttatttgcgtatgatagtctttacttttgtaaggctgataaagaacaatgcggagtaattttaaatatcttaaaacaatatgaagcagtttcagggcaaatgataaatttttcaaaatcatcgatccagttcggtcataaagtagaagattctataaaggcagaaattaaatcgactttaggtattcatgatatcggcggcatgggttcttatctcgggttaccggaaagtctaggggttctaagacaaaaatattatcttttgtttgagatagattacagactagaataaatgggtggtcggcaaaattcttatcgagaggagagaaagaagtgatgatttaatcggtagctacgacattgccatcttatgtaatgtcttgttttaggcttccgaaaacaattacttccaaactaataagtgcggtcgcaagattttggtggagctcgaatggtgaatctagaggtatgcactggatggcttggaacaaactgtgtagtagtaaatcggaaggtggcttaggttttcggaatgtaaatgattttaactccggctttattagcgaaacagttatggcgtctagtttcgtttccggattctctctttgcaaaggtttttaaagggagatattatcgcaaatccaatccactggataatataagatcatactccccatcctatggatggagacgtatttgttccactagatctctggttaataaaggatttattaaaagagtcggttctggggagtctcagtgtggaggattcttggattccaactcaattcccgagaccaccataactacaacaaaacctgccatttgcaactcccatattagtcccaaaatggtcgcaaacaaggtttttacaactacttaactacgatattatacagtcgctaaaaaaccgtcgcaaaatatagtagtcccaaaatggtcgcctattagagtcaaattttggacacataaggttagtcgtaaatacatgactgatttgtgatgggtataaagaagtggcagatatgcgactaaactgcaacgacgtacatttaggtacatacattacaatatagtcgcaaaatagtcttttatgcttgcgactaagttacgacgccttataatgtaatcgcaaaatagtaccgttttagcaacgattgtgccactttgtaacaattttgtgtaatttgatttagtcacaaattggttacagttttgtaatgtgtcgatcacattattgtcacatattttgaataagtttggtcacaaagtggtcacaattatataattggtttggtcacaaattagtcacatgtattgttttggtttagtcacaaattggtcttatgtttggaatgataagcctcatttatatcgattcaaaagccaataatctctaatcatgttaacattaagacactaattatgtttacattcagaaaaccatagtcatacaaatcctaaacaagtttcaacaaaaacaacaaaagcaacataagatcaagtttaatggttagaagaagtgttagaaatagtaggtgaagtggagactaagggtgtggtgcctacaactgtgatggctagtgcggtgtctgtggtggttggaagtgtggatggagttgtggtggttgaatgtgtgcctggttcaggttcagtagaatcagttgacaaataagcagccaactcaggatctttttctttcatgaagaggacgagcttctccaagttggctatccgagattgagattggcagtgctccacatcacgttttgcattttgctcctcttgttcagatatcttgagctgtagctgctcttgaagctgcacaaccgttgatgtagaagagctcgcataactctctttccttcttcttttgtttagtgtctccacaagtgatccaaagccaaaatggttccctttgccatctatgtgagtacattgaaacgagaagacaaatacagtcaccaaagacaatcataattactctaagtatccattgctcataatcaatcataatccaagcaaacaaagacaag

SEQ ID NO: 29648 - DNA, 2342 bp, Arabidopsis thaliana landsberg
ctcagattgtgcttcctccggtttcgcatcggttaccacagtttttacttcctccggctttacctcagattgtacttcctctggctttgcatccgttacctccgattgtacttcctccggcgttaaatccgcttctatttccggaatttctccggttagtttgggctcagtttggagttgtggttccggaatcggattttgctcggtttcggactcagctggtgccgctccattttgtaattgaggctcttcaacagtatccgccattagagaagctgaaaaaagatcgcagtatgttacaatccgagactgatcacaaaataaatcaagtctcccaagaggaagaagatgaagaagagatctgatgtatctggaaattgaaaacgaagaatagttagtttgttacagttatacacctctagctcaaccagaggctcttaaaaccaaataaagtcaagtccttcttttagcctcagcgggttctcgtttggctaagtttttctacatttaattttagcaatagtgaagacattttcatgcgttttaggacaacggtttttatcacattttatgtaacaaataacaaagaatgcaacaaacaagtaaagagagagaacaagagtgaaagatataagtagtcttagatcttgtcgtgaagattgacgactaagtcatgagcatcgtctagaagtttccaaacatcaagatgaccagccatgctgttacattccttcattatctcatccatcccactgtatttctctattatcgtcttcctcctctgcagcacgcttgcagctatcgcgtaaagcaacaaatcttctgtcggtggtgctcgtaaccggattctcccccatgtcgccttcgcaatcccagttcgtattgcagcttgatccgcccacattacttcccagagacacaacgtctgctcaaaggttagttctcgtctgaacagaactacaaccatacggtatacaaagaagcagtcttctgcttcaaggttctccaagtgtcggtacaagtgaatgtctttgaattttatgattttcgataccattgagagttgccgcctgattccaacctcgtctaaccggaaattatgccgtgctttactcatgaagccaacaaagcaccagaatgctaagacgtcgtcttccatcactgcgattaaaggagatagtaagtcgctcattccttgacagtaaccaatttctggatcatagactgcgtaggcttcaaggatcccgaccagacgggctgcgtgaaatatccggcagggttccaagtggtcatagtcattgagaccaacctgaatggctattcccctggcttttgtctcagaaacagcagcttgagttggtgagtagggcacccattcgtcatttgctctcacagcatctaggcggataattctctgccaagttgacatgaaatcctcgtccgctgcctgagattttggctttgatgatggagacgaaatttctttttcttggttaacagtattgtggctttctacttcttcgttagctagaaaaggtgaagtctcggtttcttcaggattggttgagtctgaatcattaccagcagcatcttctgtggtgacatcgctcttttcacagttctcatcctgcataatcgattcagaattcaacttctctgattcatctacggtgatggttcttgtggaactctcgacttcctcaatatcatgggattcaagaacctgactgtcttcagtgttgctgctctgagctgtctcctttgagtcgcagacattttcatagcgttcatgaatctcgcgacactgtctccgcaggttttcatattccgtcctgcaggatttacagatataaaagacgttacttacaaactgactcgaaatctcagtgtaggagttccaaactactacttcttattcctagttttatcaacacattgagcaagttaataaccagctgccacctaggagaacagagataaatgggaaacgtaacatttggtagaaagttgagaagccattaaactctcaataagtataagcaaacatacagtttcagctgtcgaatggagtctctttcttctttgttgctctttaagtcatacctgtgagaaggtaagtagcataaggttacaatgtgtcgagatgataaagactacaaataacttgcacaggtttcattatcaagttaatggaatgtagggcgacggctggtggagtgtggtatggcttaactaggactaatctcataaatctcttgatagaaaggcattgaggcaactaaaaaaaatcctagttaatgaatgctttactgatgcactgtttattcaaccgtaaacctaca

SEQ ID NO: 29649 - DNA, 901 bp, Arabidopsis thaliana landsberg
  unsure (1)..(901): unsure at all n locations
aaaccgagataccgacaggcatagttacgaacacttggtttttcaaggtcacgacccagacattgaagggcatctatttaacgtcgctaccaaatcctagtctttcacaggccctcatgagaagcactgtgctgcgtgatgtggtctgctgcacggtgcttcctgatttgaccatgattcaatctctttctctcacagaaccggaccctgcagaatcttgttctatcagagaccagtcaagcttcctagattatatggcgttatactggattgtgtagttctctgctatgcccacaggttcctgggttatatatatgattcagcttcatttggaaactgagagaaagttcagatcttgtaactttactgttcttgtaattacatgacaccaccatagtgaatttgtagaagtttgtcagtgataataagattatacgagtaactgaagcttcgatcaataaacaagatgcattccattaccaaggttnnnnnnnnnnnnnnnnnnnnnnnnnnnnnnnnnnnnnctacatgtggggtggatccagccagtgactgaaccaaacatcccatccacaaaagacaaagttttgcaactcgtactggatcatacaagggcatagataaaggattaaagaacacctatctagacacgaccttgccacagacaatcttgctggactttcccggtcttcaaaagcttctcgatttcattgggaggattcacccaagacgcactgcacgctcccatcgatcaagtctcgtcatacccaggcacggaccataagtgatgttcatgtcaaattgtctaagcatctcctcctccttgtcataatcctctgttaattaaacacgacaatccacaaaatgttatcagtcagaagaaaacacaacaagtcaactt

SEQ ID NO: 29650 - DNA, 2115 bp, Arabidopsis thaliana landsberg
catattggtggatcagatggtatgatgagctcactatctcctccaagtttcattcttttgtccaaatttcccttgtaactcacaagccttggctgtttatcttgttgcttcagatcttggagctgctttggagagtggtcagttgcaaaagcttcttgctgcaagttgatatttgaggacctcgaatgtggaatctacagtatgtgatttacaggaattagaaatctttgctagttgtagactgaataagcgaattgatatgtatgactcagttatgtaagttatgatggcattgataaagtcttgatcttttgttactgcactgctctggtgattgtttcgcttaaataatccatacttgtgtgccttagtgaatggttcatacggcaaatatcagatcatggaaagaagagcaagtacaagaacttgttattgaaattttaccacaatggtaatatactattatggtgctagttcatgattctgttgtagcacatgactctgtcattaatcgaagatttactcattaggactacaattcttgccttcagggtacagagaagattatagagaagaactaacagcattattgcttctatctatataaaaaaaagctgatcaaaattcccaaattcatggttcttggttctcttgactgttcttgatatatccattgtgtttaaaactgacttagtcatcgctttgaattggctactattcaagttgatcagtattcgcttcgaaatggcttgtaggactttagatcaagaagtactccagctatggaccctgcagctgcagcaatgctaactactagacaccctaagctgaagacttgaaggcaaacccatctggtgctccatctaggtatcttcttctgcgcgatgtacatttccactggaaaatacaccgtcaatggccaaaaccctagtgccccgagcagacccacaacgtcgttgaaaaacggaagaagcattgagataactgtcgttatgatcacaaacactgtcctccatatcaacctgagtaagccattccacgccacacagaagctttgattattacatacacatcatgtttaaaactcagatcccattagtttaaaggcaagatttgtacctgaagacattcaagcggagaggcttgaaaccaggaattggaattttgatatcttttgcaatgaactcactatcagggaattgaatggaagcttgcttctcgatgaaagcaaacagaggttggcaatagacttggtatgcaccaataaggtgaatcacaatggctgcatttgcaatgtcaagaagccaataaggattataaaacccgaaaccggttaagagatttcccggagacaagtctccaaaggctgcatatcccatacatccacacaacatatagaacatagtcgttacactgacgctcacaagtgttgccttcttcatcgtcttctcttctgatggtggtgacttcactgtgtcctgtttcagatcccagaataaaaaaagcttcatgatgggaccagtaattaatggctttgatcatcaagacttgtaaagaaggtataagtacctgaatctcgatgaggataatggagtaagagtaagcaaaagcaatgtctccaagagcttgaaaggtcctccatatcttctgtgtctctgttactgctcctatgctaatcccagtgagacttcccttcaccttcccattaactgatgaaaccaaaacacataaaacctattagttttttacctatgaaagttcttatttaagaccctagaagctttatggttcaagaaacgaaccgacaacttgggctatgccgagggcgagaccggctgaggaataagtgaaggacataacggcggcgaggattgagagccaccaaagttgatcaaaatctggaatctgagagaatagaatctggactaatccaaaagctatcatgtaaggattactgttcatgtgacatggatctttccctccactcttgtggaaacagtttgatctctttattgccctgtttttcaaaaacaaaattttgtttattttttattatcatcaaaacctatttggtccattacctaactcgtagttttaagagttaattagtggggt

SEQ ID NO: 29651 - DNA, 2778 bp, Arabidopsis thaliana landsberg
aaactcagtccttgatcttgtaagttcaacttaattttggttgtggttgtcttcagggggaaggggcgtttacgtctacgtaaacataaataaataacactatcgaaagataaaacaataatatataaataacgtaatattttcttccatttggtgtttgtgtttaaaattaacaaaagaaaattacttcatagttctaaaaaggtgtaatttggaagaaaagattaccatatttaaaatctataatagataaaagcaatttcacacgccaaaacactttcaaaggtttagtttgtccattggttgactaaatgtacccaaaatccagagttcaagtaagaaaacaaggctaggatatttttcagtgtgtatagcagagataaataagcagaggccttaagaccataacattctattcgaatggcacacaaaattaataagctagtaaacattgctaattcctctatgaaagattacatatgctatattaatttgtgagtattacacactatattattagtcattgtggtccactgagaatgtattcacagatacctgtggacatggtcgcaaacgcaatggtcacggctgcggcaatacacgcagggaagttaggttcccagaccgtgtaccatgtcggatcatcttgtaagaacccgatcacattcgaacagattcatgatctcgcggctcgctacttcaccaaaaaccctcttgttggacgtgatggttcacctatactagtctccaaaggaactatcttgtccacaatggctcagttcagtttctacatgaccattcgttacaagctacctttgcaggtacgaatctttttgttctttcttacatattaataataaaacgaaatattgaaggagaaaactaaatcctatgagaaatattgaaaagaaaacgagtttttattaattgaattcttacgcatatattttcttatattatcagatgttgcgattgatatatgtaatatatccttggtgggatggtaataaatataaagacattgaccgcaaaattaagctggcgatgcggttggtcgacctctacagaccttatgtcttgtttaagggcatgtatgtatcaatctcaaagtttccataaatgacttttgatatctacaattttaatcttcatgttccagttattttgacgcgagagtctttttgttttgcagatttgacgatacgaatactgagaaactgcggttgaaaagaaaggagattaataaagaaatgtatggtttgtttgaatttgatccaaagtctattgattgggacgattacatgatgaccattcatattcccggcctcatcacctatgtactcaaaaagtaaaacgttaaaggcattaaaatgtgtattgtgtaattacatttcttggttacataaaatttgcttggaccgagtaaaattgtgtattgctagtgagttgaaatttgataacaactacaaggtgtgtcttgcattattaaactagttatatatctctcatgtaatgtgttaagttcttagtttacaactagaatttaatttcttgtttcaatcctatcatctgtcgtaatctttaaatgtaacaaatgatttttaaaagggagcttaaatttgtgttagtactttttgtgatgtccatatatttcttagacgatattgatgaatatatacaatgaaagaaggtggagagtgtcatttacctataacatattttttgaaattcgaaatgttggaaaacaatccaacattccacatccaaaaagtaagaaatagtagtttaatatacaagttaaatctaactccaattagtatgaggtttgtaaaacaaaagtctataaacaagtttgtacggatccacttccaaaaaagacactatcatactaatggagaagaagaagcgggtcaaccgcaaacccgcggtgaaaaatggacaaactagttttcccgcgatccaaacagaccaggaccacgaggtccacatttttttggcttcttaacatgggtctaaacccgtcccgctatatccctaaacggaccagcccgtggaccttaggtccgattgacatcccgacggagaagttggcgtcttggagaagccccgacacggaagcttgaatagatgtgctttacacggctaacccacacatgtttgttcctcgctgcttacctggactgatcgagtcgagctatataaactcagattggtatgaagctatgttttaaaatatatattgttaatttgttatagatttcaaccccaaatgaaacaggggacgtcggttgtatggcagaattttctaaattatatatacacacgaggtctgatttagccatttgtcgtttcgaaaagaaaagaattattctttgatagcatgaataaagattagaatgttgcgcgactatatatatgcatgaatcacaatgccaaattttgtgatcccatttgaagattgatacattcttcttgttctattacttgagaactttatataatgtattttgactatttgagttagactcttattgtagtggttttttgtattactggacacattatttatttggtattcatgtaaacaaggtgtgtaatggattatactagtgttgttattgtctcatattcgatagttggcacacaaacaaaagggtgaaagtaatctttaattctatttattttgtttattgttttttatataaaattcttgaataaaaaatgttgaattccaagaagttactagtcagtatgaaaacactccaaatcccaaaaggt

SEQ ID NO: 29652 - DNA, 799 bp, Arabidopsis thaliana landsberg
attgttggatattaatgttgtcaagagaaagtgtttagaaatctgactttaagacgacatgggttttgttttcagggtcccgtgtgaaacattttcagaaaaataaaactcttacacgatcatgagtcatgactaacccaatgacatgccaaggttatcaattctcaattagttcttcctttattttttatttaaaaaaatagttgatctcatatttttaaacgcaaatatagtgctagacaaattgactttttgattttgtgaaatcacagtaaaacaaaaaacgaagccatacaagcacaagatgtactgatataccctagagaaaaccaaaattttctcagttttaaaatggtgatatagatgaacacaagagtcatatatctgaaaagctgagactatacgacaaaggaaaacagaaacagaagaaaaaaatatccataaggttgtaaaacatgttttctcatgcaattgaatcttcaatagaattggattgattacaaatttatggaccattggatttttgttatgctagaatctttagaactttggaaatttcgagttatgaggtttagaagttaggcattattgaaattgtacgacgaatagactatatagagaatatatattttattttttattttttgggcaaaaaagaatatgcttttacctgtttttctaaaaaaaagttatcttacacaggacacactaaagataacgctttcaaacaaaagaatttattttttatcaaattatttttgtcccgaacgtagtccaggcttcatactagtaatattta

SEQ ID NO: 29653 - DNA, 2088 bp, Arabidopsis thaliana landsberg
actctagactctagaggcagagttcctgtaagcttctcttaagaacaccgagtctctttcacctttcaaagacacgtagaagagatcagggtgcctaataagcattcccctcagttgttgtgagaatctgaattcctcacggaaatgagtcaagtgatccaccagcgttcttttctcagtcgttaagctcaaaagctcatgaataaccccacaagcatgcttttctttctcgagtgttcccgacctcaagtgggagaaatccttgtaaggagatatatactgcatgtcacggaactgagatatcttcctcgtctcactctttgaaagattgagaccccttggaagcttaaccctgttgaacttaggtggtctatcaataatcaaattcctttcttctgactctctagtcctattatcatcctcagataactcagcagctgacactgcaagctcaggatcccagtgagtcaactctaaagccggacctctaggcgtaggaaccacacggaaatattgcgggtaacgctgacaaatcgtgtcgcggaactctaacggaagccctaaatcagtcttcaaatgggaaatcttctccaacaatatccgcttatcaatagacatcatcaccagtttcctcagcttaacaaccagtacatcttcaagctcattcctaatcctcatttcgtcaaggtacaacctttcagcctctgatgtcatcttaaatctcaaagaataagctccttcttcaactatctcaaacacaccaggatatttcctaagcagagctataaaccgacgacgtttcttcaaacccaaatctctcctgtacttacccaaacccctaagagacatcatcctatcaggttgactcacaagaatcttcctaatgttcaacactaacttaagtttcttatccctttgaacaacgctatcgaaagtaagctctttccttctcttcacagcagctctcacaggctcaacaacaacacgagttttcctagaagtactccaaaacccatacttgttccccaaaatcaaaccttcccccataaactgagacctcgcagctcgaattgtggacatgggcaaaccggatttgaccgaaagcttggttttttcattgaatggagagttacaagagacaaacaaaggtttatgtgcagaaagcagaagcttgggctccatttctgagactccaagcctgtaaattgataactcctaataagtattctccgacgaaaaattgattccaggaaataaaaaaatcttaccttatcccttcggttcaatctagtaagaggttctgcagaagaatctgtttctggtcgcgaagatttggattggggtttaacgataaaagtcataaaaccctcttcttttttccagaatgatgtgtccatctctctgatatcctcttattggtctttaacgtaatatttgaccagaagcaggggtaaatatggaattaacatcattccaaaaatctcctagttctaacgatgttgttcgttctctgtttcactggtgagaaactcgatggcgaggaggcgacgttcatcggcggcggagagtttgaaacggcggaacgacggatacgagtcactgtgtcaagtcgtacaacaagattcagatcggagactcatcaccattttcgtaatcttcttcattgtgattcccgccgtttcgattgctgtgtacaaagtcaaattcgctgatcgagtcatccaaacggaatcatcaatacgtcaaaagggaatcgttaaaactgatattaatttccaagaaatcctcactgtgagttccatagttttgggtcaatgttgcaattcaaagaagaaaagctgaaaactttaggatgaattttcattaaatttggtttgaatttgtttcaggaacattccaaggcttcagagaattcaactaggcactatgattatccagtgttagcttacattactccatggttggtttctttggaacatttttagatttgagatattgaaaatatacaaattgttgtcactgagggcagtagggattggattcatatgctaaaaatgctgtgtaggaactctaaaggctatgatatgg

SEQ ID NO: 29654 - DNA, 1785 bp, Arabidopsis thaliana landsberg
ctacatttccatcattatttgagtgacacacctttattaagtattaaataaaacgtggaacaacgtaacacgttattcaaaaccaaccagctcatgggataagcaaagaacaatctgatgactgcaaagagaacagggactattacaccaagtaagatcccggcgaaatggtgcataactcctgatcaggtaaaaatttacaacgttaaatctctaaaacatcgtacaatgaggaaaagagtacaggagtacaaaaatgattaagaaaataaaaagattgcagaattttacctttaaagaaagcccagaagaatgataacaaagggtgtgtcctagggtccatcatatacaaaaagaaaggaacacaaaggaacaaagcagctggaatgttgtgaagtacgaaagctactcttcttgggtagaacacctgatagatatcacgatttcagcttgtcaagagtgtaaactagctatgagaaaagatgatgaacaatctcaaaaacacccaccatgaaccatgttaagtaatcaaagaaaacagctctttcaaccatgtcactgttggcatccacgtcaagcgtctttctttcactagcaacctttagcctagaagaactcgtgaaggctttaagcacgctgattaagttttctccacgtgcttgcatgcttccaggtctggttcaaaggtattctgtgaaaagaggatcatactaaacaataaacgatagtaaggaaaagttcaaccataatatataccaaaacgatgcatacactattctgtccactgtatcaaaggtagtatggtagtagtaaccgcccagaagaaagataatgtctagcccgggaatgtcggcataatcttctgcaaacattctgtaatctgtgtctccaggaattacagggaaaacatcctgaggaatatcataggagaacttaaagtcagtgacagagatgaactagaaacaaaatggctgaatacgttttgatcaatgaccactatcacttggcaaaagtagagaagacagtgtgtgtgagtatccatgtatgtcatagagagagagagagagagacctgtgcagaactctgtgccattggatacactgctgcttgagagtagacataagatggccacgagccaggccctgattggcagaccagatctaccaaccattaacaaaaagtcagaagtaggagcaataagcacaacagaaacttaaaatataaatactcattgacaagcaaacacttaatactgtcacaaataagactagcacatattcctcttaatatttacaggataatgtatgtatatgcattaattttctagggacaggatgttgcaagagaagttcttcaatggtctacacagatgtttaaagataagcttttttgttccaatacttaggaaagataagagaatcaagatcaacttaagaacatcattgtcatctagaggaagagactggccgagaaaggaccttgtcataagtaaaaattgtttttagggaatatatcttaccaataccccctgtcccagaggcttccacgtttataaaagctccaatggtgtctttcaacttatgcttcgtcatgaagccgtgtgagccctaaacacacacaccaccatgtaaaagaagagcttattttcatcagcttgactataacagaaacctcatgctatgtatcaataacaatattcctccagaacacgaagatgaatgttcattgaacaatgatccataaaaaagagatactaagcagcataactgtattaccagcataggc

SEQ ID NO: 29655 - DNA, 1677 bp, Arabidopsis thaliana landsberg
ggtgtgctctctgcctctctgcctctcttccatctcttatctttgtttatttaattggttttcatgtgaatgtataatcgtggtacaattctcatttgttcatttttgttctgatctgataggttccgttcagactgacaagagacatcattgatggaatgggtatcacaggagtggaaggcgtcttcaggagatgttgcgaagaaaccctgtctgtgatgcgaacaaataaagaggcgctgcttacaattgtcgaagtaaccagatctgaaagttttaacttttgattttcttaaaatacaaaagtttttttgaatgcgtaatcaagatcgcttgttttgcaggtttttatacatgatcctctgtacaaatgggccttgtcccccttaaaggctttgcaaagacagaaggtacctcgtacccttatagttaaactgtaaatgtacaatgtaatgacctttgcaaaaaggttatgaaatggacttaactacggatttttgtttaaacaaatgcttccggtgctctttatttggatctatttcttcacgctaattattttgtgttccacttcattgtcttgatccagacgagattccaattcaatattaggatagtttatcctgttgaatacgttttgtttctcacacaaaggtcttgatccaggaaactgaagattatgatggcatgaacttggaagggttacaagaggagttcgagggaaacaaggatgcaacacgtgccttgatgcgtgtcaagcaaaaacttgatggctacgagggtggtgagatgagaagcatacatggccaggtaaagtttttgacatattaattaaagagtataacatttaaagcttgcattgttcttgccttcttggtgttactgagtgtatttgctcaacacttaattgttttgtaggcacagcaactaatacaagacgcaattgacacagatcgtttgtcccatatgttccctggctggggagcttggatgtaaccaaccttctatatgcttccaattttttgtctatgaatagagaaatctttatgtaaagttgaaaaatactcggctgccaaattttgtctagcttaggatgggaggagcaatctaaaaacggcttttgcgtggaacagaacaaatatgtgaagtaacaagctcaagcctataatatattactgcttttgtgcattttgcgtattggctcatgaagtaaaataatttcactagactcgtattttattatctttcaacaagaaaaaggttaaagaagctatgtttaaacaagctgtgggcggtacattacagaaggtaagtttatacacatacataaagaatcatatttatagatcgttggttggaagtgaacccataagaatagtggcttctttgacttggtttgtgtttccaaataaacttgagaggaatcttagaggcaagacagatgtagaatctgatttgttttccgatacttgcagctgtccagggatcttgttcggctttagttgtgctccgcaatggcagatcgagagtcttgataagcatttcttgtggaaaactgaaccgcataaccggcatttgctaacctcgtttttctcctaatcattgcattcaatatatcttggattaagcaacatttgagcgatagcgcaatacagctatgaactttataagacaagaaaa

SEQ ID NO: 29656 - DNA, 2261 bp, Arabidopsis thaliana landsberg
  unsure (1)..(2261): unsure at all n locations
aagaagcactattgttccttacactcttcatcttcatatctctggtaagtttacatctttacgatacaccattaaaccgaaaaccggcatttttacattctttctcttatacattttcaggtttgtaggccaaatcttttgaagaagtcgataaaaagattcaatgtcgcatggtgggcttactcgtttcctatcacatttcnnnnnnnnnnnnnnnnnnagtacgcgcaagaggtgaaagaccatgtcgcttcggacttgatgtttatcttctcatacatgtcagttttgatattcatcagtgtgatgttactgacagcagcaaatagcaaacgattacttagacatgatcatgtcctctggtcttgtactggtccaaacgacacatcatcatcgggtatggcgaaacttgttaaccaaatctgattacccataagataatgtatgtcaaagtagttacaaaactagctggataaaaatttcagttggaagatcaaccaactacagactactatgtaatacaatttgtagaaatttctactctaattactatctgacctgatatcaaacccggttcaaatactataaaaccggaaatgctgaattgaaccgagttattaccgatttaaacacagtaaaatcaaaattcacctgactgtgagaatcaactgatcaattccattccactgactgattcttccaaatctcaggagtcaggcctcagaggctaatttggtttacaatagacacattttactatctgaattgaaccaaatgatttccggttcaaacatggtaaaccgaagaatgtccattacatcatcatctgaaccaaatttacctgactctaattttcaaagctagaggcttttttagtttttgatcgctgcaattttcgccggcgacgacgatgatccgaacacgaagtgtcttgttaattttcaggaaggtgttgtatcaatcgtcttgtcttaactgtttattatgtgcaaactctttctctacttcagtttcgtcaagcttgggttttcgagcgacgaacaaagagttaaaccagatgataagatctggttacatcgccgaagctagagatatttttgagaaactggaggcgagaaacaccgtgacgtggaatacgatgataagcgggtatgtgaaaaggcgggaaatgaatcaagcacggaaactgttcgacgtaatgcctaagagagatgttgtgacttggannnnnnnnnnnnnnnnnnnnnnttcatgtggtgggattaggtttcttgaggaagcaaggaagctgtttgatgaaatgccttcaagggattctttttcatggaacactatgattagtggttatgctaagaatcggaggaaaggtgaagcgttgttgttatttgagaaaatgcctgagagaaatgcagtgtcatggagtgctatgatcactgggttttgtcagaacggtgaagtggatcgcgcggttgtgttgtttcggaaaatgcctgtgaaggattcgtctcctctatgtgcacttgtggctggtcttattaaaaacgagagactttcagaagctgcgtgggttttgggtcagtatgggagtttagtttcaggaagggaagatttggtgtatgcttataacactttgattgttggatatggacagagaggacaagtagaagcagctcgatgtctgtttgatcagattcctgatctctgtggtgatgatcatggtggagagtttagagagaggttctgtaaaaatgttgtgtcatggaattctatgatcaaagcttacttgaaagtgggtgatgtggtctctgctaggttgctatttgatcagatgaaagaccgcgatacaatttcctggaacacaatgattgatggatacgtacatgtttccaggatggaagatgcttttgctctgttttcggaaatgccgaaccgtgatgcacattcgtggaacatgatggtctcgggttatgctagtgttggcaatgtagagcttgctcgccactactttgaaaaaacacctgagaaacatacagtctcgtggaactcgataatagcagcttatgagaaaaacaaggactacaaagaagctgttgatttgtttatccggatgaacattgaaggagagaagcctgacccacatactttaacttctcttctcagtgcatctaccgggcttgtaaatctgcgtttaggaaagcagatagaaccaaatcgttgtcaagactgtgatccccgatgttccagtccacaatgcccttatc

SEQ ID NO: 29657 - DNA, 1190 bp, Arabidopsis thaliana landsberg
ctctttaatattgatatatggaggaagggtgagaagaagacgagaaatttcacaactatccaaaatcatttttgtttgcttagcagcagccatgaattccaatccagtgggtgtatttcgtgagagggaaatcgatggaaaaccatttcacatatacactttatcatctcaaacagacaccaaaatcccttcttcttccggtgaaacagccattgatggcgacgaccacctctctcttcaacaacctcttttcctctgtccttctttacgtcttagggttcacgaggaaaacaattcctatactgaatttctcccgtacaagacttcccctcacttccccagcataggaagcgttgatcaacaagtccagcatttgcttgattccgacagccaacaagtccatgatttgcttcattccgacagcagccatgatgatgatgatgatggtgatgaaatctgtaagctccctgttgtccctatctattggtgtaacagtaaagaaattgagtatgatcaattcaattgcggtgcatgtgaacgatcaaagattggcacagactattatatctgtctcacgtgtgatctaatgttccacaaagaatgcgtggagtctccccttgagatcaaacacccttcctatccttttctttcactcaaactttacaaccgtcccggcaaccgcgtgagttgcatgtgctgtgatttagctctctttagcatgctttatcattgtcccacctacaaacttagtatgcatcctgtttgtgccatgaagccaatacccattttaatagaccacccaaaaaggcatccccaccttctcactttttttcccaaacaagcttccttactttgcgatgtttgtggcctcattaaagaatcttttcccacctatgtttgcgttcggtgtatctttgtagtacatatagattgtatctatttcccctatgtcattaaaatatgtcgtcaccaccatcgtatctcttttacctcttctcttccatccggaaaatggtcgtgcggagtctgtcgtcaaaaggttgacaacaattgtggtgcatacacatgtaacaagtgtagccactattttgttcacccaagatgtgcgttacgggaagacgtgtgggaaaaaaaagatctcgagggagtacctgaagagcctgaaataattctcgggccttgtcagtcaa

SEQ ID NO: 29658 - DNA, 5716 bp, Arabidopsis thaliana landsberg
tacaagcaatatcatgtttcatgagtgcatagaaattccaacacaaagggaatgtatttctgtaagaagatattaccttcagttaaaggtttgggaagcatgtcaatacggcgctcaacaaggtagacagatgtgcctctttttgatgcctcatcatccaaaggagtaccagggtgaacaaaattcgttacatcagcaatgtctaatcaaacatggtcaaggataagcatcatatatattcactcccaagacaagaagagaatacaacggaactagctacaaattctggaagataccgattcactaaaaggcataaagcagatcacctcaaaagcacttctcgtactagataattatgataaaagcgaactatgaagctaaaaggtaatatgagccatttcaatgctttggttaaatatatcccacaaactgatttttaactcattgactattgacatgtcctaaattgaaagcacagtcatatttatgagaatctgaggactctaggatacggactccaagttcaaagttcccgtttggaagcgatgtacagtgcaatgcatcatcaatatccttgcaacctgttagcaccaaataaagttaatctgcttgtgcacaactaactgcagactctgggagacatttaaatttggcttgaatcatatatactttataaaatgtaaagctctagatacatacccggagggtccacactaaagacaagcaaatgtcgtaagtcttgcctaacaggattggatacgtcttcagaggatacagaccaaggtaagggtggcaagcatgccagaacttgagaagagaacggcgagtagtcaacatcattctctatcaacacaacctgcagcattcacaagaaagagtattgatgttatattcaattatctaaatcagttacttctctgaagaaaggaaaccaatatacttttcctactcttgcccacctaactcctactagaatagaatcgaataaattaatatgatcccttacctctgtttcagtttccttgtcacctattttgccgattggtcgtacgtaatgaccagaaggatatcgagattgacggtcccaggaatcaactgccactactatcctcatatccaaaaggttctgcagctgtcgagtattaatgcggatcctgggaatcctgcgacctttacagacaaatctagcatgtgccgttgcaccactattagcaggtagtgacatcggttcaagagatccacaatagctgcatgataacatacaaattaggaaccgtcatccagaaaccatggcttgaaacagaagacaaacttaaggaaaagtaaagcataattgcacagacaaaggacactgaatcaagagtactaaagataatcgtccagtcacatatgtagtcaccagaaacaggtacctctaatgagaatgtattaacaagtctgttaacatgatctcatatgatatatcaatgtctcaattagaaaaaaaaacaagcaagaaggtaagggtaatcaagtaatgaactcacgagtgccaatttctacggataacaccgactacacggcctgatggacgaacaggggctgcatttttatccccagaagtttcatgggataaatttgaggttctaggagcatcatcaacattgtcgggagccaaatgaacagtatcatcctcttcatcatctgcatttgaatttgatatttggaagaaagataagtttaacacaacgtcatgcaaggaaataactgctgtaaaatatatgtagatattgaaagagaccttcttcagctatagataatgccttctcatcttgccattgatcccgaggcaagagttcgactgcaacaatatcaccatcaaaagccctgttcatgttgctgcgcccatagataattatctcttcaccaatgctctcgcttccaacataagcttcgtaaggattgaaacgattgacccggagttttccttgatgatatattccacggtgtaagccagcagtaatctcagacatgggcttatgctgcaggcaggaaaaaaaacaaaattggagataaaagttgtttgatggcagtatcaagttacccaaagctgagactgaaaaacaaatgtgtttatctccattacctcttggtatataagtttcctcttcgaaggtctagaatcatctgcatcttccatagttatgtcttcattggttggttgggcaagcagatccagcaattcaggttgtccaagtgatttaacataagcctcaactgatacagaaacattcattgataaacttcaacatcatgtagcaagacacacaaacagtcatgcaaaaccaagcttcgacaacttctatgaaaaatatagatgattcacatacttgtctccgcagatattccctcttcagtggccttccgtttattttccctatcattagttacaagcaacacctgagatgtatcccctagatgcttctggtaccatagagtagcgacgcgaatagctgaattccagataaatttaaaattttaataacagatgcttaccaagagaagtatgtaagttcatcatcaagaaagtaacatgatgttaacaaacaaagaaggtgattgaatagtaaataaaacctctatcgttgtggtcatttgcactctctttctccatggcttgcacataagtatccctgtgaagagtttagtaaacgcgagaaaacaacgataaggacacggagaaaagcgtttctatagcttagtaggttccagtaaggagagcatctaatcaatataaccgaacagaaattccaaaatcattgaattctttatgttcttttgtccacctaaaatctggttaatctaaaagctaaaagttcgaacaaggtcttcttacttgtggacatgattggagaaaacatagaattgtctcgctggattgctgcagagaagtctgattctattgtaaaccgatctattcctgttcttaacttcgtccaacaccacagacagaacaacaacagtgtctatagccttattttccaacaaatcaatctaccagaaacaaacaaaatattacattagtaatacccacaagctcaaaacttttagcttatgtaatcaaattaaagaaaaattacttggtgaagaacgacgttggtatcaacaacgattatcttagaggaagacaaacgagcagctgaagaatcacaagacttgcaagagaaagctccacagtatatgtcatctcgtagataaacctctcttacttgctgtcgcagacaaagagttaaaagttacaataacgaacaaaaaaactcggaaggaagaagaagaagaagcatagagagattgaagagaaaccttttggattcttcctcctctggttttcttattgaaaactttgctctgcaacatcttcaatttcttgctggaaaacttttcgatttcgccggtgaagaagatttcagtcgtcagaacggaagagaggaagaagctttttaaagcctttaaatttaaacctaagccagccaacttgactactaaaattttcaattctatagctccttattcgttcatggttaacgaaacgatgacggttaaaaccggtttagttactttttctctaaccggctcaatctgattaaaccgaagtaaacacagcaatacagctagtaaactcggtattactcttgatggaaaaaggtcaaaaacactctttttattttaaccaaaactaaccaatttttgcaagataatattgcatacctaagatcatttaccttgatctcatagaaatttttttaatgatgcatctccaattataccgatacaatttctagtaaataaatcagtgttcaataaagtgggctaggcgtcgtctaggacgcctagacactaaacgcttttataccgttttgactttttcaaaatcggttctattaatcagtgagatagatttggcagactatgtaaacattaagcggattagactctcattaggtgggttaggctaggcggatctaatcgtctcttaatattttttaaaaatttcaaaaatatattttaaataattttaaggacacctatactttttattattttattttattttactaaaatgttaaattttaaatttatttttaaaaatttgataatttccgctttttataatagtttttgcaacagttcagataatagtatataaatatatatcgttttattctaaaaccgattaaaccggctaaaattgtctaggcctcgactaagcgttctatgcgctaagcggagggttaccgccagctaagcgcctaacattttcttaaacactgaaataaacacaaaattatatgataagaagtacgattaaaccaaaaataatcgtcacaatttttgccactatgtctaatgtatatgtgattgttttacctttaacaaaagaaaatgtgatttatttacctttaacaatatgaaaatttgttttttttaacacaattagtaattttagtgatattttcactcgaatttgttgatagcaaaaggtgtttagaagaccaaaaagcttaacgcatattggctcggctcggccgaataagttagctggacagtacggtggggcacacgaagatccttaaaccgcagcctcagacaaaccttactcgaagcaaaacagtgtttggttcgttcgtgggggtttaaaaaaaaaaaaaaaacttttgtatttttttccattaaaatatttttttgttaagaagattcaaaaggaaaacgcgttagacacactaagggtgggggcaagggaggagaaactcgccggacagagacggagatccctaaaccgcagcctcagactaaagcttcgcatcttatctccgatccatcgttgacttcactcttaggtaaattcgaaaaccctttctcttatcttttatctcccaattcttaaattcgatgattgactcgtcctcctctgttttttcacagctgatcatcatcatcatctctatctctgttcggattctccataattgatccggaccatgccgccgagatgtcctttcctccgccatcttttcttcttactactattactctcaccatggatcatgtctccttgcggcggcgctgccgacgatgtgacgtatccgatcgttccatctagtcccggccgcagatcaattttgcagattcgtcggtgagtttcttccatcctctgcatgtttaaaaatacttagttagtatttgattctggtgacactgttttaggtatcattagcattgtaaacgtgatggactagtgattaggttttggtggtggcaagaattggtttgattacattttgatagatgtttttgattcttctctatgtggttactggttgtgatgttatctgtcttctactcagtgaaccaccaacagagccaaatacgaaacttgttgttgatcgtgatgggaaggtgtttttaaagcagcaaccgaaagaaacaccatactggtccttttcaacaggatcaccaatgcactcgttatatcaggctcctgctaataacaacacagaaaatgctactgagataactcgtcctcacataattgttgaatatctgaacaactcaaaggcggctactactgtcgatggctatcataattgggtatgaagcatctctctctttacttcattattactggactttgtttatcttaactttgtttcggcacatattcactgcagacagttca

SEQ ID NO: 29659 - DNA, 1994 bp, Arabidopsis thaliana landsberg
ggtgtggtttgcctttgttgtgatatccacttttgacagatcagttcacaaatagaaagcttgtggtcgatgattggtgcattgggattaatctttgtgaaaagaagccaatcacaagggaccaagtctcagcgaatgttaaaagattgatgaatgcagaaacttcaagtgagctaagaaacaatgttgaaaaggttaaacgtcatctcaaagatacggttacaaccgttggatcttcggagacgaattttaacttgtttgttagtgaggtccgaaatagaatagaaactaaattgtgtaatgtaaatgggctagaaataagtccatcaaactaaacaatgaaaaaaatattttgttatttttataaataatttttactaaccgtttgttaccaatcatgacaattttttaactgttcgtttttaactcaattattttggtcggaccgtatggttagcatattaacaacaatcaatctctaaaccggtatcaaaccgattagcggttatacttttgctgcacacaattcaactctgacttatgcaactctgttttgaggaagctatgaatttttttagtgaaaagcaaaattgattgcgtttgctatattggcaatgccacggagaagtgttaattcgtctgataaaatgcagtttgggaatcaaatctatcaacttttgtcacagatcaacataagcttcactttcttctctggttctttgcttatccatggcaccggttcaacatgcagaaggtatatgatgactcgatgagtttgcccaaatgtctgttttggttcgtcttacttcaaagattgcgtctttggcaaaatcaggtcgcatagcaagtgcccgtcaggtgttcgacggaatgcctgagctagatactgtggcgtggaacaccatgttgacgagctattctcgtttgggtttacatcaggaagctatagctctgttcacccagttgagattctccgacgctaagcctgatgattattcgtttacagcaatcttgagcacttgtgcgagtctagggaatgttaaattcggaagaaagattcagtctttagttattcggtctgggttttgtgcttctttgccggttaataattcgcttattgacatgtatggtaagtgctctgatactcttagcgcaaacaaagtgtttcgagatatgtgctgtgatagtagaaatgaagtaacttggtgctcacttttgtttgcctacatgaatgctgaacagtttgaagctgcacttgatgtttttgttgaaatgccgaaaagggtggcatttgcttggaatataatgatctcagggcatgctcactgtggaaagattgaatcttgtttaagtttattcaaagagatgctggaaagtgagttcgaaccggattgttatacgtttagttctttgatgaatgcttgttctgctgattcatcaaacgtggtttatggacggatggtacatgctgttatgttgaagaatggatggtcttctgcggttgaggcaaaaaattctgtgttaagtttctacacgaaattaggcagcagagatgatgccatgagagagcttgagtctattgaagttctgacgcaggtatcctggaattctattattgacgcgtgtatgaaaattggagaaacagagaaagctcttgaggtgtttcatctagcccctgagaaaaatatcgttacttggactactatgattacaggatatggtaggaatggagatggtgagcaagcactgagattttttgtcgaaatgatgaaatctggagtggattcagatcattttgcatatggtgcagttcttcatgcgtgttcaggtttagcccttttaggacatggaaaaatgatccatggttgtctgattcattgtgggtttcaaggttatgcttatgttggtaacgcgttggttaatttgtatgcaaagtgtggagatattaaagaggcagaccgtgcgtttggtgatatagctaacaaggatttggt

SEQ ID NO: 29660 - DNA, 1614 bp, Arabidopsis thaliana landsberg
aatggaaacaatgccatgaatttcaagtttcaacctaatattaagtaatcatattgttaacatcagtttgcatttgtttattttcagctgaaattttaaatatttctaggaaacgtaatgcgtcgaaataagaactatatttagtgttattaaaaagtgaatagaaatttagaattattaaaaattagaagagtttgacttttaaaatttggaaaacatagctatactatatgtcatttttgtatcgtaggagcggaaaaaaacgactaaattcatgatcgttttgtaatcatctgcgacaacgataagtttcaactattaagtgttcttaattcaaaattcaagacactttaaggccttgatttttttgtagatctagaatggttttggtttttgatttttgaaaatccattttttaaattagtaaagttggcaaaaaatagaggaaccatttgtaaaaagagctagtgaataaatgcacgttttggattttgctataatcaaaactttcacgaactatttgtcttgttggtttgggtttatgattctgtcgaacttctctgtttaaactttgactaagcatttgattgcagttttaaattgtgaaagccaatttaaataaaaagaggccctgtttttaaaaggcccattattattggatcttagcccaatataattgtctaagccaacatcattaatattggacccagaacccgacccagtaatcccttacccgacccggaataatctgaggtccaatcgttgcacccgagcaagaggagatagattgttcgatgcagttgcttctcatcgaacaactagggtttcgattcccacatttgaatcaaattcaatcgggtaatttattctgtcctttcgtatttgtatttgtgatagatttctcctctacgataattgtttctggagaggaatatctgttctcattttggtgtatctgaaatgcccatgaattttcactagtctgatcctcagttttagatgattattaaggcatgtcaatctttgtcgttgttgttgttgattgccacttttgtgatcttaacctttggggaaattgtgttaagttataatttagggtttatgttttcgaaagtctcaaaacacgaatttaaatctctctaatcagaaaaatctattgctaatatataacatcatgtgtgcattgcttcagtttctttcttgtttaattgtttcaggatggagaattctgatattgacatggtaatcatacctgatactccagatagatcggtacaccatagagaggttaagagaaggccacattctccagtagcaccattaagatatcaaagagaggaataccgtaatcatcatcttcacggaagagccagaccagtccctgaaattggggacaaccgggaaagttctgatacacgaactgagagtggacatcgccctcgtgcttctgtaggcaatgctttgtttaggagaactgttgttgagaaggataaagggaaatccatctccactgatccatgtgcgcctcgtgtagagaaaaatccggttttaaatctgaatcaacgtaacggacatgttcatgttggctgcttcgagataccaacccttctgaag

SEQ ID NO: 29661 - DNA, 1184 bp, Arabidopsis thaliana landsberg
agcatcaaactcacttggtccaaaaaacattatagcagataacaaccattgatattctcttacaccacagtttcattcatagttctcttgaaccatagcttgcctgtaaaagccagtaaaaatgttccaactttcatcaataacacattccacactctgaagctaaaacctttattgtcacttaaaccaaactatgaagagctaaaatcaaagaaaacaatcgacgattacgaccaaacctcagtttcatcaatcatcaatttaagtttaacaatcaatgtaagtcaaaactattaaaaccctcttgccatttaaacccaattatgaagagctaaaatcaaagaaaacagtcgacgattacgatcatatcagagtttcatcaatcttcaatttgacaatcaatctactgagagatttaataaacaaggagagattagaaatcacaaaaccctaaatccaaacaaaaaaaatcaaagtcgtcgtctttatctgcgtagtgaataatgaccagaaacagtatcaaccctaatcagttcagcatcgaattaaaaatagcacaaaagttaaaatcaccagagacatcgaaagaagaacccagaaacagtatgagttcaaattgagaactttagaaaagctatgactctaaaatcagatcgggaaatgtgaagaaccagaaaaataaaggtcaggtttttgagctgattttacccgtacgaaggagaccaattcgaaaactgtacgcaaaagctctttttttcgcccttttgaattttctcggaaaaattccgactttctcgatgagcggatatggttttttcgtcgacgtgtatgtcaatgaagcgtgcaaagctgtgttgccacgtttgactttctacaatgagtaagtaactctggtcatcactccaagtcattgctcttaaaccaactacaatactatttttgtgtgttgtttgatcaaaatttaaaacctcatcatcaatgtataatacacttgaaccaatctcaattctgtggagtatgatagttgctagtatttctggttggtagcacaaacaaaacacatcacgctacaataatctaatggtaagagactgtcttgtcttcttcagtgaccacccacccttgcttatggtaggaaactgtcaaattcaaaagacaaaaaccttttccacgaaactgaattc

SEQ ID NO: 29662 - DNA, 862 bp, Arabidopsis thaliana landsberg
  unsure (1)..(862): unsure at all n locations
agaagttgaagacttgttcagtaaggtaaattactcgtttcttctaatttaagaactcagaactcaggatcgaattttgtgttatgtgatgaatatgtctttacaagatttgcatgtgaaagaaattgaatgcatcttcggaattgttggcttctgattttatttggaagaagtttccttaagaattgttcttccttattttttttgaattatggacctgttgttcaaatcgatttgaagattccgccgaggcctccaggctatgcattcgtcgaggtcagattttttatgcaaccacatgttttataaaggcttgttgttgatttacagtaagctcttcgttgttgttgagtgttcatgagttttcaaatgttgggagatactaccactaatgttttgtgatatatgtgatttagtttgaggatgctcgtgatgctgatgatgcaatttatggccgtgatggttatgactttgatgggcatcatttacgggtttgttaatcatcaaatttcagaatttttacacaaactttgtattgttgactggtagccaaacataatttatgtgtgttggccattgcaggtggaactagctcatggtgggaggcgttcatcacatgatgcacgcggtagttatagtggtcgtggtcgtggcggtcgtggtggtggtgacggtggtggtcgtgaacgtggaccatctaggagatcagagtnnnnnnnnnnnnnnnnnatgtttagctttagtgtattcataagttttaggagaaatcactaaattaagattttccactatatcgtgtcaggtttgccttcatctgcgtcctggcaagacctcaaggtgattacacagttgtggacagatt

SEQ ID NO: 29663 - DNA, 1363 bp, Arabidopsis thaliana landsberg
cctgaaagatctttagttgttcagcccattccatcccggcacttagggaagcagctggtatattggcctgtaaccatgattcagatatccaagtgtgagatgaaaagaatccactgagaataatttataaatgaaatagaagatatatatagaatcgccgggggtagctgcagtattcacctgcaataggttcattatctggtcttgaataagagacacaagtggagaaattactaatgttattcctccacagatcagagcggggagctgccaaagaaagatgttataaaacagtttcgagaaaataacttgaaactttcatcatttttgatgtaggattatacaaatatctcagtgaaaaacaagaattagattgaagaatcaaagtgaaattataatgtacaggtttaagtctagtgacctgatatgtcaaactcttccctcctccagttggcatcaaaacaaaaacatcagagccactcattgttgcattgataatttctctctggttaggtcgaaacgaatgatttccaaacacttttttgttattaacctgaactttgcaaggaaacacatgagcacattgaacgtaaatgaacaaagaaaagagaaactcagcaaatcacctccaatttccttgtccagggaaattcacgactgctccattttttgtcgtttgaaccttcagtgtaggttacgtcaataatctttggaacatattgttccctctctacaggagcagatgaaagaccatatctatctacagaaaaggaagaatctcttggcgtgttccagctatcacaggcatatctgccttggtcacttacatgtgctcgaaaatcagtttgtggttgatccattttataatttgttgatttaggtgtttcatactggaaaatacgagtagctgtcgatgacaaaaactgagatttttggctttctttatctcggatatggttctcgagctgctgaatttgtttcttcagccgtaacctagcaacaacagacagttgtggtacattagaaactgaccaaaagtcaagacatactcacagttgtgataccctcaaatactcaaactcaagaaacatatgcattgtctattatttctttaagcctaatcaattttcactatattattcccaataaattttgctaaaataatataccactagcctccggaaggaagccaaattattactcttatagaaaagagccaactttaacagcaaagaaaacgggaacaaaactgattgggatatagacctctcttgacggagctgtccaacacgatcaggactcaggtcagtagcatcgtcaaggagttcatttgatattgcaagcaacacgtccttcatctgct

SEQ ID NO: 29664 - DNA, 2402 bp, Arabidopsis thaliana landsberg
tgtaatgtataacacgttgttaggtaatgataacgactggcctaattaatgtgcttgcattaccggaacaaattctttaatcatttcctcatatagtattcattgctgtcttgaccaatttgtcacaaaatgttgtagttgtactattatataaccccaagagaatatattttcgagtacttattattctctttgtttattacctcttataaacacttttcaattgtttgattcgtttgcaatctcaaatctagttacatctcaattttcgaatgccttttgtaatgtttatgaaaaagatacctacaactaattttgttggtcaatgtataatatccagatggtggtattatggaccattttcaactaaatgatcctaaaccttgggtcaaatgtccccctaaccatattttgtatccgtgccatcatcatagattcaacataaaattgttcactttatatcgatgcatacaatttagtacatattaaacaattaaaaatcgtaatccggtaataacaagtatcaatatgatatttacgacttacacgacattattaatgtttgtcattgtcttgacatcaaccaacttgtcaacaaactcttgaaaattcctttccgatgttccaccgtaagccacggcagactccgcctcctccttccacctccgagcgttttctctcagctccaccgccttctctccaacggtggcctcaagcagtcgctcagcaacctcctcccttggaacaatcctctcatcagaagctccacggctgagtctcaatcctgtcttgaaaacaccaatcaggtacaccgcatttgtcacctgatctccccactgcgggaaacaaataacgggaactcctgaagttaaagcctccatggttgagttccatccacagtgacttaagaagcaagcaaccgcaggatgagccaaaactttctcttgttgacaccattccacaatcttccctttctcttcaagctctagaggcaagacatgtggttctatggctaagccttctaagggaggacgcaaaacccataagcaggacaacggggagttgagaatgccgtgagcaatctcgtcgatctggttttgcttcaagaaagccaaagtcccaaaagagatgtaaacaacggaggatggttctctcgagtgaagccactctatgcagtcactatctggcttggagatgtctcccttgatgtcagaccttatggttttagccatagtaaaaagcggaccgatggggttgaagttgacttgagggcagagctgggacatgtggtcaatggtatctttttcaagttcttgaaaagtttcgatgagaacagagaaaggcttgtgaagtcgcttgatctgctctaaaatggtacctcctatagaggacagcggagaggaagggtgaagaaagctagggatctcgtcatgcttcaattttaatggcttgaaagggacgtcaacggttatttccggctcggtttcggtcggaaacttaactaactggtggtggtaatagtaataagcggcgaggcaagcacaagactggacccaaagaacagctgatgggatttgaagctcctcggctatgtcacaaacccatggaacaaaggcattatttatgagacatctcactggttgcttctcatatttcttgacaagattcttgatctctcgttttccggaaacttcaagtgatttttgtaacaaatcaaagtcttctttgtagacaaatccatcctcgaagaactcgatccggagaaaacctagcccgaccggtttgagcacaccgtcttgaatattgttggcttgacgcatcttcttgcccaatggttcctctgtggttacaaaggtgacgattaagcctttagaggcaatgatctttccgagacgaagaagagggcttatgtgaccttgccctgggaatgatacgagcatcacatgaggtaacgacgattccatctccatattttttttgttgttggtaaaactcaaaaagaagtttttgtcttctttacaatatttccaatttagatacctcgatttatggaaggttgggtagagaggcctttccacggcgtgctattttttatacaaatattgataataaatgtagaaaaatatcataaaatacagcatagacatagacacataaatttataagcttttagtcaattataaaaagatagtaataagacaaaacaaaattatagataacaattttggaaaagaagcgtaaaagaataaacaaaaactagaagagaaatttttataatgattatatagtgatactaaagtccttgagcagatgacctacttgatttatttttcaaagattacctgctctggttataatggtattataaaccacgagattagcgatcttcataattaaccaat

SEQ ID NO: 29665 - DNA, 1685 bp, Arabidopsis thaliana landsberg
gaatgtgtatttggatcaacacaactcatgagtggcttcattttttaagtgatctagaggttgttaagagctatacaacatactgattagattatagattataaacaataacggatccattgttaacaacggtttttcgtgtggtatacggttgcagaagatggagctatcgcagtgtgtaaatgcaagtttgtgtcttccaaagaaaccaaaattggtagttggattgaaagcagccactgcttacatatttgtggataatgcagcctatagaaatttcttatacgatacttttggagtctcctcctctgatatggagagttctgcagtagccatggtaattttgaatccattaatttttacataattttgatcgttaagtgatatgtttgtgttgtggatttgaccagacatgcgcatcaaatgggtatccgataattgtgataaggggtttatcagatttagctggagaaggaggagataacactgttcatgagtttggatctttggctgccactaacactgccaaagctgttttagagttcattaagaagctcccaccctactaattcctctagtgtaacctatttatcatgaatgtttgaatctagttctctagttcatatcaacgaacccgtgacaacaaatgatttggattgttatcaaattccattttccatgatcgtaacaatgacaacacttttatctcatatatctacgaaatgcaacattcgaaaaattaacaactttcactcattctagcgacaatcgttaacaagcacaaaaagggatgtatatataccttacaagagaagccaaattgttaaaattaaggtttaacatctctagttgaatcattctcatcatcgctatcgcaattctggctttgctcatcgtcagaagacggagacggatcgagacgggctgcgtctattgcccattggatcagcttctccacttcagcatcttctccgatttcatcagaatcttctccgatttcatcctgaagaagaacagaggacgaagaagacgcggaggggagagaagtcttcagagccgcgaatctaagcatgacatcttctggtgtttcttcaaccacatcctttgatttcggctgcattctcggccgttgtttctgttgttgctgctgatccttcttcttttgagatttgagagcgagaaatctagagtgaacatctggatctaagtaatcggaagaagatcgagaagtgtgagaatcaacagagagctttagtatcatctcatcttgagctgcttgaagcaactgttcaacttcgtcttcttccttgcctcctctcctcatctctcgaatctgttgatctcaaaatcgattttcaaaaaccgaattgcgactttatgatctctatacaaaaccggtttagtattggttcgattttaattggaccaaacgcctaacttacgggcacacgatgtcgtttcccacgcggtttagattccaaatttccgtgagatgtttatttgatctccaccgtccaatggaaactctgattatttcgttgccgttgatctttgaccaaaaattgccaaccaatcagtttggcccaataagaaaaggaagacagcctgaaactcacttaatgtatcggcccttgtttggtattatccaagtgcgattaatttatacgatcacatgtgaaccacga

SEQ ID NO: 29666 - DNA, 2122 bp, Arabidopsis thaliana landsberg
aatgtatatctgtttttgaaaaaaaattaatgattttggttatgaattaattttgcagtacgaattcacactcaaaaactgcttccaccacaaaacagaagacattgcaattaggatcaccatggggtttgttaacttcctcaactatacataacatacaacaaaataatattatcttttgtatgttttgaaccttaacgataaatttcttcttgttgtatacggcagggtattaatacaagttctatgcagctacatcactctacctctctatgctcttgttactcaggtacaacttttaacaaattttaaattgctaagtgtcaatgcgtcatgtttgaaacaattaagggtttgctacaaaattgtgattgtcccatatatagtttagattattttggatgtataggatttctctaacactaaaatgtgattgcagatgggaacatcaatgaggccgacaatattcaacgacagggtagccaatgcattgaagaaatggcaccacacagccaagaaacagacgaaacatggacactcaggatctaacacacctcactcgagccgtcctactacgccaacacatggcatgtcaccggtgcatctcctccacaactacaataaccgcagcctcgaccaacaaaccagcttcactgcttctccttctcctcctagattctctgattatagcggccaaggccatggccatcagcatttcttcgaccctgaatctcagaatcactcttaccaacgtgagatcacagattctgaattcagcaatagtcatcatccccaagttgacatggcaagtcctgttagagaagagaaggagattgttgagcatgtcaaggttgatttgtctgagtttacgttcaagaagtgataggactatactttttacattctgtttgttcattctttgtaaatgatatgaacttaggaatgaacacttttcttatttctttatctgaattttgctataagctcaaacgctttatgatatcatttcatattagtagacagactttagatctagttaactgatatgttttacacaaacgcttgtcctattcaatcaaatatgttttgtgttttggacttgcccaagaggtttcggtaaatgtaggacattttagagtggagaactctattaagtgttcttgaagcagagcaaaaggattccttgaggtctcggatattatgattagtcatatatcgttacgacaggcattgatcgtctgatagtattagatatggaacgactctatacacgaaaatatttagtctttctgtagaatctatccctcttactaaggaaccctttgctttgggtcttgacaacaatatacattagtgattctggttctgtgttggtgtaggatgttcaggtaatcaggtacgaagtgcgactggagcagacagagataagtagttgacgtaaccttcagagaccgagatcacaaaccgatggcaagcaagcgcagtggtggtgagagacatgacaaaggaagtccagcagaatctgagcatcaaaactcggtcactctttgcagactccagtatctttctcagtattactctgacccgcttgtcattgattagaatcttgaagtctttgactgtaatgttgattcctgaagatggtggtgggtctgaaagagaaatgaatttaagggattcaattccaaggcttccaaccatccattggtacatcgtagttgcaatcgtcatgcaaagtttctggcgtatgacaagtgcctctcttgaaataaatgtccggatcagtgaagtcccgttctgttttatcaaaacagagaacaatacaaagtttattacttgagaggtcatttcctcagaaatacgacaaatctactttaatcacaagttaaagtcaacatggggatgaatgatgaccataaccagaaaggtaccttattccctgtttactttgttagagactaatctttaagttcagaaaactggcaaaaacgatgggaagaatagcaattaggatgtagaaactaaccgcagccatcaagagtctttctaagaacacaccatttttggatgccaaagtctcaaaccaaactacattgcagcattttgtccgtagattggactc

SEQ ID NO: 29667 - DNA, 2165 bp, Arabidopsis thaliana landsberg
tacaagtaaattatttaattagaagttaatatttaataaatgtaaattgtagttttaattggtaattaaaattttaattagagttataacacacaaaaaaactaacgaaaaattaattttgtacaacatgtcaacaagaaataaactttcaattttagtttcgaacatgaactatacaaaaattgaaacaaccttaaaaataaattttaaaatatgaagaataaaaagtaagtcaaataaaaaccaaaataaaagtagattaggcattgacaaaatccaacggccacaatgcaacaatgattgttaccggagcttgcgacttctcttcatcactctccatcgcctcttcttcctcctcctccaccgtctccgtcacaaccttcaacatttcctctctttcctctaaccccaacatcatcaattccagctcaactctcttccgttccctttccttctcccttatccgccaccgcagcagctactcacgtcgctctctccgccgtctctctatccacacagttcatggaaacaaaactcaattcttctctcactcgtctacacgtactccaccacttttcacagctaattccacggcccaccgaagcgggactttcgtcgaacaccttacaggcattacagaatcggaagaaggaatcagcgaagccaacggtttcggtgatgtagagtctgctaggaacgacataagaaacgtcgcgactcgtagagtagagactgagtttgaagttagagaattggaagagttgcctgaggaatggcgacgctcgaagctagcttggctgtgtaaagaggtgccaacgcataaggccgtgacgcttgtgagactcttgaatgctcagaagaaatgggttcgtcaagaggacgctacttacatctctgttcattgtatgcggattcgtgagaacgaaactggattcagggtaaaaccttcatcaatctttagaagctttatcaatggatttgtgttgaatttgtattgaaatttttgatcttttaggtgtatagatggatgacacaacagaattggtaccggtttgatttcgggttagcgacgaagctagctgaatacttggggaaagaacggaaatttacgaaatgtcgagaggtatttgatgatgttttgaatcaagggcgtgttccaagtgaatctacatttcatattcttgtagttgcgtatctaagtagcttatcagtagaaggttgtctcgaggaagcgtgtagtgtttacaatagaatgattcaacttggaggttacaaaccgcgtcttagtctgcataactctttgtttagagctttggttagtaaacaaggagggattttgaatgatcagcttaagcaagcagagtttatctttcacaatgttgtgacaaccgggcttgaggttcagaaggatatttatagtggattaatctggctgcatagttgtcaagatgaagttgatatagataggataaactctctaagagaagagatgaagaaggcggggtttcaggagagtaaagaagttgtggtatcgttacttagagcttatgcaaaggagggaggtgtggaagaagttgagaggacgtggcttgaattgcttgatttagattacggtataccttctcaggcgtttgtgtacaaaatagaagcttattcgaaagtcggcgattttgcgaaagctatggagatatttagggagatggagaagcatataggtggtgcaactgtgtctggataccataaaatcattgaggttctatgtaaagtccagcaagtggaacttgtggaaactctcatgaaggagtttgaagaaagcgggaagaagccgcttctaccatcattcattgaaatagccaaaatgtacttcgatttgggtttagatgagaaattggagatggcttttgttgagtgcttggagaaatgccaacctagccagactatatataacatatatttggattcattggttaaaataggcaaccttgagaaagcaggggatgtcttcaatgaaatgaaaaacaacgggacaatcaatgtgagtgctagatcctgcaacagccttttgaagggttacctagattctggaaaacaagtgcaggcagagaggatatatgatctgatgagaatgaagaaatacgaaatcgaaccaccgcttatggaaaagc

SEQ ID NO: 29668 - DNA, 645 bp, Arabidopsis thaliana landsberg
aacctctgatgcgtcattggagttccaaccaaactcacctcgcacttttctcttttgaaccctggccctaatgcccgcttaaccgctctccacatcaccttcaccaaacggtaccagtacattttggttaagatttgttttttcgtattcagagaactgaagattacaaaaatgaataggtacctcggaccgttgggatttgagattcttgtactcggcacttcttctatcaagaccttcccacagaccgaaaggttcggttccaggacagtaagcgtgtagaacatgttttcccggtggtgcaaggtttgggctaagaacactagggacagatatcagaaccacattctggtcagcatccacaccgcggtcccagtcattcacaacgatatgatgaatctcaagatcatctgctattccctattccagttccacttaaaaaaacatcaaaaccaagaatataacaaacacacaaaactgaaacgtaggtaaagtggattttccttttgatacctctgcgtcgaatcccaagtgaagatgcatgaatgattcacattgaggtgttgtgttcacaccttttacatatgaatctgggagagctcctggaggtaagagctttaaagtatcccacatcgatgcattgct

SEQ ID NO: 29669 - DNA, 1736 bp, Arabidopsis thaliana landsberg
  unsure (1)..(1736): unsure at all n locations
aaagtgccttgtactatgcaatgtgtgatagatgatatgttgtatacgattgatcctctttgtacttttggacatccaatagtcgtttataagccaaaggacaagacttggagacctgtgaaaggggaatccttggggagtttgcctagttatttcttttctaagtctgaaatggcgaattttggtggaaagttggtgattttgggcagtcatgggagctgctataatactggtgattgcattgggaaaaaaggtatttggtgcgtaatgatcgagttggaaaaacgtgaatgaggtgagatttgggggaaggttgaatcactcgactgtgtgcttggagacataaactttctgtcggttcggctttgtcaaactctgaccctttgatgatacaagggatggtttcttgcaggtacgtttatgtgaatgagtatgaaccttttttgatattcatgcctcttctttagcctcaaggcttacatacctgtcctttttcatgatcttgttgcagatgaaggatctttattactcaagagtcaagagtaactctgtccttgttaacctttgtgtacaataataatactcttacataattatcatagccttgagtagatttcttaagctgtaacaagagtggggctatctgcagttatacaatacattccttaccaaaacttgttgaaatgcatctttagttacagctatgttttggatattttgtgcagtttcacactttcactaatatgctatgtgctctctatttgttcttttctgtaagtaataatcacacacaatcaggtagtaacaaaaactcattctgtttctactatatgtgcaaatatgaaatcatttagaattcagatgaagcaaaactaaccgagtttagttaacttgaagattcaaagagaacagagtaagaaataccaagtagccgaatgtgggctttaaaaagcccatataatggtcatcgcgtaaaagacgtgttagagaagatataaagcctcgttagggcagactaaatcccaaagtccaccacaatcacccaaacataaaacccgtaacctaattccgccggaatccaccgatgcatgtcatggggactccttgagatgaaacgaaaacgcagtttaagaggagctatgaacttgttttgcttcaggtatgattgactttaaaaaatacctagaaactataaacctcagtttctttgaatttgatttttaaagtcaataataccttgaagcaaagctcgcgttcatcaccgccattcgggtagtccaaaatttcagagatattgaccatcgtcgtgtgtaaagtcagcagcgagaaataatggaaacagagcctgatttggtttttgagaaaggtatttgggtatttatatacccataatttcatttgtattttcttccttaaaactcgttttaatacaatactacaatttagctgtttttttcctcactaaactgtattttcacattgaaccagaaaaatcaaaacagaaattcactttcaaattttcatatgattttttctatcatttttatttttaacatttgttactccacttattctcctaagtgaaactgcctctcagtagaagcaaatttgtttttgttaaatctgattgtgattacttaccaactgaacttgagactacgttagtgaaactgcacaacaatccanaacatagctatgactagatatggatctcacacaggttngattagaatatc

SEQ ID NO: 29670 - DNA, 2869 bp, Arabidopsis thaliana landsberg
agaaaactccagtgcgcaaattctgaagaggtagctggagaagagggaaaggcgacattcattttatacaatttctgtaaaaattatctgcgaattattaactagttattggcactccttagtagtcgcctctccgcatccattgctttaagtgcttcattcgcctgttgcctagtgcgttccagctcttgttgcatggatgagtgttgagaagatgctcgttcagctgtttcattcacttcccggaaacgggcgtcgagatcatctttttcctgaagatagcaatataatataccactgagattaagacagcacatagcagcgaaatctatatgtctgaaaatgcagcatagaaattccgaaatagtataagatggtttttgaaactcacagtagcctcaaagtggctaaaacagaaagcattataaaatgtagagaaagacattcaccttttggatttcttgaatgcgttgtttagcccttttgtgaagcctggtgaatttggcgtccaggtcggcatatttctcgtcgcgctctttgatttcctggtccagtttctgttcaactacaccaacaatgtaatagcacaagttgagaaaaggcaaacactggttccggtcaatgaatgagcaaatagaaaagatggcttctgaccttgggaaaacttagaggagtattcttgggatttagcatcagcctcagagtatgcttcccttagatgctcaagagcttgctcagctgcaactcgagtttgtttttccacatcaatttctctgctcaatgatgcgacctgttcttgaagttgtttcagctgagcagagtccgctttcacttgcttagctttctggagagacctaccttgcgctacctcatccttgagttcctcaaattgggaactgagaaagtcattttctaatctcagttcagcaatcatttggagtagctgatcaccattttctgtcagagtctcgctggaggcatcatttaactctttatcttctttgatcacatggctctcctcttcttctccaaccacatcagattccttgtcttcggacatcttggcagagcagatgtcagaaagatgaacccagacactcaagagagcgacgagagtagaaacaactagtaagcgcaaaatcgggatttgaatcaacaatcaaaagagaaaggagtcaagtcgtgaaattcgaataaaccagcaaaagcaacgcaaggagaagagagatttgaatgtaatcagtgccagagaagaagcttaccttgaggtgagggattagagaagagtgtggaggcagagagagagaggtcacaaacaaggaatcacgatttcgaaatattggatcggatctcaacccaaaggttaaaaacgtcgtcgtctctttcccgtcgatcagtgagacggtaaaacgttgatctgatcgactgacgaagaatggtaagaattgtgtaaagggtgttttactaatgaataattgcattcagaagcctcaactattctagtattgcatgtaaaaccttaaaccttttgaaaattcatcaagtaaacccaagacgaggttagctaaaatgatgccgttttggaatggtaatatgaaaatatgaaggacagtccgataacagcttagcccataaagcagcaacttaggcccattatgtatttgtaatatatggcccaattataatcactttcccaactaatttatataaaatgaaattattgaagtctttgtccagtcaaatataataataagccattgaaaaaaatggcggacgagagcagagtcccatcatcggtgtcggtaacagtcgcccacgaccttcttctagccggccaccgctatctagacgtcaggtaacgccccacctttctcttttgactatttcaatcatcaacatagcatcattaggatcttgatgtaatggggatgatgaatataggactccagaagagttcagccagggacatgcctgtggggcgatcaacgtgccttacatgaatcgaggagcatcaggtatgtttttatttggttagttgataactgagtgatggatataattttgtgattgtgaaacagggatgtcaaagaaccccgacttcctggaacaagtctcctcccatttcggacaatccgataacatcattgttggctgccagagcggtggtagatctatcaaagccaccaccgatcttctccatgcagtaagctccaccacaaagctcttctttctgacttttactttgttggtgatatataatttgcgaatttgcagggtttcacgggagtcaaagatatcgtcggtggctatagtgcctgggccaagaatggccttcctacaaaagcttgatgactcaccattcaccaaacatctttccttatctcttcgtctccttcttcttcaataatgcatcctttccgcatgtaatcatcaataaatgaccctcctttctctttgctgtctgatgtgatagcttggagggaggggttcatcgcatctttttacaatatataaaaatgcgagtgtgtgttgattgcatcgaaatctctatatacatagtttcaaaaaacaaatcaattagaaaggagaaaggagcatccgatcatcgattatatctacaagattgttaccttaaaggtccatctgttcttggcaacagacaatatatgtgtatatattgagtgatcgatgagttcacaaaggcatcatcaccatatcaacaactcgatcgtgtgtccagaacaagtggtgtgacctaacaaggctatcttcaacacccgagagatgcaacaagacccccctgagatattgtcacggctcaatcagaaaagatagtaaaagagaatctgagtgaaccaggccaatatca

SEQ ID NO: 29671 - DNA, 3282 bp, Arabidopsis thaliana landsberg
gcaggcacgtccttaatgttgacccatctacacaccggcctacacatattcttttcaagtttgatatgtacatgtactggtacggtcggatatgtctgtataacatcgtatgtagtacgtatgttgacagagaaacaggcgtatacatttgctatcaaaatccattccacaaaaactcccctcatgtttttacaacacaaactaaaataatcaagtttttaaccacaaaaacttcaaatactcgttcggtttcagcgaaatcagtttaatgtattccgatacataaaccgtagctctaatttagcttatcagaaagacaaaaaaacgggtaaaaaaattgattgtgttagttgtgtagtgaaagcaggaaatgaaaaaattgctgaatgatttcaatcgcaaatgttgtgtaatatttagatattaacttccaatagtgtctattatatgccaaagttagcattattatatgcaaccgcaaatcgcaaattgtttacaatttagaagttagtttccaatagtgtctattaagcctgttttgtaagatcctacataggccaatcgcaatacggcaaaagagaaagcagtaattctaggcttctatactctttcaatgtaacatagctaatagatagagaccatgatccaaaattctgagcataaatatctccattgataaagattaggcgcaacaagtggcaaataaaaaaagaacaaagctcatttatatgtatattgtttaaaattaggcacaccaactaaaaatcccttttaaagaccttaattcacgaaacagagcattttgtctttcttaaacttgcaatttaggaacactacaacaagaagctgattcttacataaacttgttaaaagaaaattcgaaaccaaaaaagcagcattccccatttttagcaaaaccttgtgtttccaagcttattatagcatttgagcagctgtgtttagcttctccgctagactcaactgtgtccttgttatgcttgataggtacaacagaagcaattggtcctgaaataacagaagaaacaaccattagttttttacaaagtgttttgctttggcttgaaatttacaatcttttacctggagactatcattcacgaggttatcgaagacttgtggaggtaacttgggaagggaggctactgcatctgcaatgaatcgtccaatgttgttgtctggagctatttgacctccctgggaaatttcattaaaactctgtatcaaagatcatgtatctatggtcgataatagacagtcaaggatatcataagcttaccacgacactgtcaacatatttgtagacatcgttgattagagttaacagcctctccattgttaactccattccttccaagtcatttgggagtttgtcaacagatgttgccttaagtacatcgactgtggatcaaaatgatgtttttaaatcagtcacaatcattaatctactgaacagacacaaccaaagatcatctattcccgttggttcattcacaatcattagggaaacaatctctagatactgaatcaaccatgcagaaactgaactacttagacaattgaggaatgaggactgttatgtattttgaatatagaattggttactaataaaaggatagaatactcacatccgactctctcagcatcaaccatgcggagatcaacaggaatctcttgaaaatgtgcatcgagttgttgatcaccgagtgagaggtttgaagagacaaaagctttgatagtaccctgaccattagtaaacccagtatccacagttaggtgaattgggttgggtacttctctagcatagaaatcatgaatcagcgaactaccgccattaaccccagcaccagttgaatacctgcaaatcaataaacttgttcaatcaactattccaaaatgagaaactacctaccactaatgcagagttccaacacagctacaagaatcatgtgacaaagatatgagactaatcatgagagtataagagaataagagaggggaaacgagaagtaccagccgacaataatttcctttgaattcaccttaaggtgtgaagctaacatattgtggtggtaatcaatatccacagcaacctgcatccatatcaaactataaccctcaaaacttatcacaagtcacaacctttaggtatgaagctaacatttgatctgaaaccaatttgtcctaatataaacctcaaattctcacaagcatatcttcagctacgaaacagatctagaatctccaagagagagcagaaaaaatctagcttcgagagggacgaggaatttagatatcaaaatcgaacctgatcagaagattcattgtgagggacggcgtatgaattgcggatatcgacggttccgtcaggtaagatagatccgaggagagttccgatgactctttcggctgagtcaggacgtctcacgaagcaatcacagacgttaaagataacgagagggtggatcctcgccgtgagtacagaggttgtagcggacgccgttgatgacggagacacaaattgcaagatggtgtgctcgctcgtcgccgccatggttaagattctgagaaggggtaaaaggcgcgagagagtggagatttagggtttccgatgtgagcgtcagaggaaggtaggagaaggcatcaatgatacagaagataggttatgtgccagtgggcctacaaacaggcccattaaatgtttttcttggactaatgaatgaatactcattcaaacacttcccttctttctcttaatgaaatttgttgaacacaaaaaacagagaaaggcaatgtcgttttatacatcggtttggttactcatcgtcggtttgggttttttataacgtttttgtgtgtgtgtttatcattgaattttgaatattatacactgtgaaagtgaaattgtgtttttctcataatttaacatctacaaaggataggtgtgaaattgtgtttttctcatacactaacatctacgaaggataggtggtgatttgttgacgattagtcagagcatatagattagtcgttactcgttagtagaccacccatatttgaattacgacttgtggataattcaaagtatggattacgatattcgtaaatgttatcgtttgttaaaaaatctcataaatcatataaaaatgaatttgtattcaaatatggatcgtcaaatgttccaaaaatttcactatcttacaaagtaaattaaaacaaaccaccaatttaaatttatattaaataattataccggcagtaagt

SEQ ID NO: 29672 - DNA, 1752 bp, Arabidopsis thaliana landsberg
gatcatcaaggctgaagttgtatcgtttctccaatcccaaatatagcacctgcattttcagatgattataaatgtacatgggattgcgtaaagctttaaagtgatccaactattatttaccttgtcacaaccgaatgacattactctccttagcatgctaaataacgcaattgttagatcatcgctgtagatcacatctgccgcgaaaatgaagcttgcacatttgactagttcaaagtcctgcttgttccaacagtagcttgacataaacaaaggagacagagctatgtcaacggggcacacaccaagaagatatcaagagaaggaagttttttatgaatacttttggggatctctgcagtcaccatgggtgtcttgaataggccaatcgctcatccagttgagctcacgaacatttaccacattgtgggggtgaaacaaggatgaattcaattccaggttcttagcacagttgccaaggatctcgtctccatgatctatggaaaacagaaaagcctggtgagaacaccagctacagctagaacaataaaaggaaggaagtggaaggtgcaccagtaaggaaaatagccttggcgacccgtgcaagcaaaataccgagtagccctgggaaaaaaggagaagaaaagaaagcaagataagactgaacacaagatgggatgggatgggatggaatggaagagtatccaatcctctcatgtatgagagatgatgaagggaccacctgttccagcaccgagttccagacacacaatgccatggaaatcagatgaggtgcaaatcttatgcagcacaaattctgataagaccagttgagctttccacacctgaaggaagagacagtggtcgtcagtcatggaaaaggcaagagatatatagatgaggcatacatacctgcagaccaacatgacggagatttgatgtgatagaatgctgaatagtgacagtaaacgatgggcctgctcgccaaaagtattaagtaacaaacatgattagtgtggtttgactcatgcatgagagatggaaaatcaaatcttactagggtaattgcgtctaggaagaagaagatcgccatctttatctacactaacagtattggagggaaaagagaaggtgaaacgggaaagaaagggatcgttagtggcggcgggagggcaaccaaggtgaatctcgctcatcacctcaatctctgaatcctcctccattttcgacaataacacgttccagatggagatgtaacgaaagttggattttaagcatcaaaagagtgagtttggattaaagtggcggcggcggaataagtttgttttttttacaaaagaattcacacacagacgacgacaacaacaaatagaccaatttttctttgggggtatctaattgactaatgatgatgattcacagaggagaaaatcaatatcgggagagggcatcgacgcgagcggcgacctcatcaaaatcggggacgcaggaggagggcttatgctgccacgaggctgttcgacgactcattctcctaaaaccctctccgcttgctttccccatcgactctgatgctctcatcatgttcttactctctactttcaatttcaatgcttccccttccgtttccgcttcaggtggcgggtttgcgaatcttcgtctcactgatctcggctttggttttccgcccgtcggcgattctgttttagccaacatacatattatcatcagtgccaaataaaataaaagtga

SEQ ID NO: 29673 - DNA, 1037 bp, Arabidopsis thaliana landsberg
tgaagtaatacccgttaatataattcacaattcgttgtattatctcccatactctattatatatcacaatttaagattgtaatgtgaggctgtcaaatggtttgttgtctataagacatcataagtcacatacccctgtaccatcctttgtcttgtagtcggttccaaagacagtaaggtgaggtctccggccaactgcaacttgttggacataaggcatgagattgttgggaactccaagaggatcttcaccaatgtaaccactaggatgtgcaccaacagggttgaagtatctaagcaatatgatcttccattccgagtcagaacgatgtacatcccggcaaatctcttcgataaaaagcttacacagcacaagcaaataatctcagtcagattcatttcctgattattatcattcatcaccactatcacaaggtgggcttgggtcaatactcaggctaaaggtgctacctttgtacggccatatgggttagtggcagaaattggtgactcctcagtgcagggaacctccttaggccagccatagacagtagctgatgatgaaaatacaagctggaaaacagagtagtaaaagccaataatgagatcaaacaagacaaactcaaaaagggaatgcatgtggtggcaattagaaaaagagagaggaaggaaaaaaattacatttttgcagccgtattgagccataacctccaaaagagtaatagtgccaacaatgttattattataatagagcaaaggcttctccacactctcacctactgctttaagtccagcaaagtgtatcactgcatcaaacctatcataattccacgtttccattaaacttcgacccctcaattatatcaacagcctaatcataaaaaagaaaagcttttttactttgtttctgagaatatcttctcaagcgcaggcctgtctcggagatccacctgcaggtaccaaaaacaagatttcagaaactaaaatgactacatagattctgatttctgcaatggcagactataactttattggtc

SEQ ID NO: 29674 - DNA, 1722 bp, Arabidopsis thaliana landsberg
  unsure (1)..(1722): unsure at all n locations
ctgtttcctaaatcttgacaaaaatgtcattgcatatgtttggtgtacaagactagaaactgttgttttgagttatgttattataatgttaaactgtattatgctcaaaattgaactccttttgaaaggtggtttatcttctttactaatcgtttcttcattttctctctaagaggtgggaaaaagattcaaccttgtcttggaaaaagaaaagcaaagctctaatctttttcttttgtacctctctcttcaaggattaacaaaacacatcgatgaagcccgggttttagtacctaaacatctctttgtctcgtctttgaaaacccccccaagtagatccaacatcattcatatctctctctctatctctgcataagctacggagcgatgtcggcgtgcatcaatggcttatgcagagccgtgactgtctctcttcttcttcttcttcttctttctttctctttttcctcagcttgctccaatggaaattgccaggttcttgattctctttgcttattattctctggtttatggctatcaaatttgggtctaaatctttagggattttgcatttttgtgtctctttcagctgctggattcatgctcctcggctactgattgtgtctctggtttatactgtggagactgtcctgccgttggaagaagtaaacccgtctgcacaagaggccaagccacaagtccaacttccattgtgagatttagttcctataattagttggatttctctagagtttccaatttttgaagatgcgttgtttcaaaagatagtctagatcacttggtctatcaaaagttttgaactttgaagatgggttttgctgaagatttcatttggttgcattaaaagatagtctagatcatttggttgtatcaaaagttttgaactttgaagatgtggtgatgaaatttgtgtgtgtgttttttgtagatcaatggattgccttttaacaagtatacatggttgatgactcataatgcctttagcaatgcaaatgcaccacttttgccaggtgttgagaggattacattttacaatcaagaagatactattactaatcagctacaagtaatgctcttattaccaactctcttattatagtttcctcttattttggataaaactcttgaatgtatatttttgttctagaatggagttagagggctaatgctggatatgtatgacttcaacaatgatatctggctttgccattcgcttcgagggcaatgtttcaacttcaccgcttttgtaagttttatcttcagcttaaccttgctggatcgaaagcttgaaacctgcttggattggtaaatgtgaactttgttttctttttgaatcagcaacctgcaattaacatactgagggaagttgaggcatttctgagtcaaaacccaacagagattgttaccatcataatagaggattatgtgcacagacctaaaggcttatcaacactgtttgccaacgctggtttgnnnnnnnnnnnnnnnnnnnnnnnnaaaatgcctagaaagggagaagattggcctactgtgactgacatggtgcaagagaatcataggctcctggttttcacttctgttgctgccaaagaagatgaagaaggcgttgcgtatcagtggagatacatggttcgaaatgaatgtgcgtattacacaaagtttatatctttaatgaaaattgtctctgagaataaccttctc

SEQ ID NO: 29675 - DNA, 1110 bp, Arabidopsis thaliana landsberg
  unsure (1)..(1110): unsure at all n locations
tgaccgttctcattcagccactctttttctctcagaaatctaagaaacggtccgggatcgtcactgaagccataaggatttgttgtgctttgttgaacgttgccgagcttctctcctctagattcatggtcttccatgtagagctgagggtgaaacgttgagttttgagaagaatcgtttggtgtcccgtacctagctaagagactgaacttggaagagccatgagccataaagtttctcaaattgtttgttccctgagcttgataggaataggctggtccaagattcctactttctctgtaccgacgnnnnnnnnnnnnnnnnnnnnnnnnnnnnaagggtgggtttgtgtatggcttcatgataccggggagttccatatatcgtgtctgatcatagaagctctctgctttgttagtactagcgtcattatgaaaccaagaagcgtcttcaggcagtagtggagcagacggagtaggaggcgaataggaagacgcaggatgctcggtgctgctattgatggagagactatcaaaggctgagacaggacctgtttcatcaatagggcccaatccgtttggtttacttaaaccgagtcgtcctttctctttgttcttgtcaaccacccacgcgctcagcgatggaggtcttcctgagacagtgccttcttcgagatgcaaatgttgtggatccgtgtccttaagaccttgcgtaaagctgaaactttcagacccaatgagtgataaggtacgtcttaggctgtcattggatgtagttgtttgatttcctgaagttgtgcaatcagagctaagtggctttgctgcaatgccagaagaatatattggagcagattgacaccttacgagcggcttgagaagaatgacttcttcctcttctacaggaacagatctttcattctccaaaggaatgatttcaactggtccaatagtaacgcattttctgtttctaccctctccatttccatgaaagagctctccgttgcattgcaattcacccgaagttgtgtagaaatgagtccgttgattgtcaaagaatagccacttttgagaacccttcttctgcctagttgtgatatcaataactaactct

SEQ ID NO: 29676 - DNA, 5981 bp, Arabidopsis thaliana landsberg
agagaaaacagatctgcaagaaagaacattttttctaagtaaatgagtactctttaaaaccaaccaattttctgaatttagccgtaagaaggatcaacagttgcccaaaacacatatgtatacttccaaagaaaaagtaaaccaacagtgcctcgttagaaaatattcaaacgtatacttaggatataagcttactataaaagttacagagacaaaacagagcaggtattgaactctctttatctttgggtggacaaaaaaaagaaaacacttttagaaacttaaagaaacaaataaagataacagagaaagggaaaagagagatagtcgtacaaggacactgaaaggccaagcaaggattgatcttgaaactttagttctgctttgcaaagagcgaaaactccagcttataagtgcatttaccaaaacgaagaagttgaacaaatttatttttaaaatgaattccagtaaatacagacaagaaacaaataggcatcaattaaataaaaaataaaatcacgtggatctcagaggggattcccagaaaaataaagttttatacttccaatgtgaattgataacaaaaagatatgaatacagtcttatttatttatctttgttgttgtcaacagtcttatttttaatttatagacatctttttcttatgtctcgcgaatatgtttatattttttagtttagtttctttaattaagtagtactatattaataatgattcttcaaatagaatattgaaaattcagtgtcatttagttaaaatgatgtgatcaatgcatgtgatctacgtaaaaaacaacatgaaatgagaagtcgcattagcttggttaaagaacaaatagagaagggttagttaatgcagaattgctacagctgcttatgaatgggtctggctaatatcatagatcttaaattgcacaaaaatcatatagtagtaatgtagttataatttttaaaaactgtaatataatagtaccacttaataagagttgaaaagaaaagacaaaggcgacagcaagaatatatacagacacagtccttggttttaccgttattttcacaaatgaaatatattaaaatttcggtaaagactaaagacgaatttggcatttcgatgaaaaatcaacttttatattgttttgagtgtaaactacgtacctatcttcttagttcttcccatgattttaatgtgcacggtaggatatttaaaataactcgcatcgaacaaatccgaattcaattattcaaaattgaacctatccttttatgagtactaaaggacgacaacaaaaatagtagtagataatttcaatgcgtggatttttgaatttaactactttaatgttatcttgcgtctatgtcatttagccgttaagcttattatttaaaaatgtaaatttgtaattaatagatttttcttataaagatgccaaatattgaatacatctttttcccaaatgttatgtacaatttgtaggtacgtaatgtggtcatgtcatcaagtgtttaatctcacaagtcgaaagtaaaggtgatatatggaccaaaacataaaactcaaacgatatatggaccaaaacataaaactcaaacgtgacagtgaccagtaatatgtacactttgacatttttcttttattggcaaaggatttgtttgcaataacaaaataaagtttataaaagaattaaacatgaaccatatcaaccaaaaaatagaagagaaaataaacaccctataaatgtagcattcaaagaaatatacaaattctcaaccatcgtttcaccaaactaataagtggtaagttgataactactgatcaaaccaacatcactaagtaagtaagggaccccaatcgaagcagagcctaagctttgtttagagagatcttcttggtcttttgggacaacggtaacatcaggttgtagtgtataatgtcaaggtgataatggtgattatgttccttccaagtttcataaatcgccatccttggagcagagctagagctcaagctttatctgttgtatcatgcagcaaccaagagaagttgattccaagatgaaggagccaactataaatatgcagcatggtagtgactcattgccatatctgggaagagaattgacactcaaattctgttaaaatatacacatgacattacataattgtctaagttagttactaaaataacacaaactaagtccaaaatgagctctggtttagtatgatcaatgggagtcaagtaaatttaaattcatcaaaaatattttacttttcattacagatttacatgtgtgcaaaatagtacaaattacaattcattcatatgaagggtttactctatagccaaaactgggaagaataaatttaatcattaattggttaattccaatttggtagataccttacctatttgagagttgagacttatgttttttttttcaaaacaaagaacaacctaaatgttaattttactttttccggactctctttgggaacgagccactttgaaggcccataaataagcccaaatatttgtcagtttatttgggtttagggtttctcagagtctcacagctgaggatatactcttttaggtttctacagcagcttagtctctctgatctctctacctccctcacaccctaaaactcagcaacaatggccgttaccttttcagatctacacacagaggagggtgtcaaatccgtggaggagtacctcgccggaaaaacctacatctccgggtaaagtttctcacttttcctattgtttttgcgacacgattcgattgtttctattcccgttttgacgtataagagagtttgaatttgcagagatcaattgtctgtggatgatgtcaaggtttacgctgccgttccagtgaaacccagcgatgccttccccaatgctagcaagtggtacgagtccgtggcttcccaacttgctaaaaggttcgtccttttttcggaattttgtaataatcgattcagatttggatttgtatattgatcttccaggaattgacgagttttgatttgttgcagtttccctggaaaggccgttggagtacaattcggtggctctgctgctgctgctccagctgttgaagctgaggtacctttacttgaatgctttattctttattaccatagtcgtagaccttagaaaaagggtaatgaatgtagtttggaactatgatttgaaaggtgatatttccaatcttgtattagggatcacgagctatgtttggtaggggaattgattggagtttggtttggaatgttgtgtgtgtgtgtgtgtgtgtgtgtgtgtttacgctatcttgcataattgtcaacaggcacctgcagctgcagctgatgatgatgatgacatggatctctttggtgacgagaccgaagaagaaaagaaagctgcagaggagagggaggctgctaagaaggacaccaagaagcctaaagagagtaagcctctttattgaattcgatagtacatatacaagcatgtgaattagtaactgcatcttaaattttaataagggttctaactctcttttgaattttgaactctttgttaggtggaaagtcttctgtgctcatggatgttaagccatgggatgatgaaaccgacatgaagaaactggaagaggctgttcgtggtgttgagatgcctggtcttttctggggagcctgtacgtttaaactttcaatctttatatcagagtaagcttgttactctttgggtgagacagttttataattgatattttttttctccctgtcttgcagcaaaacttgtaccagttggttatgggatcaagaaactcacaattatgttcacgattgttgatgacctcgtgtccccggacaacctcattgaagacttcctcacctcagagcctaacaacgagtacatccagagttgtgacattgtcgctttcaacaagatttagagacttcaaatttctccttaccgaaacatatcagaatttcaagttttgttttcgtttgtgttgtttaccgaaatgtttctttcctagttgcaagaccgctttcatgttacaataacactaaattttcaatggttactattccgttgcatcattgttaagaaacatttagatactttgacaaattctctattacttcagaaataattacgtatcctgcagctcccataaccagagaaagggtgagttttcctccgggaacaagttgaggtaatcttgtcactgttgatgatgagactatgtacctatctgaccaagacattgctgctgggaggattccgaacaataccagaactacgaaagagaacatacagttgttaggttttcatgtttgaacttgttgattcaggtttctcaagaagagacttacctccatatgtcccggcaaaatctaaggccttgaagaaaatctctggatccagtagggacagaacaagcggtggaacgagagtaagcaagtaaagaagaggcttgttctggccactcgggagcttcaatactgaaagttttcgatgaaagaatagattatacagttatgtctccatggctgtagatttagtagaaaaacataaaagtttgattgtttgatgatacttacagtcagagaagaaatcagagaggcctaagacaaaccctatataagatgttgcgattgcaaaaagagagaatgcttccacaaacggctgtgtgatcaaaagaagactgattagctggtgattggtgagagtttatcaaataagcaagaacaactaaacttacaccgacagtgacactacttgatctcaattgttgcagaggatcgaccatcttctcaacagccaccccagtatctactggaaacgatccaagaatcacagcgtcccacacaagaaacaagccaagtggtatggctgtgccaagaacgatggcggttctgaagataaagatattaagaaggttgagttagtccatacagactgagtgagtttcaccattaacgttgcagggtatgatgtcaccttactctcggcaagtctccttcaagatctgtgcagagaaccggcaccacattctgtaagaaaagcaaccaattgagaaagaatcttcatcttggagccaagaatccaagtttgaaataatgagattccctctgactacctgataaacaaatgacagagcaatgatgggtatactcatgggaacggcctcaaagttagccttgagaagagcttcccagtgtaagtctccacttgcaactgcctaacaatatggtcatgaggtcatctatggttttgttttccatttaatgaattcacaggaaagtatttagccaaaaacttgttaccacgagtgctgcaaacgatgcaattactccaaacaccagaactccattggctgcaccgatgaatcgctggctgcaaccacatggaggaaggtatgattaacttgtcgggtctacccctattccactctggttctccttgtgtttatacagtttctgatttaaattgtggcatcagtgattagtttaatatggagagctaaccttccaaagaagcaaaggcctccgaagatcagtgagaatagagttgcactctcccatctacagaacattctagggaataagtacagaagcacaacactcaaaagtgtcagtgtaaatgaggatcaattggagtttcatacatcggaatgccgaggaagttggtaaggatgcctgatgaccgagcaatgtaagccacaagaagggtgtaatgtatgagaagataagaccaactacacaacagaaaggcttgtttcaagtttaaatgaaagaaacagtgatggaaagcaagttctgaagtgagaatgagaggatgattacgaaacaacttgaactccaacagacccaagagtccgcttcgccattgagacctgccaaaatatcatgtcaaagctgagtttaaagacataataactaagctaagttttcatagac

SEQ ID NO: 29677 - DNA, 1510 bp, Arabidopsis thaliana landsberg
caaagaccctttgaatatttatattcaatgacacacatattattttagaaattttataatcctatatactacactaggttttaacattttagattttttgtgtttagaaacgaataacatattagcccaccctatgaggatgacgcgactaattctactatcccagggcctacggcctataattgacgggtttaaatcgatattaataccagatgggatactacaggtgaaactctgaaattataatcaaaatcaagtggataatatccgactctaattaatataaataatatcaacaaaacatatacaactcgcagtttactcttcctttaaaatcaaataaaataatatcatatatttataattatctttacaataaaagtttttagtttaactaaaatataagcctacttgcggtatactgcaagttgaaattataaataagcagattactatcacgatttctgtaccttctcacatacacacctatcaaaaagttaaaacctttcaaaacctcttggtatattcaaattaggattcttcattcatggaattattattccaaaggttttgtgatgtcttatgaaatgattttggcagaagaggatgtaaaattttttttttaaaaagtagtcagcaaaatatatgtttttttggaagtctttagataattaaatcacagaatagagttgggcatatgagtaacccattcgagttcgggtagaacctgtttgggtttgggattaatgggtatatgatttactacccaatagaataattctaaatattcggttctggttcgggtcagatccagttgggtttgggtcagtttgaaaaaagtttcagaccctaaaaatacccaaaaaaaatagaaacgggaaatttttatgtagatagcgggtctccaaacaaaaaaaacttttaaatttcttaaattttaataaatttaattatatttgagtatattttactaaattttgacaaacataacaaataatttttgaatagtttagttgttttggatatttaggtccaaaattaattgacatatttagatttataattataatcttagataattagataatattacgattaaatataattaatattttggatattaaattaatttttgagttttttgaatactctttttgggtaacggataatttccagaccaatcggatatccacgggtttactaaaactctacctaataagaaaatttcctaaaaatttaacccgccctaacccagttttttggttcgggtattaggttggttatcgggtccgttttttcgtcagcccctatcaaagataatctaatatagaccccaattaggtctataaatgtaaccaaaatattatagaaagactaattctaagttaggccaaaaattagatcctctaatacaaagaaaacatgattgttaccaaaacaattatatacaaattttacacatttacttaaaactacatttattgtatttattataaaaataagattttta

SEQ ID NO: 29678 - DNA, 919 bp, Arabidopsis thaliana landsberg
cttaagtcatttttcccactttgaggtttcgacaagactttcacatatattactagtcataaagtttaagtagattcagaattttctacccataagtatctttacactatagttatatatgactatatcgcacattactttagataacttctgatgatgattaattactgttatctatatcaactttcatcatatgttatgtatgtacttctattgaagtgactaaaaagttactttccaaaattagaaaggaacttgtgttggtagctacattaacggggaacatgaaaacattattttttcttataagtaaaatcattttatctcgtccttaatacagagacccaaagttcaatcaataggtcaatgtggataatgattaccctaataattggctattacatgataataatagaacatgtcgtttgctcggagtgtatatagtatatacatatggctgatggtgatttaaaatcgcacatatgtaaataaagacgatatacatcaaacagtaatcggaaattatatacgtaacgctcttcacatatttattttaattgtgtgagtaagcataaaagaaaagctgcaatatcggcggcttaaacgggagaggctaacaatttacgagaaaataaataaagaaagaggtatgggggctttatgtgcatgttttctttacatacgcaagtcttgtgtgtgtatgtcttcataaatgttcaaattcgtatggatatgtggataaggagacaatacacttgttcaactgctgccttacacgtgagcttgctcgtgagtaccatgttcttttcgtgactacgcgcgacttatacaatctcatttggaaaatgtaaaaatcaccgatagtatataaaagacatgatcactcattcattatcgatttatgttttgaatgaaaact

SEQ ID NO: 29679 - DNA, 1394 bp, Arabidopsis thaliana landsberg
  unsure (1)..(1394): unsure at all n locations
gtatcatctcatatgacaacttgcttatctcattgagtgcttcatcccaagcttctaaacacataggagcctgaaaatatttaatcccacaagaaggcgtcgagtaaaatgtaactacctaatctctaatggcattttgttggttataaagtgaaactagtgactaccttgtacagcattgtgatatcagtagttagcttggtggtgtcacaccatccacgccggttcaccaattgggtaatctcggttcgcaataaaggacggaccaagtgcttcttcctaagtgaagtatgaagtagtatccttgcaaaggcaggaactacttctcttgataagctaacgtttatcaaaaccacccctttgattgtgatctgtaagcaacaaggatattgtcagtgacaagtaacacaaagtgataagcctctaaaggaactgattcttacattgtgtttggaggtagatgcttgcattctttcagcggccttgagagcaagtaaaccaccatcgtcatggccaacgagtattaccgaagaaaaccccatctcagaacaaaatgaaagtagtagatcaacctgtgaatcaagtatgtcaaaaaagagattgaagaagaagaagcttatacaacttgtatacagaacattttcaactgttacatatctaaagaaacttacttggctttcaagcttgtaagggttagctagatttctcttctcccaatctttccggataagtctagaggttaatccccaaccaggccggtcataagcaacgactctgcaaccgagctgaagagacaactctcccattacatgcctccatgagaaaactcctcctccaaatccatggactagaactataccagtattctcatccttttccatatcatccccgagtttgatagaatttatttgattcacaccatccttatcaaacaagctaatgggtgtagtgttgtgactagctaagagaggatcatataacgatgatctatcgggctgaatagtgtagcttcgatgaaaatgactgttctgagtttgggaggttaagtttgacatctgcttgtctaatagtcttgatcttctcgcattcatctccgctgcagaatcgcttataataacgaaggaagatacagatggtgaggtacgctgcttgtaatggacatataannnnnnnnnnnnnnnnnnnnnnnnnnnnnnnnnnnnnnnnnnnnnnnnnnnnagcagctcttctctatccaaagatgttcccctgaaagatttttgtctaaattcaccggcaaaagttaatattttgcagtttgatcgagtgaaagattgacgatgagccttctttgtaccagaaaaacccctttacatgagagaaacctgcaaataccatagaaaagagatgagctt

SEQ ID NO: 29680 - DNA, 1332 bp, Arabidopsis thaliana landsberg
tacagtttaatatatctaaaagattttaataataacctaaagcctaataccctcgtgatagatattcaagaactaaaaatcgaatgggaggaatccaatttttcccggaattcatagtcgcaccatctcatatgtccaagcaacgatcccatccccttccctgccggatccgtcgtgaacttcaccgcaatatcgggacaaacggcgattaaaaaaccgttaaaacatgaaacatcggtgtccattgcaaacaaaacctcaactcgaagatgccaaataacgtcgccaataacttccggcttaaccaccttctcgaaaaggacatctggtttgtctccggttacgaaataatcagacgagtaagatgctgatttggagataacttcgccacctcggagtaaacgcgcattgagtggatgtagagagattttacagccggtaactggactcttcgcaacgaaaccgatcgtccaatcagcggttgaaacgttcgcgtttgagacggagacagaattggtaaaaagctctacgtaacaactttgtttgtcgctatatttcataattgtaaaaatacagaggtaacaaaggaagtcgaaaccaactaaagaaaagtaacaattgcaacagcaagttggagttatatccatggcctcgtaggaaattggcaattatggaagtttaacacttcgtgataaataaataacagttatatatatatatatatatacttgaataatatgttgatttgtttttgttttatatttagcctttgatttactttgtctaatatattatgattgtttagatatacttgaataatattttgactcgaaagcaaatctaacttatatctttcctttttctggttcgtttatctactctaattttttaatattaataaattttacatagtttgtatttttaaatgcttaccttattctaaataacatagtttgtaattttaaaaacttaccttattctaaataacactaagcagaaaacaatatgtttttggcattcatatttccaatgaaactccaaaatcttcatcttagtcttttcgctaatactgctgatgatccgtttcgtccgaacatgaattttctttgaaatcgctgcccatggtcaagttgcggaaatcctcatatagagattcattctggcctccaaatgcagtgtttttttttggataagctaagcaagagtgataaatgcctacttgatccttacccttccaaacacaaaatttacgggcatctttgtgttgaagtacctttccaccattcccttagcgagtatcgaataagacttaacaaatacataaccgattag

SEQ ID NO: 29681 - DNA, 2766 bp, Arabidopsis thaliana landsberg
gctttacgcttttctcctacaggatcagctctagcctacaatagtaatcaaagagaacacatatggtcagggtttgttataagcaagtaagaaaagtacgtggatagaaacgatgagatatcacacacgtagtaaaacacttaccaatacaataaacttctctttgttagactccaaaactgatgttcctgtagcctcaggcatttgctgaagtttaggcaattgcatggcaccaacactgtctgcattaggcttagctcctataagatcagccctattctgcaatagagaaatcaaagagaacacatatgaaacaaaggcttatatatactctatcatttatgtttaccattacttaaagaactcaccaatacaatcaaattctctttattagactccaacattgatgttccggtagcttcagacatttgctgaagttgaggcaattgcatcattggtgatgtaagtagactgttgtaagagcctgtgttgatcagagaatcaatgtaactatacttctgtctgaaaaagttgttgaactgattctgattttgatttggaagcttcctttgattgccccccatagttagcttttcctctagagacatctccgtgtctgaaactcgtcgtatcgccatttctctctcgatagccatctcttgtaaaacctcagctataagctctcgttttctcgctgcttctgcgataatgatctcttgacggatttgttctttctcaatttctcgtttgatcgcttcccgaacttgatcctcactttgttgtcctacgaaaaaggttcataatcacttcacatttcgacatgagaagattcataaacttcagatttttcacacagatttcaatttcgtgaaatcaaaacatgaaaaaacaaacactcaaaatttacgttacagaaactaaacaggtctcaacaaatcaactcctatagacaatcgcatcaccaaacataatacgaaaagtgcagaatcataacaatgttctctgtcggggatggataaaaaatacgatgcacagacagtacaaacctggcattgatcgttccgacaagaaaggaaagttcggtttcagcgacggagatggtgtcgtgtccgtcgcaggaggtgggcgattattatcgatggctctgtatctgaattccatcgaattcaaaatttggagagagagcggagaaagagggttatcgtttgtaatcgcttttaccttctggtcggtcacttttcttaaataacagggatagcttttttttttctgttttttcccttttttctttcactgttgtgaatcttgtgataatatcaagagattttttaaaaacaatatggaatttaatcgtatgcaatacttagcaaatttggttactaatttattagagatttgacctgtgataagatttaaatatatttctattttccttaaaaacttgttttattgaaaattttaaattacattatgtgatcaatctttgacggatttttctatataaagttacaaatttattagggatttgatttgtgtagtggcgtttcaaacaaaaatttaaaataaatgtattttagattaaaaaaattatgttaaagggagttttaatattttaaaagattacaatcattacattatatgcgtgttcaatttttggcggatttctctatgtaaagttactaatttactagaaatttggtttatgtggaaccaaaaacaagttttaaattttagtcaatgtattgtagatggtaattatgctaatattttttttaatctttcaagggctttaatcaaattcaaaaactttgttcaatctttatctttttgtaactttgtagaggtttgacccgcattattcaaattcaaatagattcttaaaataaaatcttacaaaaattctatactttgaaacattcaaccaaattttaaaatcgtgttcaactttcgatttgtctatataagattactaacttactagggatttgacttgcgaagtgagaatttcaagcgaggtttaaaatttaggttaatgtattttaggtggttgaacaatctatctttaatttatggagatgattttctgcctaccaatatatcaccgattaaaattctcacatatgattactattaagctaagcggcaaaatcattggcgtcccgaaaaaagtagtattctctctgtttcataagtttggtattgtaggttttttacacaaattaaaaaaggtattttttatactttttgattattattttgtcttgtttaataatattaattctatttctctgttttctctattaatcacagctaaaagtaataataatgttatacaaaccatcaattttttgtgaaaaaaaacctacaacatcaaacttcattcaacagaagaaatatataataagttctagcgattagttcaagccgcttaactcgcatcataacaatgacatattttcattttaaactcagttaataatgattggagtgtcctatattctttaaaaagtgtagtatgtcttttcatattcgaacaactagggtgttattcattttattatttgaatggtgcatctcgattatgcatccaaatattgtaatctagaggatgcttccggctgttggttgtttatatatttggttctgcatatggattccctaatttgatgtaattctggttgtttttcttttgtatttgttagtttacattcacatcgatgtatttaatatcaaaatgactaaattgtgcatgtgttaattttaatg

SEQ ID NO: 29682 - DNA, 2411 bp, Arabidopsis thaliana landsberg
cttctctatccaagatgttcccctgaaagatttttgtctaaattcaccggcaaaagttaatattttgctttttgatcttttgaaagattgacgatgagccttcttgtaaccagaaaaaccccatttacatgagagaacctgcaaaataccatagaaaagagatgagcttcaaccacaaatatctcaagctaataagtgagaacaggagagcagtgtttttacagcttcttggtcaatcttgtggtacattagcttccttcttgctccacagctttttcgataagctaccacgacatgagctagaccgaaaaccgcagaagatagtaacaaaaccggcattccccatgagatcttgaggtgatagaccttagcctcctcaagagtagaattcacagtgaaaacacaagttttaaccaaaagaagaagaatccctccaaaggaagataacattactgtttcaagatacagaccataagctaatcttgtgtcttcacataaccaagagagacctgtttcaatagaagctcaacgaatcagaatgctaacatttgtgttttgagtaagagagaattaatgagtccgtacttacagataatgacgagagatctaatgagcgagacgagtggtacatcaatgagagaggtcttgaaactatactgacgaaaatgttgtgcaggggagtgacacgtgaggcacgtgatgctagagacgataagacaaggaactaccacatcagccaccgtgatcagaaccggtaatgaagaagctaacagagacgccgtcattgctgccacaaagaacatcgtccttaaacatcttcgtgctttctccgccacaatccatgacttccacgccgccatctataaatccggtggtggctaaaacaacttcaccatttttttcgaattcagacaaaacgttatagctttatgtaattaaaactttgtaacggttgatatattatagaaaacaatgcaattttcaaatattattggtacacagaataaacgtaatgagttgtataagataaagtaaataaatgagtgggaaatattaaatgattaatggaccaaaagacagcaaagacaaagaaatgataagtgtgtttggaggaagagtggcacatagaagcatgtgaatgttaggttcactcttataatattcttccagccattttcttctgtctttgttcccccaaaagtttagcttacttactatgtatacaccttttgtttttactaaaattcgtttttattaaataatttggtaacaaatcatatcgtaatttatcaaatcacgactgctaattttctttctttgtttactctataaataacgaatatccatttttgttatgtatgcaaagaaaggaaaaaaggttttaacttttcagaaactagaaaatatggctgtctacagataattgagatgcaataattatgaagcaatgatctggcagaagaaatcaagatgttgtttatgaattatgactagataattatgggatctttaatatcagaaagtaaacaaaaatcttcttataatgcataattgaataacaaatcaatactttaataattatgttcccatgcatgttactgcagaaacattggaataaaaatggtacactcgcatttattgtaccgttggccagtttaatccaaattaccaaacattaatcaatacgaggaaactacttaataatgtatttttttcttttctttcaaagaactacttaataatttatatactattatttatcttatatgttcaaatgttcataaacattagatgagtcatccttcttattattacacatctttctcgtatcaaattaatttatctatctacaaatcattgtgattttatttattcatgattgctcggaagcttcttgtttaataacaattttcaattattgcaaaaataatagaaatcataatgtagataatatataagacttattatagtatatatgcatttggttcacaattaggttgtatattcattttgtctagaagagaagtataaatgggccgatagtttactaaccaaaggcccaatgtgttttaaaaaacaatgcccacttaccaattctttcaagttttcaactagattggtggggaaaattgacgataaaccggacggacggtataatccattggggtaggtagggaaacgagcgaaccgaaccgggggtaggtgaagtcttatccgacatgaaccaaatcgggtcgggtcgaatccttacaccaactttccgcaccaactctctactgaccctaccaacccccatagtggttggtgaaaggactaatcattttttttttcttttcttaatcattttttttacattgaaatcacatggataagatcgtaaagttgctaaatgaaaaaccaaaatggatgtg

SEQ ID NO: 29683 - DNA, 4035 bp, Arabidopsis thaliana landsberg
  unsure (1)..(4035): unsure at all n locations
gcccattagtaatgaggtattgaaaaaaaaaaacaaattctgacaaaagttagactcgaactaagcacatagaagaaggttattcaacacgttgaccactatagcaccaacaattttacaatttgatgccccaaattttgttactaaaatgtgatgcctaaagctctaacttcaccatctttagctctgggccgggcctggctaagagcatctccaacacgataccaaaacaaaataatatggtgtgacattgttcataaaacacccaagagaatatttagggtcacttttaccgttctattggagcaatattaacaccatatttgttgttttggtattattaacaagatatcaaatctttcttgataagcgtatctacaagtaagaaaaaaaaatatgatcaacagatatcaattgatcaacagatatcagtagcttcacccacttatgcttttgtttgaccggtatactaacacgcttacatccaagcaaatccgcttctgcaattatatattaatccaaaataagtttctgctatagataccaaatagatttctccatttcatctagacattgccaaacacttgcagatcatcaatggtcctcactctaatgtacacaacatcacaagcgaccaatcgaaaagagtgaccgggacaacttttatctagcgattgctgttgaggaacaagtcctccaactacaaagtgcacctctagagtctaagaagcgtaacaaaaacataagagcttgaagaatgaattagagacacatatagagagcttagaagaagaagacaaacaaatagacggccccttggngcatgctcgaggaaggcccacggccgaaaaaacccaaacnancctanaanaananagacaaagacacagnggcaccgcactcgaaagacagacaaagatactctaattcatctaacaggtgggctaaggcaagacccctaacttacgtctcctcataaaccctataaaaattacagattggaaaataatactctgcctcactatctaccttgtacacacaatctttctttcgcccagatgaattgttcctagttaacttgctactaatctactccacaaactgctaaaccatggcgatctgatttcgccagaccccgtacattcagcatcaccttcttctgccgtgctgaaaagggtttgatctgagcagtctaaagaagccccacacgccatattgtaggactgacatgctgaatggcatactcgtagtctgtcgtctccatcgatatcacacttctggatcgatatctggtacagagagatcataaagaacaaatggcagtatcagaaaatgctagtctcttgcctataatcatggagaaacttagacaactctacaaatcccaagagattgttactcacccaacaggctagtcttttagctgcttcatcacaataactgttaccgaaaatgttaaataacttccgagccccgcccggaaacagcctattgtagttgggcattaccacaacctcctcaagctgctgaagaatgctaggctctcttggagcacaatgttgccctgacatgtctttctccaatacatctttgcacaccaataaacttgtaactagtttagagctgttctgacatgtgtagcctgcataatcagagcaacggaactcgcaaaccccattatcacacactcctccatgtaggctgcattgttcatcgcaaatagctgtatagttgaaaagaaacttcttatcagatataatattgataaacgtattcttgacacaatctatagaaatgtggatagttaccagtggaacagtcgattccagtaaatccattttcacatatgcatacaccctgagttgtgcattttccatgtccattgcaattattaggacatgaacctgcatggtgaaaagcataacttctaagttcagatcttagggaaagatagaggcttgacaagcaacaatttagtgtgaatgatacaggatacttacggtttctacagtcatgaccgtgataaccaaggagacaacgacacttcccatcaacacaatctccattaaagttacaagaattaggacactgaccaagtacagaaactacggatgtactgcagagttcatggtaagccggacaaattaattcacctacaaaaccaaaacattcatggttcaaaagatttggtagcaatatgttattattcttttaggaagataaagagcaatttttaccattaaaaccgggaaatcgaattggtccaccagcttgagggcaaaatttccatactccctccacagcaacctaatagaatggcattgtggaggacatgaaaaacattactagtgaagccatgagaaagcataaaagcatgatctcctcatctccatgtatcaagataaaaacaagttgaaataggactgatggcactatgacttgtgtggtttctgaaaactgccttacatctataaaagtttgtacccaaatttaaaaactaaaataaaatgaaatcttaggacagagaagaagacgtagaagacatacctccaacaaattatttctacatctatgttgataacaaccattcccctgtgtcatggaaccccgaacaaacccagtacgcactaaagatgaggccatacacctatatataaatcaaactctttcatgagcaatattccatttggatatttacaaacattcagtgataaagttaagttaaataacctggattcactccctctcacttcgcccaacattctgtcaggtgcacgtgcactattgatatccgtacaagacccatctgaatacgcaacaaaatatgtacaataatctgctaaggaagactggccgcctgcaatcgttgtaggtatgaaattcattagtctttaccaaacaagaaacgactacaggattgcataatttggtatatactatacaaccaaggcaaaagaaatatatattttgcgtatcaaattaacatgttgaagcaggtaacaacctaagaatatatagtataaataaaaactgaaagaactagataatcgtatcagcatgttccaattaatcatcaggacatacctttgttaggctgtggaaagtaacgggcccattgtggcaattctccgttatagcttagaattgggcagtaaccttcagcctctctgttgtatgtacaaccagatagttgagttgtgttacaatggtaagcacctttccacatgttacatggagatgtgacaaactgagtcccctggttccgaccccaatcgagacggtctgccatgctataattagccttataccagccactgtcctctaatagcgctagagtcatttttgaaacgactgatcttgtgtccactgatccagtcattatctcattcatgagtagtctcttttcccagtgggaacccgatgttccacgtcctcctccatcctcaagttctaatcccgagaagttttgagaaaatgcctgttgaacaatttgacattcttatgactacaggacagaaaactaaagtcatagaaattaacttgcaaagattcattggttcctaagaatgaagtaattaaaagacattgaactcactccgtaatgatgccgtgaatgcatgacaacccttggaagcactacgcgtgttactaaccggcccagcttttcatccatttgttgctcagtgaccttcaaacatgaaaagaatggcttattacaaggtagctcgtatagaaagttcagacatctcatccatataaataagcaatgaaacacgaaaaagaaaaagcccgaggcatgttaataatagctaacttcttctctggattaggaggacattagatactcataacatacctcagtgcgtcttcttttcctttcatctctaaaatgagcaaaggcatgcggatcaaagccaaggacatgcataacctcgtgaatgagggttgctgaaagcaaagtcccagattctgaagtcaaatggcggggagcaacattgacatgccctgaaaaagaccaaaaatcttggctttagt

SEQ ID NO: 29684 - DNA, 2488 bp, Arabidopsis thaliana landsberg
ccaaaaaacattatctttggtgatcaaatgatatataaagatgtgggtgcaatctcctactcatagttggagagctggtagtactacataaactgcaggacacatattcttacctattataagggtcaggctcacagcggttgggtttcggcataagtggagcaggcacataaatatcgtcaaagaatccaagtgttactgccaagtatagaggtaccgtaagcatgtaaatgattaaccatatccatgatttcaaagtattaatccaattcataagtagctaataagctaacaatgtactagagtagcaggatgcagacagtgcacaacattggaattcttcagggaacagtataataaagtactcacagcgcaagccattggcgtcagattctttgaactttgcagctatgacctcaccaacaaatggacggaacacaacaattctaagacctacctacaatcacacaaacaaagtattaacaacacgacatgagatattgaatcaaggcaagataaaacttttgaaaataaaattcttaaccaaaaccgtacagtgaaagttagactaacagataacgattccgaagaaccaaaatctcagaatggtttgaaactctagtacggtaatgatgagtctacaaagatgtaactcaatacagtgcagaaagtctgcaatacacggtgataggtcaacaatgatgccactaacagtgacattgggaggccataaaattgatataaaaaaccatgttcaactgataaaagaatagagatgagaaaagatcagcaatttggatataccttataggtcgcagcaccatcaccgggtaacacaaaccctccttctactgatttaatgtcgtaaatagatacacaaagccccaaatcagctaaaacctttcatagcaaaaatccactttgataaaattagccaggtgtgtatataaataagcaaacaatggataccataaaagtgaaagaaaaagggcaatgagcaaaccttgtccaagaacacattttgaagcactgacttaatggcatcttcgagagggagattaagtagatgcggaggcactcttagtgaatgttctagctcgctaagataaaacatttctgaaaattttgttcaaaattcacaagtcagatgcatggaaaattggaaacaaacaatcaaagaagtagaattcgaataacgaatcagacaaattcggagcattcttggtcattaacatgcatatcatcaaaagttccaaaattcaaatctaaaattcattaaatcatagtacgtaataatagcccaatcctcaagattaagcatgtgcagagcgtacaaaaatctgccattgtcataactatacgagagaacaaaactatctaaaatcgggcaatacctaaaccattgaagataagatggtctcgaagggaactcggagagatggtgatgaagacaacgattagacggaaaagtgagaagttgggaatagattggaagaagagagaacctactaatcgagtgaggaagatgcggaagaagaagaacgatttagggtttagttattaaagtcaagaattaaaacaaaccgatcggtttgtcatcgttacgcttataaaccgaaccgaactgaaaaccggacttctttttattcataccttttttccaaacaaggaaattgggccaagtcgaaggtaagacaacaatctgttgctgtcagcctgtcactatagtctaagtaatattaagctctgatgaaaagtgtgaaacaagaagaaccaagatatacactgatgtgggataaagaatgaagctaatcataacattgatatcatgcttgagtagcttgtttaacaaaaagaatctgaaactgaacctaagttgccagattttttttttttttttttcgtatcaagcttgaagattgcactgttgcaagtaggtgtgatggtaagggacgtgtatgttccagtaacgtttgtaattctcttttccaatgtccaaccacggcttcatgaccccatcgtagtgtataactgccgcttgttcgatgtcaaccgctttgactcctgattcgcgacctaaccccatcacatgccatctcttgtccaatgctaatgtttgcctatagaaagtcaaccaacctattggtaagctcccagctttccacaatggtctctttgttccctgccaaaaaaaacaaattccccaaaaccattgttaggtttacgcccattacatagacaagatatgttgttgcttgtaaccattcttcttctaggagatgatctttagcactagcttgcttatgttctttgctagttacagcaatgttatttgtgttctaaattcaaaacctttcatcctcgatatagccaacctaaaacctaataattattacaatctttttcatatataatgacgaatcaacaaatgtaagaacccatttgaaaactttgaatatggctacagtgttatttccatagggagagc

SEQ ID NO: 29685 - DNA, 3537 bp, Arabidopsis thaliana landsberg
  unsure (1)..(3537): unsure at all n locations
gcagatccattcctgttgcgttttctgttggctgtactcgcggtagccttcttgctgttccagcctaaagaataagtatgatagggtttaggatacgagagacaaaaattgtgtgaactggttatcaaagtgtaaggaaagctcaccgatttcatagaatatctctttgacattagtagcggtttttgctgaagtttccatgaagaaaagaccgttttcctgagcatatgtttgtgcatcctgcaaaggatcaagagtgtgagatatcatcaggaaatccgtgaatcagtgagattcagaagcaaagttaaagggtgcgcacattgtctatgtatataatgtctacttcattagagatgcatatctctgacacacaacagaactgtgtttttctgtcctttgcaagtcacaactgaactttaatgcacaacgtaaatgattctaacagatacttcaaaaggatcagtcttgagaaatgctacttatctaaaatctaggcttttggcataagacagtaaaatatggacttgcgggattgcgggataagaaaggtcatatgaaaacatatatatcattctccaaagctggttagagaaaactgcactatacttcttaatgaaacattaactgtctatacaacaagcctaatttatgatttgttaagtgtgtggggtcggtttaggtggcttggtttgtcaggttaatgtcaataaggtagattgtaattttacaacaaagagatatcacctaatgttctgactcctgtcaaacgtgacatgtgaaatttcaaaatacagcttaacacgttcaacatgatgatcagctattacacacacatagctcaactttatatttgacagtaaaatcctaacctcataatgagaaaaatcagtcaggacagagaaggacttgcttacctctgctgtcaccttccttgcatctaataaatcagatttgtttccagcaagggccatgaccatattagggttacctattcacacaaatacatttattcagtaaaacccacagacagaaactaaagcttgacagtgcctgcaactggaagtcataaactaacaaagaactatcaaatccagaactcagctatacaataccttgtgcctgcagttcctgaacccatttctttgccctctcaaacgaagcctaagaagatagcaagaaaatcaaacaaacttaatttaatagaatgccactaaattgcatttgcatctacttaatttattatgtacctgattcgtaacatcaaaaacaatgattgcagcagcagcacctctgtagtacattggagccaaactatggtaccgttcctgacccgctgtatcccaaatctcaaacttcacagtggcatcgttcacagctaacgtttgtgagaaaaaagcagcaccaatggttgattcctataacataaacatatatcaaagtcaagaagcacacacagaatgtgaaaacaacaacataaacatcaatagaagagccattaacctggaattcaacaaactgatctttgacaaaccgtaacacaagacttgattttccagcaccaacatctccaagcaacacctgaaagacttaaccaagtacacagaaacaaatcaaaataagcaaaaaaaaaaaaacagaaaccaaatcaacactgtttgcaagcaccgtgttcagataaatccctaaaaccctattatggaaaaacctaaatcaaaatcgaacataaaccctaacaacaaaatctgatcaaagctctccaattcaacatcacgtatcaaaattctccaaattagaaacagaatcaaatccagaaaactgaaaatctaacaaaacgggtctgcaaattcaatcaattttacgatcatcggagagagacaaaacaaccacaagggaactcaaaagaatcgagctaataagactgaccaatttggcgttaatgctcttgtttccagctgcagccatggattatcgatctgaagagaatcgcaggtcgatacgataatcttcagctcaaaactgagattgaagatcaaaagacgacggagacacaaaaaggttaaaaaaaattagtgagcggaaacgggtcgtcaacaacaaccaatctcctcctcctcctgaattaatgttgctttctttctagaactaacaaaaaatacaagtaaacaaatattacacggcaagttaatatgacacgaaaaaactacgaatataatcgttggcccaatgtagatttaggcccaagtctttttgggttaagtcctctattgatttcgtacatggatttaagtattcagcatgcatagggactgttgtgggaataatgggaatgagattttgaacataattagtgtataagctaaaagttagaaacaaaccatatctttgttgcttataaacttgtaagattcttcataagagttttatatttacataaaaaaaaaaacacaactctttcttcactgtcttttctcaagagttttcttcaatcccttcactatcttaccaaaccagatcaagttcatgacactcaatgaaatcggtacaacaaataccagtagataaccgaatgtatgcatctctatcacctgccgaaaaatccattgatcatcaattcattatctctaaacctaaccaatacaacagcaaaaaaaaacacagagtaattcctatttttcctaaaggctagaccgtttggtttagagataatcaaaccgaaatcttgattacctgatcatannnnnnnnnnnnnnnnnnnnnnatgtagatgaacacaagaattcttgctgactgcaaacaaaacatcattgctataaaaaaggagatcaagttttcagacatttacaacgaaaaacaaacgttttaagaaactcaccaaccaagcacagaatatagcaactccattaacaagataagctttagatcgtttcaaaccagcaatgtcaaggtaccatctaagattgatctctggtgtagtcacttcagagattaaaaccatgtatgtgtaaagctgagcctctccagagaacaaagaatacgctactgctgttccagataagcagtgatgtaatatctgaaacaaaaaacacaagattgtcaagtaattgaagaccacataagctttcatgtgtcgaacttacatattctgatcctcctaaagaagggtatactcttaagatcattccaagatccgcaagaaagtaaccaaatgatacctatgctcaatgcctcggtcacatactgaagtaccatataagttgatcaatgctcatcagtaggacctgtgagataaaatgaagaaagatcaaaacttactcttgagccaaaggtagacacagtcgagttactatacaccgtcagggtttcaaggcttctttggtcataaaacaaatcagagaagtacgcaaagtataatgccatgaatgagataaagatcgcatgcactgtagagattcccctgtccagccaaagtgataagagactggagcataacatataaaggctgaaacaaggaaccaatacatacctgttgtccat

SEQ ID NO: 29686 - DNA, 1524 bp, Arabidopsis thaliana landsberg
  unsure (1)..(1524): unsure at all n locations
tattatactttgataagcttagaaagttttaataattttacaaaagctccccattatcatagggataagtgggtataataagatatttgcaaattttgcttccgtttacatacagagtcctgtataactcataaattgtcttgcacaccgcatatatggtaaccgaacactacatgttcttgttttcgatcaactttctcacaagagattgatagctgaatagacgtaacaccgtataattgagtattggttaaacccaataaaattattattttttgttagcactcaccatttaatgaggatccgagagctattatctattactctatagagaaattcttccttttgacattcatttttctcttttttataaatttatggttagttttatttttaaaaataaagatatacttttatttacgatcataatatatgacctttacattttatatatattaagaagttcaaaatatataccaaatttgttatattatttgtagtatatttcgttattattattttgttaaatttatgtaataaattattatttttatttgtttactaaaaaatgaaaaaaaaattgaaatattttttggtcaacatcggtcaatgctggtcaacactggtcaatgccggattccgatgatcggagcatcaaactaggatggttatggtgttggcaacatgacttatgtttgttcgtgtttatgcgtatgtgatatcaatactttgtgtagctaacagaacatttttaaagtctgcatgtgtgacgatgtgttggcttatacttcatgtagctgataaacatttttccttactaatattcaaaataaacaaaacctaataaaattatgcatattattacctcatgttcatgttatgccactacacttcttttcaagcatttattcttacaacttttttaagaaattagtaaaaatcaaatgttagttttgatcaaatatgacaaccgtgataaagagaagggacaatcttaacaaaataatgtcacttcattgtaacttatgatggtcgatttgtcacgaaatgggaaaaatctagttcgttgattagtgtgaattcgatcatctggatctatcttattcactttaatatgtatgcatgtagctaaagacacttgatttcgtgtgattttgatcatctggatgtaaaaggtatggtgatgcgtctagtgttggagcacctgagtcnnttgttattggacacgncaancagtttgtggtttttagtataataacattctgnaaccgaaaccaaaattagtaccaatgtgaagcacccttgtcgattccacggggaccgtacaatagtgacgcttgagtgacgactcttattcgtcgtggtctaatccgtctctgtagtcgaccaaatttttatttatatatttttccttttattagggtttcctgacttgttatccaagctttcgctctttatcaccatagattacgggttcagaaatctttgatttcgcctgttctttacttattctatgcttttggg

SEQ ID NO: 29687 - DNA, 2282 bp, Arabidopsis thaliana landsberg
ttctcctgcatgaatggaattggtatgtctgtatgtcatgacaagttcaggcgtctcactaacaaaaacgtccattactttattaatttaattacaataagatgccttttttttgtttaatatcattcaaatcattatgtccaaaaacacaaaaatagtaaatagattgcaaaaaaaaaaaaaaaaaagagtttcaaaatatggttttgaaaaacatatgaaaaaacttccgcaattatctctttttctttacaaaacaaaacagcttcgtcgattctcttcttcctcctcaaattctctttcacatttttccagatggatctctgttttgacccttcgttatcccaatcatacattgatttcacggttatgatgttgtgtctgtaaatctctcgtatcattgttcgaatattcgcggaagagagatagatcgatgggggttgtttcaagaaccgtgttccctgtatgtgaaagcttgtgttgcttttgtccggctttgcgagccagatcgagacatcccgtcaaaagatataaacatcttctcgctgatatcttccctcgatcccaggttttgcttcgatctctttgaatcaatccaccatttcgcattcctcagtaatataatgccattagccaaaacttgtcttgttctcgtgacctatagatagaacatgagtttcattgaattaggatgagattagtgtaattgttgctcatatccaagtcggagccataacgatggaacttcatttgcagagcaccttattactttaggcctatgtaataacactttcttgaaaatcgagttttggagaagcatcagctttttacactaccgaaacggttttttaaatccactatgcatgttctgattattgactctgtgaaagtctctcctaaattttgattcatggtctgcaggatgagcaacctaatgatcgaaaaatcggtaaattatgcgagtatgctgcgaaaaaccctcttcgtatccctaaggtgaattccgcatcaagttattctttgatattgggatatcgttgatctctacaacaactttctcatttccatttactgttttcagatcacaacctctcttgaacaaaggtgttacaaggaattgagaatggaacaatttcactctgttaagattgtaatgtctatctacaagaagctcttggtttcctgtaatgaacaaatgtatgttttttgtttttattatttcaacattatactgcttaaaaatggttttgtctttcctaatgagttatgtcttttacaggtcgttgtttgctagtagctaccttggtctcattcatattcttctagatcaaactaggtatgatgagatgcgcattttaggttgtgaagctctctatgattttgttaccagtcaggtgaataactcttgtcaactttacttatctcgatttgtcttataattgacaaagtctgataattaatgtatatttctgatttttttttcaggcagagggcacttacatgtttaacttagatgggttgatcccaaaaatctgtcctttagctcatgaattgggagaagaagatagcacaacaaatttgtgtgctgctggcctccaggccctctcatccttggtattcatattctctgtgtttttttttttcttatgattgagaacttgtaaaaaaaagtactgatatgatcacgtccattttccacaggtttggtttatgggagagttttctcatatatcagttgaatttgacaatgtaagcttgtatatgaactctataatgactgtatttatttcttggattgttgaatactttatcctctgttttgttgtttctcttcttttcaggtagtctctgttgtcttagaaaattatggaggccatagtcaatcgtccacttctgcagtcaatcaagacaacaaggttgcttccattgataaagagttatctcctgcggaagctgaaacaaggattgcttcttggacaagaatcgtggatgacagaggcaaggcaattgtatctgtgtaaatccttctactccagctttactttggcatgcttcttgttgtttttagaatatattttctgattagagagggtaataacagggaggatgctaaaaaccccaagttttggtcgagggtttgtctgcataatctggcaaagttagctaaagaagcaacaactgtgcgacgtgttctcgagtcactcttccgttattttaattttaatgaagtgtggtcctccgagaacggtcttgctgtatatgtgctgcaggacgttcagttg

SEQ ID NO: 29688 - DNA, 433 bp, Arabidopsis thaliana landsberg
tcctctccaccgtcgggtagcttttgtgccgtcttgcctttaattctcttagcaaacacacacttgcctttttgtttaagcaaaagcgtgtggtggtgcgtgtatgatgactaacgatgtacgaggaaatttcttctggtacgtgtggaatgtgctcttcaatgatgagatcatggaaatcgtgacatatatcgaagtctgcatgatactgatggttgcaatgtagcggtgaaacagatcgattattaataacacaatttatgtatggccagaatcacaaattgataatgaaacattttatcataacggaataacacattctgtatatcagttatcgcagcatactgatattatatatctccggtgcaacgcacgagcattcagctagtaatactatattactgtgtacggacctaaacaggcgttctgagag

SEQ ID NO: 29689 - DNA, 509 bp, Arabidopsis thaliana landsberg
taaattttgttattttaatggagctgtttcactactacattgcagcgatcagtatcatgcagacttcgatatatgccacgatttgcatggtctcatcattgaagagcacatgccacacctatcggtacaagttctctcgtacattgttagtcatcaggtacgcaccacaatacacgcttgcttaaacaaaaaaggcaagtgtatgtgtctgcaaagagaattaaaggcaggccggcacaaaagctaccctgacggtggcaagtggtcatttctgtcgatcctcacctatgtcacctctggcgccaagatgacgtcacataccttgatatagtagtcgtcgaacgcgcacaacatggcgagtaccgatgactcttggctggactaccaaatgaagtgcaccccaggctcatcagcgaggtagtacacctagtcattgcaccaccggatgtgctactcctctacatacatcttgttcgaggacactcacacaaagtcagcaacgaccgtcg

SEQ ID NO: 29690 - DNA, 1885 bp, Arabidopsis thaliana landsberg
gagcctataaaaattaaaaaggaaaggaaaaaaaaagaatgaatcatagtgaaatgaccttatttatggctccaactatagggattagtaaccactaaaccagaaaaaaacaagtgacccattacacagggattaaaaatactaccgaataaagcccaataggcccaattcaaaagcgtctctctatcatcgtctctccaaaccccataaattggatatttcctttctctaaaaatttggctttattaacagacgcactccaaagctaacgttgctttcttcccactccaaatggctcttgtgctctcagaacacacacagatataataaactcttaacgaagaagaagactttttcttttcttgagcaagctctgagaaactcacagagagggacagagagagaaatatttcattcgctactctctttaataccgccattgatgcaacctccttcgcgttaactgtcaaaatactccccaactgacaaaaattaaattcctttttttctctctcgattttaaaagctctaaaaggaacgagttgatcaagtcggtcggttctggttatcactgaatttcattcaactcggtttattccggtttaagtgtgattttcccggctaatggatctgacccaaggtttcagagctagatccggcgttgttgggccggtggccggactagaatctctcaatttcagcgacgaatttcggcacttagtgacgacgatgcctccggagactactggcggctccttcacggctttactcgagatgcctgtgactcaggccatggagcttctccatttcccagattcatcgtcttctcaggccagaaccgttaccagtggtgatatttctcctaccactcttcaccctttcggggctttgacttttccttctaactcgcttctcttggaccgcgccgctcgtttctcggtgattgctacagagcaaaacggtaatttttccggcgagactgctaactctttaccttctaatcccggcgcgaatctggacagagtcaaagccgagcctgctgagaccgattcaatggtggagaatcagaaccagagctactcttctggaaaaaggaaagaacgcgagaagaaggtgataccaattgttcacacaatcaaacttgttaattaaacaagagagattagtccctaatttctttattccttaatttctaggtcaaaagctcgacgaagaagaacaagagctccgtggagtcagacaagttgccatatgttcatgtcagagctcgtcgtggtcaagctactgataaccatagcttagcagagagagtaattcacaatctcacagacatggtttgtattaattaattagtggcaatatgctaattaatcattaactcttgattataggcaagaagggagaagataaacgcacgaatgaagctgctacaggaactggtcccaggctgtgataaggtttgtctttagataattgaccttttaatcaaaaagctaatcaataattagatcttcatttgtgcttaaagacagaatctttctttattaagaccaacccccaaaaagtgattttttttctataatttgatcatgtggtttgataagggtttagtgctaaattcctcttatatgaaaaaggttttgtggtgtgacaaagaacaaaaccactagtttggtaatttcactgccttgaagatatgtaaactttattttcgtgtggggaagaatatctcacgggtcacaaccatttaggtaaactagtagtagtaatacggaagtgatgtgacattgctcaatagattcttgtttcttcttcccaaagtgtattcatttgagcttgaagcttactccataaatgccgataatggattattatatgtgggaat

SEQ ID NO: 29691 - DNA, 1711 bp, Arabidopsis thaliana landsberg
  unsure (1)..(1711): unsure at all n locations
actatgtgttacatctctatacagggtgagacaataaagtcgcggcttgacaatgccaagtaatataggcaccctcaagatttctcatgaggaaatgacgccaccatgatcacaaagatagaactggtggaaggagaatttgggaggttcgccatgaaaaggggagacgagccaaccgaaacgtacaacaggctcaagaccctggtgaacaagatctagagttatgggagtacaagatggatggaccatgacattgttcgactcatgctaaggtcatttaccattattgatcctcatcttgtaaaccttattcgtgagaatcccaggtacaccaagatgacgtccgagaaaattctcgaaaaattcgtaagcgagcgcatgatgataaaggaggctaggtacattgatgacatcgccaatggaccattcccactctacgagccgcagagtgttgtcctcaaagcaacaagcagcaaggagacgctacctaacaaggtggcacaagtagaggctgctggactcaacgaggaggaaatggcgcttgtaatcaagcgcttcaagaccgctttgaagggacgcaaggagtatctcaacaagaataaatcaaagggaaagcgatcctgcttcaaatgcggtaagactggtcatttcatagctcaatgccccgataatgataatgaccagggacaagaaaagcatgggaagaaagagaagaagaagaattacaggaaggcgaagggcgaggcacatcttggaaaggaatgggattctgactgctcttcatccgactccgacgatgaaggattggctgcctcggccttcgacaaatcttcgttcttccccaacgaacgccatacttgccttatggataaggagaagaaggtacgtattcgggacactcccaagtatacttcttctagtgatgaagagtcatctgatgatgaagtagattactctagtttatttaaaggtttagatagagcaaaagtagagaaaattaatgaattgattgatgtgataaataaaaaggatagacttttagagaagcaagaggacgtattatatgaagaacatgataaattggttagtactcaaaaatctcttgctctagaaattaaaagaaatgaaatgctatcctctgagttgtctgcttgccatgaaactgtatctagtttaaagagtttaaatgaggatttaaatgctaagctagaggaagctaataaatctagttcatgtgtagagcatgttagtatttgcaatagatgtaaggactttgatgttaatgcttgtaatgaacatcttattgctattacaaaattgaataatgaggtggcaagtcttaatgctcaacttaagacttgcaaaaatgattttgataagttaaaatttgctagggatgcctacacaattggtagacacccctctattaaggatggacttggttttcaaaaggaaaccaagaacttaacnnnnnnnnnnnnnnnnnnnnnnnnnnnnnagaaagcgaaggcttctatggctagtagttctcaaaagtgtcatgcctacatttatgatagaaaatattctaggaatgctcatagaagatatgatcataatgcttttgattcacatgctatgtttgctctagctctacttttgtgcatggtagaagtaggcctaggagaagcaatgttgtgcatcatatgcctaggagagtgtgtaatgaacc

SEQ ID NO: 29692 - DNA, 3517 bp, Arabidopsis thaliana landsberg
  unsure (1)..(3517): unsure at all n locations
cctgtaaatctaaacatttccataggaaacgaaacaatgtaagtagaagaaaattatgaacaattgaacagctgaaagtgtttatccctttcaaaaaataaattgtttataaaattttaataaaatatgagatttttagttatattaattcggaattgtctacttgaatttgagcagtgcaagacaacattttttcactagaaaaaatgatatttcaaatcatgtgttgttttggtttgattgtagttatttggattacaagttttttttagcaaaactataggattagctccaactattgagattttagcataacaaaccaatgttcttttatcatatgtacattaacagaaggtaaattcaaatctacgacatctatttcaataatgaggatagctaaaatagaaaaaagtatttggtatattatgtagtaagtactatttttagtatttaaaaggaaaatttctgttagaaaaagaacaaacgttctagttgggtggttgaaatgtaagttttcgaagctttgacaaaatgagaacaagtcccttaaccggtaatttttaatatttaaaaacaattaaccaagagaacaatattgacgtcgacaaatactaacttgtagtatataattatcattatctctacatatggagtagcttttaggtgtaataattgtcaattattttagaattactgtgttaaactttagtatgattcgactaataaataatgtttctgacgtttctgatgatgaatttgcccctccctcactttttgttgcgtgtccaaagctcagtgctatccaagcatttcatcttttcaacataattatttgatttgagaatttaatcataatgttgatattacttttttactaatagaaaacaatcaaacaatcaaattaataagtaaattagtggaaaccatgacacacaaaaacaacttcatataataaagtagggttgacaacgcaggaatattgtattacaaggcacatcttgtaactttgttggacaactgtggctaaacaagcttggccttcacaataagcaacaatgattccaaaatcttttccctctgtgcacatatcattgcatcacagattttgtttcctttcacattatcttttgaggtccctatgaaccagaaaataacaaaaaaacggttttcacacggttgctacaatatgaccgaacctatattctttattcgcatgaatcttccattagcttcttctttgtactcggctattatcttggattccaatttcttcatctcaggactgggcagttattttactgaactccaaattaattcaagagtctacaagtgtagttgctgccgtgcctagacctacggaggtaaggtccatctgaagagaagcatttttcttgtcaacatgttatcttatatagtatgaacattaccaatccggtgtacaattgtttataaatagatggatggtggtccagtagcatttgatttggtccctccaaaggagttggagcttgctaagcactaagcactagttcaacccgctaagggttatggttttcggtccacgaagatgtactgtccgaaactttttgcagttaagaagaaaaaggcataactccatgaaagatccaatcaatttcaacgccaaagctcattattctctaccattattcaaacaatttcatttcattaaaagaaaaacatgaaaagaaaaaaggagaacgagagatgggaattttcagtccaagggacaaagatggagaaatctcgttttgatcnnnnnnnnnnnnnnnnnnnnnnnnnnttgcggtggaagcttggagaaggatgctggaaaaaatagaaaaagctcagtgcttggcgtcttcttcttcgcagaacttagagtacttgtctgaatccatcagcttctctgcctcgcctgcatcactcagctcaacttttatgatccatccttgttcatacgggctagagttcacctgtgaattccaacaaaagaatctctcagctcgagaccacaaaatcaagaatctccaagttaacgatatttaagcaagctattgataaatcaaatctatattggttctcaaagatcaagagtttcacatcagctaaaagcctaaaactttccaacactcacttatgtaaataatttgatctagacctacgaatcttgaagacacttacattttaacagctgttgaataatcaagtatttatgcaaagaatgttacccgaggaatgaatttgttagatcacatgaaaatgacacccgcaaaactaagatttcggatttgatcatgccaatgaagttctttttggttcaacacatggagtcaatggttatatgattctgagtctgagatgagtactcaccaatccaggggactcggtcagctcctcattgacttcaaccaccttacccgagactggagaattgatatcgctagttgctttcacactttcaactgctccaaaactcttcccttgtgacaccgaatgtcctacatcaggtaactccacatagaccacatctcctaaatggtcctgcgcgtgatccgttataccaaaggttgctttattcccgtcaatcttcacccattcatgtgaatcagcatatttcaaatccttcaaaaccactataatacacatgccaacaacaacaacaaaagagaatataatcagtaaggttaaatggcaaaataatcaacattcctaaaacttcttgaagatcttccttctctgtaaacaacatgtttcaggcccaaaacaacagattttcaaaatcttccccaaaactacttcaagaataaaactttagagaataatgcgtataacatgaacatatcactcactacctccaagtttctgaacacttgtaagaagattatcattattaacagagagactcgagaaatcatatgcaatttctgggatttgatacgaaaaggagaaatattagctaatagcgatatccagagacaatcaatccagcaaaaagcaaacgctttaatccgatcagaagtcgagaacaaaccaaaaaccaataagttcaaatagaacaatctcagatcaaaaacgcagagtaatcaacagaggagatcaaacaaagagaaaggagattgagattcaccggaagaaaaccctcgttgagcaacggagatccttagatgagaagcaaccctagaagcccaaaagagtctacaagccattttttcgttggagagatctcgcacagatacacaacaacaacagtgagagagaaagagtgcactcaccgaacggcttattattatattcttacgacaaagggtttggtggatttgcttttttttttgcttataaaaaatgtcactttctgaaatcatttgctcgtagaccaatttcgcatcaactaccccactaaagcaacatcgtgggtaatgacataaaaccatatattataacactgttcaatagatacaaggattctgatcataaaaatccaacctttattaataaggcagatctaaaaatgcta

SEQ ID NO: 29693 - DNA, 3005 bp, Arabidopsis thaliana landsberg
gaaagaaggaaaagagaaggaagaaggaagaaagaaaagagtaggaagaaaaatattatttaattcctcaactataccaaagtaactatagttaacttacttttgagtttatggtaaaaaaacttgaaaaagtgcctacttctatgaaagtgctatattgcctaattagaactcaaaaagtgtctttctgcctaatattccctaaaaataaagagagttttggggttgcttagaatttttaaatcagggggaaaatattagatgcattgttttatatacaacaattagaaatgaagttatgcataaacaaatttagtattaaaataaaataaaaaataatatagtatataatatgattgttgtttcctaatattgatggcaactattttgggaatagaataaggacgaatttcatttccctatttgtccccaaaaatgtttaccatttagaaggaatgtttactcaaagtagatcctacgtaattcctcaatattcttcttatgacgaaccatagaacaaaattattgttcctcaaatttgagaggaataaaaggtaaagatcttaaagtcacttaaaattggttatatgataacatttacatttaattaggggaaaaattcagtttataaaatattttgaaagtaagttttaattataatacattaagaatgtattgttttaattgataacaagtgaattcatattaatttttaaaattcaaaataagattattaaatttatttaaatcaatattaatacttaaatttttaataaaattatatattttaacttcatagcttatccctttgggacatccgattgtgacatttttttattaaaatttgatttattctatttttaattaaattttaaaaacacattcattgactcattgttacatagattcagacacaatcatatcagatcagacaagacgattatgttctttggtgtatagatcctaacactaattattactttgaactaccatatcaaaacctacaaaaatcacaaagccctgtcttttccgacacactactaacttctatggtaagagtacgaagcagccatcaacaaatagttcccgttatgctggagaataaaagaagtacacataaactataattgttcaagaagccctagtttcaagaccaaaagacctaaacataaaccataaatagttaaaacaataaagaccttatcaattgagttttgaagaaataaaacaacacatggatgatgatgatgatgatgatgatgatgatgatgatgatgatgatgatgatgatgatgatgatgatgacgatgatgatgatgacgacgacgatgatgatcaaatgacttgcatcgtgagcctggatgaagcagagggaagcttcatcagatcctctgtgagttgcacctttttggagtcaacaattgtctctgaaaaattgacttgcaccaattgaagacactccattttcagtaagaaatggctaatgtgtttcagctcgttttcagttccttgacactgtatgatacgcaacatgttaactttgttactccggggaatgtgaatttcatcaaactcatcttcatctgtgccatgatacagaccctgaagtattaagaagagagactactttaatcccatgcaacagtcatacatagataaagtaagattttacttcttacctcgagacacaattttgttaggttcggagaatgctctagcagaagtggaagaaacactttccaaactcggtcagtgttacccaaaaacactaaaacaaggaggtttttgaacatggggagcccgcctttgcagcattgcgaaatcacctgaaacacacacacacacacacaaagaatgttatcatgttttctaaccgaaagattatgagactttacacaaaatgaaactgacctcagtagcagaagaagtcaaatgaagcatctggacattgcgtaccgcaatcatgagatccgtcacattcggttcaaaagcctcatcacaattttctaagaaatgaagatccagtgtagcattgacaagggactctaaattgcaatgtcgatacctatgccgagcataggtagagtagaggagggtgacaaggtttggtgtgtcaagtgcaacagtgcgaaaccaatcgaaatcagcagaatatttatagacgatggatagactcttaacggttttgctcgaaacaacgttcggcaaccctggaaaagacttttggtctatggttaagtcctcaagtgcagggcatccagcaagaagcacattagagaactttattctatcaaaccaaatcgaatcaaggacgagaatcttaagaaccggaagacacgtatcagaaggaaaatagacgatgaagagatttgttcccaatgtaagtttaaccaatgttgtgctcctgaatacattggatgggaaacgatgtagacgtcgagtcacagatgttaagcataaatgaagctcagagacaccgtgttccagcgcggtatttatccagcgatcaacacgaacatcgtcatgtttatctccatatataagtgagaacttgttgatagggacactgccttggaaagccaatcttttatcgacagagtccctgaaactctcttgaacgtcgtccatgttctgttcacccacttccgggtgagaaatgatggaatcgtcaaagtcaagattacgccggacagcaaacaaagtcctccacctcttggagagaacagaggttgaagcagcttgtttcgtttccagggaggacaagacgtggacaagaagctcatctggaagacaattcagtgacgccgtagagacagaactcatccctaacggcacctgaaacatgaaatttgagctctagcactaactaacacgtagcaagaaccaagaatataccacaagcatgtacaagactttgaagaaatttgaacaatccgacaaccaagacaaagctcaaaattgccaccacaaaacctatacatcgaattactcaaaaaaaagagttt

SEQ ID NO: 29694 - DNA, 2646 bp, Arabidopsis thaliana landsberg
  unsure (1)..(2646): unsure at all n locations
tcaagaaattgcatagtcatttgaagaaatctttagtgagtatatatctgaatcttgttaatgctgctgaggatgttcaagctcactgatctctccatctgcgcaatttccgacccaaatatacatcgtttggtttctcctactcggcaatactctgcaacaatccctcctcggtgactgcaccaaacacacaattttaacatcatgttatttcaacaccggtttattatatgatctcagccggttatctctgtcaattgactagccaaaaccaaaccggtatgactatatttgatgcaagttgttaataatgaagcaaagagaagatgtggaccaaccttgtgccatcggaggggatcaggtcgcttgagaacgacgactgaatcgatctttccaggcgaatcgagcctccatcggcacccgggaatccgccttgtcttgtccaagttgtagtatccaatcacttggcgacgtccttcatcatacttagccgagtttaagtaaaacacaaatggtctttggcacggatgcctcgacactggtctcgtgttaaacgcgtaaccaatgtagtcggctttgcggaaccagttgaggaatgttcttgaaggcatctcaagttcgccaggggatatgatgcctcggattatctggactacgaaaccccatgagaccgagatggannnnnnnnnnnnnnnnnnnnnnnngatggactgctggaatatgctggctgggtcaagaactgctgaagacatcaagtgtcgtagtgcacgtgaccgcttcatctttgggaatatcggctgcaccacatcgatgtggtgcagcgacaccaagggagccactgggtgtgcacctaataaccccaataagtccccataaacatcgtactgcatacatagaaacattaaaattagacgtattcaatccagataaaccgttctaatccgaaccgaaaccaaaccgaagttaataaacatcgaggaaacgtataaaatgacacctggtgaaagccaggttctttggtgaggggtacaccaagttcagtcatacaagcttggatgcgatcatcactgccgtagagaccaggataccggtggatgcaacggtcctgcgtgcgcgagagctcgagggctagagcatagctgatggcgaacccaccgcctccaaatgccattgaatatgagaagaagatgttctgaacgtgagcctccgaggagctaccaacgtagtagaactgagtgtggtcgtactttgaaaggacgtttaccacattgtccaccacaaacactgtgtcgtcgtctcccatcacgaaccaccgtacaccttttttgcctagccgaagcgtctccgtcactactcgagatatcctcaccgctgacctgtcccctactggatgggtgtacctaaaacatgacttcttgatttgaataagagatttcttgtaaaacacgtcagatattgtagagatgagtaagtacctgaaccgtgaggtgtcttgggagattctgatttctggaaggggatcgtttcggtaagttctgactctcttgtcaatccagacaacgccacgagttttaccaggtcgccaccatgatttgatgtactcttttctcgtctcccacagaacagaggacgcggcaatcccgaaaacgatgtgatcaagcgtcgtgttgaacatccttggtcgctgcgggtaaagagcggggacacgtggaggcacatcgtcgtcttcttcctcgggaacaacagaggaagatgagtttgctttgtcgactagggacaggtggctgtaggtagaagaagagggacggcaggtcttgcgtgagccacctcctccggttgtagagatgagaagcaaagggaggaagaagaggaagatgaagagccatggcagaggagatcttaagaagcttaggtgagaggtccgagcagagttgctgtggttttgtgcttggtttctttggtggtgatgatcttctagaagtctgttcttagggttgctgagattggtgttagagctcgaactgtttcccatcgctaatgggaatagaaaagaaatagatcgacactactttgttttgtttgtttgttttcaatcagatttggtgacatctctttttaaaaatgataacgaagtttcagtagtaacaggctaaatttagctaaagagaaaaggtctcttcctaattttactgcaagagcatgaccatgaacgaatactaaaactgataacaagttctcacattcaccactttcaacatttaatcataaaagcaaatcgaaaatttgtatctttttcatggcaacaaaattggtgcactgaagcagctaaaggaaccactggtgtatccatatcagtgccttgtctgcgaaaattgaacaatacattgtcaaacacaaaagaaactgaaaaacaaaaacaaaaaaaggcaggcagaatatttgagaaaaaaatagtagaataagaaaaaaagttacctttcttttcttgaatggccctccccttttattacggccgaagcttcttggcttttcaccatccttatccaagaacttgatatcatcgtaaaagttctcggttaaatcatgcatactgattcagttgaacatgagtgtgtatcatcacataaggaccaattacatatcagc

SEQ ID NO: 29695 - DNA, 2932 bp, Arabidopsis thaliana landsberg
gagaccagtctaaatatttaaggaccaactgtgacacatgttccgtttgacatgattggttcaaaagagttcttcaatctgagagcctcaaagacattgctgtttctctcatcactggtcaaccaaatcgctaaacatcggtccatcaactccttaccacaggaccaagctgaatttcctttcagaatccttgccttatcgaaccttaagatattggagaggtttgaatctgatggttggtcaaggaatgctctcatggttgctttaatggcctcacaccatataggacgtccaacgttcaagaagtcctgcaatgccgtcacgggaaggtttacactccccaattctgattcattgcgtccgccttttccatgataatctgatcctcctagctttagcagattgtatgtatcagccaactcgctaaacactgttcaatcaacattaaaattcagtgaactcaaatagatagatagactgatagagagggaaccagggatggagagagtgagagaccttctaacttgccgtcgctcctataaacctcgaccccatgaagtccagcatccttcaatctcctaataataccgacatgattcttcaacgcccacggatgtgcaagcacagctacaccaccggttttgcatataagttttactgcttcctcggccataggctcagtccctctgcaataaggttatgcaaccattcacatagaaaaaagtcagtgtgatactgacaggttttaaacaagtaccaacgaactacaccaaataagaaaactgattagcaatagaagtctctaactatcaaccactgcccaaagcaatatgcaaaaccaatcctacaatatccaaactcattttccctaaactttcttttagcatgttagatctctactctctagtttctctaatatagttgatgagctgtcaacagaggtaaagtccactacaacccacctaaggtaagcactagactagcataagataatcataaacgcttaaatcccgcaaggttcaaaaaaatcaggtaacctagtgaagaactagaacttacgtagcataagcaggtccaccatcatgtaaatatttagtgaaagcttgtctcaaattctccacgtagcctgcttcaagaagcgctcgggctacatgcatcctacccggggcaacatccttgcctgcaatcctggtaacatgttcccattttaaaggtatctttagcttattcaatttcaataccatttctctcccacgaacgaaacgcccatctcttatcttcaccaagaaatcttccaactcatcatataatgctggaccggaagtgccataatacgcaagtatatgcactggctcctcagacccggagtctctggatttcggcaaagaaattcatgactgagttaaagtattacaaacaagtaagaatattttgaatcaagcaatcacaacaaatataaagatgataccttaaaccgaataatgtgctgatctcaatacccggaatgatcttgataccgaatctacgtcctgcttccactgcttccgggacaccagccatagtatcatgatccgttaaagaaagaactttcacctgctttgatcacattgagaagcaatcaaatccctgatatcatcatgccatcaacagctccactgtaaacccatgccggattgtgatatcaaaagcgaaattgatggaaaagataaacctttctctcagtcctacgaactactcctaataatggtacagacgaaacaatcacacaaacaaccaaatctataacctcaatggttatactctacctaaagcagtgaactttgacgacctactaaaacagaggtacaaagctataatctttatggtaaaactctacctaaagcagtgaactctgacccactaaaacagaggtacaaagatataaactttatggttaaactatactaaagcagtgaactttgacccactaaaacagaggtaccacgctataatctttatagttaaactctaccaagtgaacttagtgttaagtggcgaaacatcatcgaattggcgttaccgttgtgatgcacaatctaatcagagcaatagctaatcttaagataattcaccagcaaatcaaaacccagttcagatcttctcctgattcacaaaccataaaatttgaaactaaccccattgttataagccctctccacgacctttgaaggtgatagaaacccatcgctgcgatttgaatgagaatgaagctcaaacacaactttctctccacatcttagagaaccagaattgatgttgacggcaaagtcatcagagaagaggagagagatggagaagaacctaagatgagccaatcggtgattgacttaaaggcttctgattgctcagtggtcatcttcctcttgttaccagtactacgcttcttcttcttgttccgcttcttcttatcgtcagccattgttggagattgtgagggaagaggtataaaatttggaggatgagtttttgaggtctgaccgtcggagaaggtgacagtgagacgaaaagagtagaaatttgaaatggtttttaatttctattgggcctgaaaacaaaccaagcccaacaaaagaaaattttggcgataatcataactagaaacaatagcctaaatatgtgttgatttttttaaaaacaaattcacttttttaataacaaacgctttctctctcttttttctcttttaaatttggttgtatttctacatgcttttattctgacactgacactctttaagtaatgaataacgtttgtcgaaaaaaaaaaaaaaaaaatcagacaatagtaaaagtttatttcccttcgatgcgcagtccgaatgttattttggtgcttatctttccccatttagtcgggtttatcatctagcatctccagcttctttagtgaggag

SEQ ID NO: 29696 - DNA, 1782 bp, Arabidopsis thaliana landsberg
gcaaaggaactttttctgccatagaggccatttgctcttcgaagaacattgcagctaaggaagatccctctaaagattcacttgtagttccacatgagatctgtgctaaagatgaattggcttctgatttctccagcgcaagctatgagagctcgcatgagatcagtgctagtgcagagaccaaacttgataagataaggagctctctggatttgatgaattcagagacctctcacgtttctttaacatctgcattccgtaataagaacatcaaagatgtttctgaatacggcaacaatgagatcatggaggaagattctctatctggcaaagaagttgatcagaaagattctgtctttatgtcggaacagagcgtggagattggttctttcagtgagaaatctgttgtgatgaatccagatagtcctccaaacaaactcagtttaggcggagcagccattgaagatgtcaacgaaaactcagaaatcataaacaaaggcgacggatacaacagttcaaccacgagtatcagcgaggaagaagtacaacaacagagtaataatataatgacaaggtctagctttggaaacagacctcatatgtctaaggatgtgagatgggaagctattcagcatataagggcacaacacgggcttggttcattgggtcttaggcatttcaatcttctgaagaagctcggctgcggagatattggaacggtttatctcgctgagctcacgggaacaaactgtttgtttgctataaaagtgatggataatgaattcttggagagaaggaacaagatgtctagggctcaaactgagaaagatattctcaaaatgcttgatcacccgtttcttccaacgttatacgctcacttcacttcggataacttatcttgtttggtcatggaatgttgtccgggaggtgatttacatgtcttaaggcagaagcagcccggaaggtggtttcccgagccagcagctaggtaccttggttcttacgattagtggttaacttttttatgctttatgatttgtgatgttgtagttactaattgtttttgtcttataggttctatgtcgcggaggtgcttcttgcattggagtatttgcatatgctcggggtaatataccgagatttgaagcccgagaacattttggtacgtgatgatggacatatcatggtgacagattttgatctctctttgaggtgtaccgtgagcccaacgcttctaaactcatcatctccactccatgcggatgcaatgagactctcttcgggtagccgcactggatctaactgcatcgagccatcgtgtgtccgacatagaactctcacgcggatcagggcccaagctcatcggcttacgacaccgcatgatgatgaactcactcaggaaatctgacctaatcgcgcggttcaaatcattgccacagctcgtggcagaaccaacagatgcgagatcaaactcttttgttggaacacacgagtatctcgcgcccgagatcattaaaggagaaggtcacggtgctgcggttgactggtggacatttgggatctttctatatgagcttctttacgggaaaactccattcaaaggagctactaatgaggagactatagctaatgtggtgcttcagagcttgaagtttcctgataaccctaatgtgagtttccaagctaaggatcttataagaggtttgttggtcaaggaacctgagaaccggttaaggacagagaaaggagcagcggaggataaacggcatgcgttcttcgaag

SEQ ID NO: 29697 - DNA, 672 bp, Arabidopsis thaliana landsberg
aacataaaccaaaacgacccaaaaagaaaaacacataggcgggtggaaattcctcctctgcccctacccacttctgctttttaaaccacaagacagaagcttgaaaaaagaagataaaacaaaataaaaaagtgataaaacaaaggaacccattggtgaaacatagaggtcccttaagacacaccactctactactcaacacccacttactaaaaccctaatccttaacatgactaaaagagcccttataaaacaagctcttttctccattttacccctcaagagtcaaagaagaagtttcaaggctctccacttaaaaaccctaaaaagccttaaaccctctctctttctctactctttactcaaccaactactacacaaaccctaaaactatataaaaccgaacttgactcaattttaacggaattgacggccggtgaaggtttgtccaaaggaccaactagctggagcaatgttgttagagacgacggtacgaccatcactagcagtcaccttaaatgacaatgcttgaccgtttaagttttgcattgctttgccagttctgtccccagtttcttgacatttgttgccaccttgttctagaacctttaaccgcaaccgaatgaacatctccagcaccaccaacattggtcaccaagacaaggttgaagt

SEQ ID NO: 29698 - DNA, 4496 bp, Arabidopsis thaliana landsberg
atctgacaaagatgtatgagcaattcttattgggtcttaatgggctacattattatgtcggcccatacgtttagtctttcgtcgtcgtttccatctgcgaaagcgaaactctcctatttctctcactcaagtctcattcttacgattctcttaacgaaatctttcatcaatcgctacacttatagcgacccagatgccaaattcattgatttctcgtctggtatctccttcattacgatctcagccctcaaaaatctcagctttacggtttttaacaactgtctcagccgccgagagattatacggccagcttcaaggatgcacaagtaatctcgagaaagaattagcttcggctaatgtacaattagactcctcttgtatcaacgaggtactaagaagatgcgatccaaatcaatttcaatcgggtcttaggtttttcatatgggcaggaactctatccagccatagacacagtgcttacatgtataccaaagcttgcgacattcttaagattagagcaaagccagatttgatcaaatacgttattgaatcttatcggaaagaagaatgctttgttaatgttaagacgatgaggattgttctgactctgtgtaatcaagcgaatctcgctgatgaggcattgtgggtattaaggaagtttcctgaatttaatgtatgtgcagacactgttgcgtataatttggtgattaggttgtttgctgataagggagatttgaatatagctgatatgttgataaaagagatggattgtgttggtctttatccagatgtgattacttatacgtcgatgatcaatgggtattgcaatgcgggtaagattgatgaagcttggaggttagctaaggagatgagtaagcatgattgcgtgcttaacactgtgacgtattctaggattcttgaaggagtttgcaagtctggtgatatggagagagcgttagagttgttggcggagatggagaaagaagacggtggtggattgattagtccgaatgcggttacttatactttggtgattcaagcgttttgtgagaagaggagggttgaagaggcgttgttggtattggatagaatgggaaaccgagggtgcatgccgaatcgtgttactgcttgtgttttgattcagggggttttggagaatgatgaggatgttaaggctctttctaagttgattgataagttggtgaaactaggcggtgtttctctttctgagtgttttagttcggctactgtgtcgctaatccgtatgaaaagatgggaagaggctgaaaagattttccgtctgatgttggtccgcggggttagacctgttggtcttgcgtgcagtcatgttttcagggagttatgtttgttggaaaggtatctcgattgtttccttctgtatcaagaaatcgagaagaaggatgtgaaatcaacaatagactcggatatacatgcggttcttttgctcggtctctgccaacaggggaattcttgggaagctgctaagcttgcgaaatcaatgcttgacaagaaaatgagattgaaagtttctcatgttgagaaaatcattgaagccttgaagaaaactggtgatgaagatctcatgagtcgtttctctactgattaattcaatttattcagatagtatgcttttattattcatataagaagaaggattattgtgtcacacaatcatcactgagcttattcgacattggatgaattagtatagcgattgaagtatttgctctttttaaggatgcaagggctccttggtcttgcggttgagtcttggtgcggcagactgttgatcctggagaagaggtacgacgtatttgacgagatcttcatccgccattattaagtggtcaccggttacattcacaaactgcacttttccagcaacaaccaatgctttcagacctatccaatcctctatatagagctttgtctcttgaacagggagaacatgtgttaagtcaccatccggataaaacccgaaccaagatgactcttttggaacaataaccgtatcgttctcaaactgtataaaagaaaaacaaatcatcacgagaggaatcagaagatagtagacaactataatagttaagagaagagaagcgaaccaggacaaaaaccaggttctgtaaacttgcgaaacggtctttataagttgtgtttctttcgtatggtctctcattgttaagcttaggtagatactgacagtctttcaggtaccctgtcacattctgtgaaacagaaaaaataatgttaagcttaggtagatactaatttgttgattttgcaagtttcctaataaactatggtgaatagagacatactttagggtttttgaaataaccactaggagcaagattatcctgcaaaagtcaattcaaagattttaattaattttctaattgacgacttaatcatatgatgtaaagagagagaaagagatcaatacttgaacaaagtcgctgtagggattttccttgcctatcccatttgctatgtcacaaattaagccagacttgaacaaggaaaaaaacaaaaacaacagaaaaatacaatgttgttactgtgattgattgattaaaaatgaaatcaaagatatatatttgatatttagaggaaataaaaaagcttacagtattacaccgaagaagattggcggtgccagcatgaggaccagccaaggatatatagttgtgaacagaaggcccaccttcgcagaactcgatcaagcctcgagccactaggttcccctgttccatcattcatcaaacatccatgaaactgaaacaatatgtaaataaagatcacgaaatctattttagggttttcaagaaagaacctgagatcttccaacaatgttgtatccttgactcaactcttccatatgcgtcaccttatcacacgctgcttccgcttgttgtgtaagtggtattaaccatgaagcgcctattggatttccctcgccaatttctctggattccataccaaaaaaaaaaaaacaagaatcagattaaaccaaagacatcatcataaatagtcactttgcacgtcttaagtatcaagaacacataaatagccataatctttggattatcaaaaggacgaaagagttgtggattgacttacatgcaaaagccaggtgagctagagaggttactgagaagctgtgtgaagttagcatttggagcatcagaacattgtgttccgatttcaggaaacactacgaacggaactgaaacagagacatgaaccatggctaagaatgcaaccccccccaaaacacaagacatcgtcaaacctttctccattgtaaaccgccaaaagtacaaaagctgcgattggcgtttatgtttatatgtttatgatattttgtgtctccaagaacatttgagatgggaatatataaagggaatagaaagagcgtcatgtggttggaagttgtggccaattaagagttaacaaataattagatgaaaaaatggacgatgctgattggtttttacattctcagtatgaaatggactgtgctgattagttgagatattgcattaacgtttttggtagcattttgcattaacgctctgcttcctagttcttcctctaatgacatctcccgcgttgcctcttttagtacgtgtgtgtatctatgtattttttaacatattactaaggacatttcatattacaattacttataaatccaatcatattgtatttgaatatgtttaacaacaaatttattgtcatgtttttaatactaaaataacattgtaaataggatggatcgaatgtaactatgatgccgtccaaagcaggatggatattacgggacgacaaaggcattttatcttggttcaggtcaagctaagggagtgaagacttgaaatgctcaggaaggtgaatttttaagctctcatcatggcaatgccgaactgtcggagtcatatggtggttacacaagagtcatttttgaaggagacaagaaaggagttgtggacttagtaaatggtaaatgtctatattttggagcctacatttggatcagagaagtacaagtttggaagagaagatttcaggagatctgtttgaatgtgtgatagaggattataatttccaacagtactcttccattgcattaatagtttaatactacttggtaccacttgccattaacagagagatattaattgtcttcttataacaagtaaaaatattgtttggaatttaatattatctgaaatacagattaacctatctcatatttggtttatgtattacacaagaggagaatgcataaaaactatatatttcaagtttttatataattcttaaatccacaaacttgcgccttgtataatgtatagactaaattttaatttgacaactaaatatacaaataaatttgctccttctgtaaagaataaaatctctaaatattttttagatagaaataatacttacaatggacacattgactc

SEQ ID NO: 29699 - DNA, 1511 bp, Arabidopsis thaliana landsberg
gagaagacggcatatttgtcttgcaggtaacgcttgcgtgtatatatctccaatctaatgtttgcacaaccattgatcgttgttaacgcttaacaataataatattttatatcgatacctgaagagcgttacagtgagtacaaactaagttcagatttcataaaagaatacatattccctggtggatcttcctgctttagccagagttacatcagccatggcctcttcttctaggctatggtaaattaagtctcttattagctccaaatgtaacttctctgctttcctttccccgagtcccgacctatttaacactggaaaaaacacagcattgaaaacgttgagaacattgggattcattactaccaaacgttaagattgtggaggaagaatttcttcgagagacaaaagtaagatcaatataaaaaacatttcctctgttttctctttggactctatatgtggcccttttatgtgtgtttgtgctcatgtcccaaaaaaaaactattacttgtgcagacaaatcacggatcttggattcgacgatagattcgtaaggacatgtgaatattatttcgactattgtgcagctggcttcaagactcgaaccgaaggagactaccaggttacacacacacacacactcacacacacacatactcgagcattaacaaatgcttatcgatgtgaataaccatatgcattaatacaacattgcagatagttatatcacgtgcagggaacgtaattgcactcggtgatgaatcattctacaggtatcctttaactcagaaaaaacaacttcaaatgaatcattttgattcttaactactactcccatttcttgtgtttccccttaatgtttgtggatacgtgaaaaagttgtcttatgcgaacattaatttatgtctccaatgaacatttcttctctctcttttgagtttgtgatttgtttaactaatgagcttttttctgcatgatccttgcatgtgcccatcataagcccatgaagcatccgagaacattatatttttttttcttgaaatgtgtgaacatttgatatttcatgtattcaaattaaaatagaacatgtgatgtgacaactagagaaaagcagacaccaacccaaacattggtttttacgtatggattgctatataagtacagaacgcaatgtggcttgtttatgcaatactcgcttactgttcagatccaaatccattgtgtcccaactcccaagtcagagaggtaacattgctgactacatttctcttccctttttttttctttctttttcttcaatattgtattatggatgtctttgcacactctccataactccattctcctattacactcccttttctcgttaaggaccttaacgtatgtgcttcatcagtagctctaaggatctaacagatacgaatatcaaggattttcaggatatcctgatccgatttttaactattggttccggatccatgcttctggatttccggatttcggatatc

SEQ ID NO: 29700 - DNA, 1598 bp, Arabidopsis thaliana landsberg
agggctccatatctaatagtatgaacccgctattataacatacaaatctcattcccttctaccttcccatctatcttcatcatcacatcccatatctcttcctcgaacctctcttcttctttctctcttactttgtgtttgctctgttttgctctcttaacacaacacaaaaaatgtcccatcgttgttggccaagcttaccaacatcttcccaataagcaagtaagccaaaatcctgacgtgggtggatggagtttcttgcaatatttctctgagccaaaaggcattgtcgagaacagagaagacgacacaaagaaaacagcttatgtctacccgatcgagaagcgttccgtagctaaactgagccttgagatgtgcacagagagcctcgggaccgagaatgggagtgatagtggagacgagatgtcgttacttgcgcttgaagcaaccaatatttcaatgagtcctcgtcttactacgaaacctcaaaaagaaactatctttatgatccgtgagaacagttttcctccgccgctaaactccgtcaacggattcaacaatagccgtatggtgaaatcgtataaagaagacggtcgtcttgttgttcaagcaattagggtttgttctccacctcgttgctttgtatctgaacgtcgtgaaggaaggcttcgtctctgtttatcacagaattcattgaatagccaagacgcagaagaagagtttgaagaaaatgaatctgatcaattcgaggctcatgacgaagatgaagatgatcaatacgatgcagaggaagaagaagaagaagaagaagaggacgaggagggcattgtggggaataatgagaactttgagggtaaaagtggaaataaaaaggttagcaacaggccaaaaaggagatgcaatgaaaatgggtgtgagcctaaaactatgcttaattggaagcagcagcaattttgggtgaccacttaatgggaattactcaactcagcaaataattattttttacgaccgcaataattagtattatggcctatttattttgattgtttaagtgtgatttgtaatatggaagacgatgagtgttttcttagtcccattgtatgactatacggcttctaattctacatatataaatgctaaaatgtgagttaattgttacttaaactgttaaacaacatagagtactcatcttcattatctgtttttacctttttagtatggtatagctaacctttgattattaatatgtctagtacaaatctttgcgaagatgcggattcatacacaccaatacatacatttaatagtgaatctgttatatgccaatatacatgacgagtttgttgaaatttatcatgattttatgaaattaaaaaaacagggaatatagatgttataaaccgacttagttttagttttgttgtcatagactaacgagagtgacactatagtttaaaaaagggtaataaagtaccagtaatagtgagactgacgaaaactacatgatcactttcaaaaaacttcattgaaattttggtaacatcatctacactagtttgcaacacatctttgtgcttctaagcgcagtcaatgtcaat

SEQ ID NO: 29701 - DNA, 2471 bp, Arabidopsis thaliana landsberg
  unsure (1)..(2471): unsure at all n locations
ataggttgggtcataatcctttgaactttggtgctcgccatgcctaacgtagttggaaatctctctcaagctttcgaaaattctctctcagaggaaatctaaaaccctaaaaagcgtttgtccctctgctaatacgcttttttcaacatttttcttaaacttagttctctcggtcctcataaaacttcagaatgttatttcagcccataactaattaatgtgatcatttggcccaaatactcttttccaagacctagaattttttagcgtaggtttttaactttttttttttttttttcagagaaagatttatttttaatatactgaggctcagtgttacaacataaaaggctcaagacagtctacatatgaggtccacaacagacttttacgtcacaaaaaagagataagcttaagacgtgtcagaccaataataataagctaaggacacgtgaataatccacaacctccaccggatgagactcaagtctggtgaatcggagaaccatcgccgggaaagcaccgagcaatgaaactctttttttctatcaccgattatggcaattagatgttatagaacaaacatcaatttcctaatctcatatggttgctagaatcacaaataattcatcaaaacgggtaaagaaattaaaaaaattgagtagttcaaacttgtccaaccattgaatcttcgaactctcttgcaaaagcactaaaggcatatcaaatttgcataggatagaagctttaacccaatcttaggcgaaaataaaattgaaactgtcttaaatatggtagatccaaacgagggtaattgctggaaacgcacacatcgccgaaaaactaccagagccaaaagcataacccaatagtgaagctaaacaaaacagaaggagaatagatcttgtaaagagaaaccctcttcagatctgacgattctgcatgccataaagcttcatcatcaaacctttgaagtaacaaaacaaaaacaaagatgaccaacgctgttagtgtaagcccaacgctgccgtacggaagctggccaacgtcgctaagttagccaacgatgccatacaaaaagccaaccatctccactaacgtagctagaagatgtcggacgaaagcccgaattaaacgggacggcgactcaccggaaaactatccggttaacaaaaacaaaagaaatttcagtttctatctttacaaactacgagagagcgaagagagaaaaacttttttgtgtggtttattaacttaggtttttaattttttattattctggtaaaaatatacgactaataatgataattattaaaaatattcttacttagaaattggtgtcgatgataaattggttctcagtcgaactagtggtaaaataaataaaaatatgacaaagaatcacatctatgtgctcaatgctagaattacaaagattgaagagagattgaaatttgaccaaatattatcttcccacattcttatgaataaacaaacttcattcctcacaacacagaaatgtacaaaaccaacaataagcagaaattaaaaagagaaaaatggtcacaatctcagatttaaaagaaaagaagactaaaaagcttaggctatatctatgactaactgaatcaaatccaaatacaaaacaattagctttgtacaaagaatccagctttgaatctcaatcattcattatttatcatcagagattgataaggaaccttcttgatctccacaaatgttgagtactcagtgctcattggttgcttccatggctcaccatccatttgcaagaatgcgtctctccagtcacctcctcttagctcaaatcttaccgcagcagcctgaaatgatcaccaaaatgaaacagtcaaacacatggctaaaaagattatacattgaccagtgtcttttgaagttacctgagctatgtgcttggcagagatgagctcagccatgacaaatgacgcgtgccatccttgcttaaaaccgaaaatctctatcaaaccatcatcacaatgtgcttccacaaagcctctctgagaaaaaccaaagaaaacattcgggttaacatcagagaactgagttcatatatgatgaaatggaacagaaacaataccttctctagatagtccggttttagattgccccaaggatggcttccacttccatagctgtgaagattcaatgcgacaattgatctcacactacaagagaaatccatagcatcaggttttaagcattgatatcaaagattgtaatacataaatcatatatcgaaaactgttttttactttttcgggactgcgatctcttcccactgagagcagttaacctttttgatgtgaattttcattatgttcctaagtcccctgcanattcatatagcacaaacaaggggtcaacaacacaacanagggcttaagcagagacttacacacaagttcaactacacaaatagagtcgaaatg

SEQ ID NO: 29702 - DNA, 2442 bp, Arabidopsis thaliana landsberg
ttctaaggatgaacatgttaagtaataatcctaaggcaaacataaaatttatcaaaatcataattataaaaaaaaactttaagaaaatattaataaaccacatagttaacaaaattataaaaaaaacaggcattcaaaaacaccaaaaaataatggtcagacaataattctttcaacttggacatacaaaaaaacacagttagtatgaaagtaaattgtgtacaattatttacatgtttacggcacaaggacgggaggatcagaatccgaacacagtcatttcgatctaaaaatgtaagataacggcaagttcagatcttgctcctgtaaaaaggatatgtgaaaatgttccttggacagccgtggaagttgttctcaagaacagtgatcatgcagtctttcattgacaagcacattgacccgactggttggttcccatgggatgccgagtttgtgctctccacattgtactatgtagagtatgcgaataccggtcctaagagcggatagtagccctgtgcatgtgggtatttgggtcgggttcggttcgggtttactttgggtctaggtaattcgggtattggttaaagaactcataaataaccaaaactatttcgggtttgagtactacttactcaaattttgtccaaatatacccaaacatacgtaaaagtacccataaaatccaaaaaatctgaaattataacaagtttttccttaagacaatagtataaaacaagaagtaaaccttgttttgagcttgtttcataacttaaatcattaaacaagtcacaaattcaacttattaatgcatatctgtcctcatatgtatatatatgttcggataataaaaaatactcacggatatcgggttcggtatgggtaatacccgatacccacggttatttgaaaacaaaacccgatcggataattagacagaaccaaagtagaacgggttcgggtatttcggatcaggtttggttcgtaggcatgaccaaaatctaactgttaccgtatttcggaccgtaaccggaccgtttattaaccgtaacccaaccgtaaccgtataaaacgattaataaccataaccattaaccgtgaaaatagatctgttgcggttaacaaaatatactaaccgtaaccgtttattataccgtaactcgtatcaaaaccgtcggttaaccgtattgttaaaaccttaaaaatatagttataactgtgtagaattctaaataaataattatcactaaaatagtaacttaaatcgtttaatatgcccactaatacgatcgaagttactccactactctttttaccataagttcatattattattatttatactctctcttctgtgagagagtgctcataacgtcttttctttattattgtttttgtttgaaaaatgtaattaattaaatcattataattataaccattaatttggatatccatagagacatttaaaaaaaatagatagctgattcgctataaatatttgaaacacataatcacgtaaaataattattatttgatatatcactatttatttatttattttattataaagattaatataatattttgtctcatatattaattatatcataattatcaaataaccgtaaccgtatctaaccataaccgtatttaaccgtaaccgttttaaccgtatatataacggttaatgttaaggttaaaaaaagttataatcacatacggtggttaataaaccgtaaccgtaataaccgtaaccgtggtcatgcctaaaactatctggataggtttcgatgataacagataataatgatataagctaaatcatgaaatataagtaactgaatatattactaagtaataagttttttgctattcaaaatttctatgattaaaaaaacttagctaatgtagtttggtagtcaaatcgtatactaaaccatcattagctggttatcaatagcattttaaagaaagttaattaaaccggctgaattggcctggttgacacgaacaaaatgaatgctagaaattagagaaattttgttagtacaaggatgattatgtaaatgaaggataataaaggggtcaattttaacatttattaaaagtcatggacacaccggtctaacgggtgcgtcggtcggcgagaattacgctgtaaaaaataaaataaaataaacatgtaatgaaagaaaaaaaaaagaacatgaggaatactcatacgaggcgaagcgcaccggaggaaccataagtcgataaacccaaagcttagatgaccggtgagttgacttctttccgattttgacccaatcatctatcgccacgtcatagggtactgcgtcctctgcaatccataccctgaagcggcaccttctctgtctctcccacaaatcccaaacccaattcgatcgtcgtctccgacctacatctgaaaaaaaatat

SEQ ID NO: 29703 - DNA, 1962 bp, Arabidopsis thaliana landsberg
tttatttttaattgataaaatatgaaaatgctgtatatttgcttatctgctctacattgtggcagagaatgtcagaacaacaatatggctttagtgaggtgtcagaagctgcagctgttgatcaagatgataaagcgaagctttctcttaagaaaggtagccaattcgtaacttgtgcactttgctatttgcatcaaatgatgtctgtttagctggttggatagtattgtatcagtgtcacggctcgatgatatatcttcatcgttatagaagctctagatgttctttttaatgtatcgattttctcaatgggcctggcatgttttaataacttttctttgtatctagttaaaaaaaaatattatgttgtctttcatagacttttaaccttttcctttttcatttctccaatttttaatctgcccacatatttgcaggagaccaagtaaagtatgttgggtctcctaagaaggacgaagcaaaacataggtaattttactgattcacttatgtgggaatctgtttttcctttatgtgtgcttaaagattttaaatgttttcctggagatagctctacgaggatgagatggggttcatcaaaagattttatctaacacatgttggggaattagcataaatatggcagaaaaatagatgtttagcttttgcataatgttggagaaccataactgatatgtcttcattttcatgtgatccctttcgtagcatgatttgttttagtgcttacgcctctttctagcatgttatatcatgaaaatttgttactctggtgatctaggaaccttttgagctataggttaggcttgttgttgttctttcatgtgttaaccattgattttatttgaatccaaggcgagaaaaattggtagttagcttcataagtgcagtatgtaatgtatttacagctttataattcctgactcatccacccctaggactgagcaaggattgtgctctgtactccatttttcatttttcagttaattgtggcttccttgtttcctgcattaatataatctcttccatgtgcatggtatttaattactaaaaagggttttcaatttaaatcttctgatctagtttagctgtctaaaacacgcattgagagtctacacttgtttatgaacttttatcgtagtctagcaagtcacactggacctaaatatttggaatgagacttcgtattgtaaacctggatattattaccagtagttgggagttggtcactgtccccatttgtatctatgctagagaattcttccagcaatcaaactggaattatgaattcatcctcatcctgtattggcttgtaaatggatcacagggtcgtattggggaagatttccacatctgatggtcaaaagagtgcttttaccgttattcctggcaggtgggttggtaagtcatctagtgtgaaaaatcgataaatgtcttgttgtttttaagtttaatctttcgtcccccaaagttgtttcctttttaaaattgcttcaacttcgaggggttggaaataccattggctgtccattgggtgaactggatgcaggattggccttctttttcctttttgagttcaagacttcaagtctcaaatttcttatatttctgacagctgatcagagatattagtacatatctagttgatattattacagaagtagtctgtcttttaaagtttatcctccttatctcatagtctggctttcctttagatttttttatcttttcgtttgttgatcttgtctgtttctatatgactacgtgctttgttattttaactgtgagtggtgtaagcttgtgaagaagttgacaactggtactagaactatgcactgtgaaaaacgttcgaggactatgaaagatgatcttgtaaatttcaggcgcttaaatatcttctatgatacgttggtctgatattatttgagtcgatggctgcttgct

SEQ ID NO: 29704 - DNA, 2536 bp, Arabidopsis thaliana landsberg
cttgaaaccacgggagagcatttcatcagcttcatcgagaacaaacatcttgatgttgtctgcacgaagagactgcctcttcaacatgtcaaagacacgccctggagttccaacaacaacatggacaccagcttggaggatgcgctgatcctcacggacactggttccaccaacacaggcgtgaaccttgacaccaaggtaatcaccaagggccctcatgaccttctcaatttgctgagcaagctctctagttggagctagaaccaaagcctgacactggataagggagaagtccagctgctgcaagacaccagagcagaaagttgctgttttcccagtaccagactgagcctgttgaatcacatcaagacccttacagaaggggacgattcctctttgctgaatagcagaaggcttctcaaaacctaagaaaaaacagaagcacgcatgagataatgttctaatctaagacataaatcacaaaagatagctttttcaagttcctacacacataccataagcataaatacccctgagaaggttctcttgaagacccatggcatcaaagctctcatgaacatcatcataggatgtgaagaactcatcttgtccctcaagtctgtatcaatacaatacaattagcagctagagcatgcggagagaacacactcaagaatgaaaaaacagaagtaaaaagactcacacttcattgagtttctggtcaaactgacgtgcatcaaactgtgtgccttctggtgcagatcctgccatgctacataaaaagaacaaaaacaatcagatttcatatcaaaaggaagagagacaacacatattttgatatcgttaataatatgattgcaaaggaggaaatgtgacaagaaagccaaactcgaagtccataaagagaggaaaacaagcattaatatctgcctcagatgatgtgcggagaaaatgtataaaggcacatatggttatctattaaacatagacaccactcaacctatttctccaaattacaaaaaaaaacattcaatcagacaaaaccaagtgagtgttaagacaagaacatctgagctttgaagacgattcatttcattctattgagagactaacctagccgtaacaaaatctacaaacccatcaacaaatctacagatgtgtagatcctaaatttaataatcgtcatcatcagcagctcagaatctaataaagagaacaaaaacgaaagcacttccacagcaaaaaaaacgatcttgaagtaacgaaaaatcaaaacttccaaatcaactcaacaaagttgaaaccaaatctatcggaaaacacaaaaaaacaaatcagaacaatccaaaagtaaagaaacaatcatgaatcgtaaaagttacatcgagataatagatagacaatccgataggatgcgaacctggagcaaagttggtaagcgagagtaaagggcttttttcagggagcttgaatctcccaaactcggatctgaaccgcgttgagagagagagagcaaagagaagagcgaagattgcgagagactggtggaatatccgaaagaggctgagagaaaacgcgttaccttgtttatatactccgtctttagggttttctcctttggaaatcttctccttttctttttcggatttccggttttacccctttattccctttctttttactcttttggctcggacaaggttttccaacacttagctcattgtcttaacttgattttggcaaaaataaataaacaaatatctagtgggaaattaggaacataaattcttcatttatttttttttcttttccaaagctttctttctcctgcaacttttattgctttttgacgttacaaagcattttcccgattacaacgaggatattagaagaataaagtgactgataagaacgttttatctgaaaatgtctttacttattaacacatctatctctctatgttgaatgtttaatcatgtaattgttccacaagtgatatgaagaatccttgaaacgaagcaaaacacattgagtaagaagaaggtaactagctagtatgaagaagcagcaagttgctatctatcttcaacaaaaaatgctttgattttagcctcaagagactttcttagaatctgttgccattgaagaaaaagctggagagggcaaaacataatcatgatgcttaggataagcaaaaaatatgtatttagcttgtgtaggtagaggaagagctaggagttttttgtgtgacaggaatcgagggaaaacgatgggccaaagattaggcccattaataagtttgactaatccctgccgttcattagatgcctacgtaatcactaacgcacctgatgatctctgtcttttggtgagacgcaaaagctcagagaataataatagggcccaatataataaagtacaaaccgaaatttgtgaagcttaattagtcggtttaaatacttttatatcgaatatggtagaattggtgttggtacgatacaatctggtacatgtaaggcagcattttggatttctg

SEQ ID NO: 29705 - DNA, 2403 bp, Arabidopsis thaliana landsberg
atcagagaaagttttatctgtttttagggttcagattttaaggaaacaaggggttctgtttaaaagcagtaacaaatgacaaattcatagtatatatgctggaaaacatggtggttctgttctcatgctatttcaaataaagaatacaagattcttcactaatacagaaatttttggtgttttggttagcttctgcttataacaagttacttacttgggtccctcgaagtgtaattcgtggtttacatgcagctatgatggcgccatttgcgcctattgtaaccgctaccttgcgtagagtgccaccattcccgcatttgggacagaagattcttccaatttcaggagttactgtgtagcaagcatggcatttcaagatccacctgaagatgtcaatgcaataaagtgtaagaattgtatctttctcagttaatgacccttgctaaagaaaagtgtctgtcatttgaacaaaaaaaggaagatctgaagaatacctgtgcagttggcgaatttgcattccgccgggtgcaagtaaacgcaaacccatttgaagaataacattctgcattgcatagtcaccagttatacaagctacactggactcagataaggctctcagtgaccaactctgctcgctgctaccatcatctccaatcgatgatgcctcgaaggtatcctcagcctcactagcaatctccaagttctctagcgcttgatttgcaacatcgatcccctcagcttcgacttcaatatcatgatcaatatcatcctcaccattgatcaaagttgcttcagcattcgtgtcttcagtctcttcttggagagcccttaatgactcttcctccaacctcatatcttttaggatggaagatatatcctcaccattctttccaatatcttttgcgtggctttcattggcgtccttagtgtgtcgagctttgtcagcttcttgatctttctgaatttcttgttcagccaaggcattgtaatgttcccacctcgcctttcttctaagatacttagagtgagtacttctactgactgcgggtctccaatcactggcatcatcatcatcatcatattgcccctgagatgcatcgactccctccactaccatcttaccctcaagcttaatctctgttttcttgggcgggtatcgcctatacttcttcccaccttcctgcccatcctcttcatgattctcagtatgagagacaacagaaccaacctcagaaacattgtctgaagcaataatattcatgttaaggtctttcaaaggaaggattttggagttagcattggatttttcctcagtctcgttttcaagtgcctcccactcctccaagttagccacattggagccccaaccaggtaaatccttctcaggtaatctcttaactctaacggtctgaatcggtggaggaacatctctaagatttttggtgccataaacctgagcctcaagcgtgtatgacaaagcaatcaacttgagatcaacatcagaaagagattgcaaatcaccagtagctcttgcaaatttgataactgcagaaccaaaaacaatcaatctcagagatccaatacaattttttctccaacacagcaatatacacatacctacttaaggtacaaatttcacaatcacaagagtaagaatcacaaaactaatctatgcgtacctttacttagagattcaggagaaggttccatggtatcaatagtgaaagggatgaaagcgagacgacggcgagaagcagggtcacgaatctcagagagtacttcagggacagttacgaatttgtcggcgaagtttgttaagctctggcgtccttcaatgacggcgttagcgtcaacaaccgcaatagatattccttttgtggatttgcagtttccgaccatcccgagaatcgctgccggagctccgtcgttaaccggaggctttgaaggtggatctttcttcacaattgagctccacatcgaggttggtttcggatccatggttttcgttatttgccgcttcaaatgtgggtgggtttaacgaagagactgagagatggagagaagaagaagagtgtaaacaaaaacctaggtcagatccgagacgacgtcgctttttgtccataattttaaatgggcctcacaaggcccaaataattgcgtagatgtataaaatactatctgattagagctagaatttgaagactagtattaaccaaaccaaactagatcatatcaagggttaatgatatcaaattatagttgtgtttcctttttatccacccttaacggctctagaacgtaaaatctatggaaatcgaatctatgcaaatatatggaaatcgaatcgaatctatctatgcacacatctttacgcgtttttttacaccgatcatctataaatat

SEQ ID NO: 29706 - DNA, 988 bp, Arabidopsis thaliana landsberg
tcaaatcaagtctaaagcatggttatgtttctggttaatgttctcgagtgtgtgtgtgttacctggtagttgctaagggtaagagtcttgaacccagctgcacagtagtcgaaataatattcccatgtccttaagaatttctcgtcgaatccaagatcaatgatttgtctgcgcagataatagttagttttgttggacgtatgaacaaacatactaaatcctgaaaagcacaacagaggaaaagtttttattatgacatcttacttttgtctctccaataagttcttcctccagtatctcaacgtaggatagtaatgaatcccaatgttctcaacgttttcaatgctgtatttctccggtgttagatagatagattggaggaagagaaaacagaggaattgataaagaaaagactttaccatagcctagaggaagaggccatggctgaagtaactctggccaaagaaggaagacatccaccagggaatatgtattcccgttatgaaacctgaagttagtctgctctcgtcgtgaagctcctccggtatagctgtgacatgtaattattgtcaagcattagcaaggatcagttgttttgcaaacttgagattgggtatacatgcaggtgttacctgcaggacaaaaatgctatcttctgcaagcgcggcttctcagtgactgaataatgtctccatgaatttgtggccaacatgttctatcatctcactgaatcatccaaagtgttatgtcatagcctcatacgacatagtcagtattatatccaagagagatgtatccccatcatataactctgtcatatttttaagtatcacatagtgggcgatatcctcagagcttaagcgaaattcggtcctatcattaagaagttatcatgttagtcatagccttgtcccccattcccagaaatggattatgctagcctgaagaacagcttaactcactttctcttctacagatttaagttgtc

SEQ ID NO: 29707 - DNA, 1270 bp, Arabidopsis thaliana landsberg
agtgtggcttgagcttctagcagagacttctctagcagcaagcagtagtggtgtggcctcttcttcacagaaaacactctcctcgcttcctcatcttctttgcttacctcttcttcattcctcttctttctcaacacttaaacatgcgtttctttttcatcgaattagtctgaattctaaaccaaccgcaaaaacaaaatgatttttcttaggccattattgtatatcttcgaaacaagagaaaagaaatatgggaagagttagaaaaccttgggaccacgatcaaccagacgagcccattcattatgataaagaatcatcttggaaactaaccaaatagatactaaatgagagtattggctaaaactaaaagacgatgataaaaaattatatcatatattaccgcattacgtgatccttgctactggaactagaagtgcgcttaagactagtagcgattggagacaggggcaagctaccaggttgtctcatgcgtgggacacgaggagaactattcgagttgatggtgcagtcttaaagcaagctggttaattattaaatggtaaaaaataaggaaggcgaacgaaaaaaaagagaaagaattctatctcagattggagcaagggaaattatagtcttcgcagagttcttagttaattaatgactggaatactgattgtgccaggcttttcatttttctggaatgttcactaggagcctcagaagaaccaccattaagccgagctgccgaagatgcctttgaggaagattctcctgtcttgctagagacaaatctcattagctgtctttagtttcatagaatctgaacagcaactaagtaaggtctctctcttgggattttgttactattgaggacacatcaaactagatttgttgttcctaactttatattataccacaaaaacataaatacagctcacaaaaagatcatcccattcccaatatgtcactctagacaagcttaaattattagtattgtctactgaggaaaaagctttttggtaaaatacacaagagctatataatacacatatactttctatattacatagagagaagagagaggaggctcatgaagtggcttgagcttcctcagagctactagcagagacttgtccagtaccagtagcagtgtggccctcttcttcttcttcttcttcttcatcgcagaagatgctctcctcgcttgtgtccgagaacgcatcttcctcgtcttcttcgctaacttcttcttcgtttctcttctttc

SEQ ID NO: 29708 - DNA, 827 bp, Arabidopsis thaliana landsberg
aaatgatctcctatagatctcaccttttcgattaaaagatgtatttttctcatctgtgcagttctaagattctcattttctgactatataaacatgaaagatggcgaaaggttgatttcaggatcataataaagtaagagcaactgaaaaagagaaaaatactctggaagtttttaatggtcgccttgaatactgcagaggagtacatcatggtatcatccatgaagagaccgaaaaactcgttgctctattagcagaaatccgatcataaacaagaaaacaacgaggaaatgttcatcgagatttaaagagaggtggagattaattctcaggcacgtacaaggtcatagtgtcgcgaaatgttccttcgagcttgagttaaattgttctgcctatagagatgctttaagaaatgctttgcagatgataaaccagtagtcaaaaaaattggtgtccaccgacccctgaaaaataaataaaaacaagtgcaatgggacaaatgaagtaacttagttgcatgtttgaaactttaccttttctcagcaagatttgagttcaattctttgctagcaatgagaatctgcaagttttcatgatcaaatgtcgatcaaaagtttttaaacatagatctacatgcttcaatatgtgtatgtaacaataccatgatcagattcaaaagtcctgtttccttattgacaaatgaaaaatctccattgatataagcatcagcaagtcctaaatcaacctgtgtcataacctgtgtgataaagcatcatcaagaatccacttcttgagcttcagaaaaaaacagtttccactgattcaaa

SEQ ID NO: 29709 - DNA, 2401 bp, Arabidopsis thaliana landsberg
ggctctggcaaaatctctgaccttggaaagataaaagatagttcagtcacataatcagcatgtgtacgtcgtttctttagtgcttaatattataaattaagaatacttaaaaccaaatctttatataatattgattgtcagataaacattaacccaacaaagtctctctccctctcctattcaactttttcagttactttactccgttcatcttttatttttcttttcgtcgattctcatcagtactacaaaaatatatacttctatatatcgtgcagaggttacatgcattgtacaattttgttgtcccgagaaacaagcggatcagagacaaaatcatagtcggtttcctgctttttgattcctctttattaatcagcaaagatcgattccacttgtcctctctctctctctctctctctctgttctttaatttagagagaaaaaataagcattcttccttctctgttttcgagcgggaaattctggagatggctatacaagcgcagttgaattacaacgctccgaatgcgaatcaaatcggttttggtgggtccgagttttctttgatcaacaacaatggcgttattggaatcggtaacgatcagtcttatcttgcaataatctccagttgcagaaagatttcaaccaacatgctctgtttcatcatcagcatcatcaacaacaacagtctccttctcaaagctttttagctgctcagatggagaaacagaagcaagagatcgatcagttcatcaaaatacaggttcgttatttcgtaatccaaaccaatttttcatcgaaagtttcggtttttaagacgtgggtactgataaagattcaaccttttttgctttgttgataacagaacgagaggttgagatatgtgttgcaagaacagaggaagcgagaaatggagatgattttaaggaaaatggagagtaaagctttgcttttgatgagtcagaaggaagaagaaatgtcgaaagcattgaacaagaacatggaactcgaagatctgttgagaaaaatggaaatggagaatcagacgtggcagagaatggctcgtgagaacgaagcaattgtgcaaacgctaaacacaacgctcgaacaggttcgcgagagagccgccacgtgttacgacgctggtgaggcagaggtggaggacgaagggtcgttttgcggcggagaaggagacgggaatagtttgccggcgaagaagatgaagatgagtagttgttgctgcaattgtgggtctaacggagtaacgagagttctgtttctgccgtgtaggcatctctgttgctgcatggattgcgaggaagggcttcttctttgtccgatctgtaatacccccaagaaaagcagaatcgaggccctcattttctagggaaaatcctttcttttctctcaccggaaaaatgcttgcctttgtgttccggtgaacggagagtttttactccgggtagatgacgtggcagggtaatttggtaaaaataggggaggaaaggaaagtgagattagggaaaggttagaaatagtaaaaggttatctcaagaagtaaattctgattagggttttcattttccctttttgttttttggttctttttccattcaatggagaaaaaaaaggaacccagctggatttgatgaacataattcatattttccttctatctaatgaattttcggatataaagtttgaatgccattctttctatttcaatgataattaacttcttaggatttttaaacacattagtattaaatatcttaatatacattttcctaatgattatatgtataagaatttcctatattaaacacttcctaataagcaaaaaactagaaacttttgaccgaaagaataataattctaaactaatatgaaatccgatttaaacatatcttttaaaaaatttcatttataaaaaaattaattaaatcaaatttaaacatgtcttttaatttacatagaaagcaaaacaaaaaaagttatattcttttgaacaaaaaaaagaaagcaatgacaaagtaaagaaaaagaaaggaagcattatatattaatgggtttgttttgatgtaggaagatggtgaaaagaggtggtagtagaggccgtagacacgcgtattggaggaagctgtaagtattattgggttgctcaacaatcaatatagtacagtgacatgagagcacaatagtaagtatccacattaaaaaaatagaaattgaaagagaatcagagtttggcctgccataggatttgagttctcgcactttcctaaacagaaacatgtttcattgaacacttgggcctctcttcttccttcattaaggattctagatctctgttaagacagatctgtgctacctaggttttctagatactccctaatac

SEQ ID NO: 29710 - DNA, 768 bp, Arabidopsis thaliana landsberg
aatttgtagatgcttccgactatacctgattacctggccattcagattcggtttggatcaaaaaatttgggttttcggtttagaaatcgaaacaaaccgaattagttgaaacgaaccgaatagaaattcggccaatttggttttgcattggcgtgtaccttgtgactacatgtgtgtgtgttagatgagatctatccacccatttttcaaatcatttttgtcgttaagctatcaagattctgatattttcctgctcacttttgattcccaaaacaaaaaactttcttcaattattctattcatcttctcatggcggctctctccaccaccttctactaccacccactctgcactaaccaccgtacaaagagacaagcctcaagcagacacggagttagatctatgagagtgatgtcttgtcggaagcagaaattaccagaagagaatgaaggagtgatccagagaacattgagaaggatgatttcagaggctgggaagattgggaagaatctgaagccagagaagaagaaaggagacgtcaaggacctgatgcttatgagactctcttttgctcaatatgtttatatccctgaactattggtgtgtgcttacttctcctggcaacatctcagcttccccaaatcttcatggtagtagctaagctagctcctccttgtgaattctgcacagatcagtaataagataagaaattcaattccgacataggagaattgagagttgtgatctctcactttggtcttatataat

SEQ ID NO: 29711 - DNA, 2036 bp, Arabidopsis thaliana landsberg
ctattcccagttggattcttggagatccttccttgcttagtttattttttgccacgaacacctttcaaaattggagagattttttgtttttgggggctataaccacttcagatgggatgcaaccaccagaaaacatatcattattgaacttcaatccttcggccgccaactttaccataatatatacccgtggatctacattgtcatctgaccacgaaacatcttgggctggatcaaggacagcttcgggacggaagataggatcaacgcggtaactatacaattagagaggagaaactacaattagcagataagcctaaaagagttatatgattatcaggtaagacatactttaacagctaataaaacgtttatcaccttgcaattattgtctagatctttggcgttgctaagcttaaacggaaccacctggtgaggatttagatcaacaacctcttcttccgactcataatcgactgtctccttggataaggaccttcttaatagcgggtgtgacttggaaaataacaaattgtagggcgtataatagctcttggacagtcacataagtagttgcaagttgttcaacttctctctctcttgaatcgatttcatcgtcatctcaaaagtcaatcccagaaaaaataaaaattaggaacaccaaagtagaactgaattcagaaacaataaacaaaaattgcatttgattgagatacttacttggacgaattgatcggaaaaccccacacttgaattggagaatcaatttgaacatcggaagaaaaaagaaaaacagagagaaagagacgaaataagactagtactgatagaaaaagcagttgaatgagaaacaaaacaacgcaactcttcggattagcattgttctcttgattaatatgacaactattcccaaaagatttttgtaaatcaaatctttggaagagatatgatatctctcgttctgacacacacctattagtttacatatatgtgtcttaaagtttgataggcatataggggtttatatgtcattattatgatatataaactactcaaacagtgtataatcttgtcagttaattatcaaatcttctatggtcatctattgtagattctcttatttgaatctttatattattacatctacttatatcctaaaatcttaattcaataaaacattcaaagacatcttttttattgtatacatgttgaaaattggcatctaaacatcagtttgattgctactaatttttatttaagtaataattataattcaaatgataaatcaactgagacaattcaaattccaaaaacatagaaaacctaaaacgagcatgcgtgcatatggagctgcttattaactaaataaataaagttggtcatatgtagacgaccgttggtcgccaaccaaaacaaatttggtcaaatgttttacatggatatttggagctagcttgttattttattaaactttgttgttttctaaaatttcttacaattcacgagataaaataataataaaagcatataatagatgaataatgaaaggaagaccacaaatatttgtagatttagaaagatcgcaagttcgcaacataaagcagttaagcaaatgggttttgaagatggaccaagatgtcttatgtctcatccagctcacccttctcataacttgtccgttcgatacagattcaactttcgtatcggttgctttacatgtggtgggaaagcagctgctacgacgccagattgtccctactactactgcaccacctgcgaggtgacgttccacaatggttgccatcaacgtccaagaaggataacacatccttgtcacctccaacatcctcttactctcttctatcgaaaccccgaaaccggagttatatccaacatcatccctgacgcttgtcctggtaaaattgaggatacattaagtccagagaagtatgaattcgtggatatcgccccgtataagtctgatatcatattcaacaaaaggcactgggtgtgcaaaaagatttcaaagggtgatt

SEQ ID NO: 29712 - DNA, 1828 bp, Arabidopsis thaliana landsberg
  unsure (1)..(1828): unsure at all n locations
cgctaagcacggctctattcaataatggtctaagttgtggtgcttgcttcgagataagatgccaaaacgatggaaaatggtgtctccctggctcaattgtcgtcacagccacaaacttttgcccgcctaacaacgcgttaccgaacaacgcaggaggttggtgtaaccctcctcagcaacattttgatctctctcagcccgtatttcaacgcatcgctcaatacagagccggcattgttcccgtcgcttaccgaaggtaaaacctaaaaaacagagctgctctgtttttaccctaaaacagagtatgcgactgaataaaaattgaacatgaaacagagctgctctgtttttcttccaaaacagagtatagtgaattattggaatcttactccgttttcatctttttgttgttgtgtgttaacagagtgccatgcgtgagaagaggaggaataaggtttacgataaacggacactcttacttcaacctagttctgatcactaacgtcggaggagccggagatgttcactcagcgatggttaaaggttcaagaacaggatggcaagcgatgtcaagaaactggggacagaactggcagagtaactcttacctaaacggacaatctctgtcattcaaagtcacaacaagcgatggccaaaccattgctctaacaacgttgctaacgcaggctggtctttcggccagaccttcaccggtgcgcagctacgttaggaagagtgattcggtgaaaattcatctcattgatcgtgtggtattgacgtgttgtagtagaagcagttagagagaggggcatgatagtaatttggtcctttctttcaattgaggtttacctaaaaagaagtggtgcttcgagtgcttgattttgcacgaggccttgatgatgtcatcttttgggaaccttttcttatctttcttcatttttattggtaaggttttatgttatactgatgcagaggtggtattgagttgaagtaccacccgctagtagtagtagtagtctctcgtgtcatttgtatcccttctcgaagcgagagggagagttttagattttattaatctcgttaaagtcatttgtatgttgtaaatttttcaatttctagaagtaagaaatattggagatttgtttgttatatactttgtgtaataaattatattcatataagagatcagaaacaagatcggcatgtttttgtttacttttgttccacgtccggcatatatttagaattcacatgaattgcattgataaagcatatattttcatttgttaagaatttaaacactgtaatagatagttaaatttaactttacgaaagagtttacaaaaagtacttaaagaacgagaaattatcaattgtcaaaactagactaacctatcaaagaattatctcggacaagtagtagttttacttgtattgtatttgcttgcatgtgaagagatatggttatttgatgatcttaactatatggtaggtattatggtgaattatattaagaaatgttttcgtgaaaaatatatattcgtcacacatagtcacatgtatgaaagcctagttgtaaccgcccgcccactcttttcaaaacgtaatagattcgtttggaagttataactatgaagacatcttttttctagactcgacaatattagcaatttattcgtcacccatctgcatgtaaacatattattatttgtcaaaatatatttgtgcatatgaacaaatgtattacataagtcggaaaaataacagtaacgttagaaaaaatataaacgaanaatagatatgtcgcttcattaatatacttttcttt

SEQ ID NO: 29713 - DNA, 2221 bp, Arabidopsis thaliana landsberg
ctttactttttttgtcattgtttggtttttgtaggggtagcttctgattcaggaacacctttaacttgcttgaagatcttgagctacaatgtttggtttcgtgaagaccttgagttgaatctaaggatgagagcgattggtcatcttattcagcttcattctcctcatctcatatgttttcaggtcacttttacattttgctatagaatgatttctatctgcaacatttagaaatagctcagctttcttgacaagtggtttttgtgtggtttgtaggaagtcactcctgagatatatgatattttccgcaagtcgaattggtggaaagcgtattcttgttctgtctcagttgatgtggcagtttcgagaggctactactgcatgctggtaaagattgtgcttgcttggcttaggctcttgccgtctgtatctgaataattccctgtggttcttgtaactgacccttatgtgtaatttgcagttgagcaagttgggagtgaaatctttcagcagcaaaagctttgggaactcgataatgggaagagaactatctatcgcagaagttgaagttccagggagaaagccacttgtttttgcaactagccatcttgagagtccctgtccaggtcctccaaaatgggaccaaatgttcagtcgagaacgcgttgaacaagccaaggaggcaattgagattctcagacctaatgccaatgtgatattcgggggagacatgaactggtgcgacaagctagatgggaagtttcctttgccagacaaatgggtggatgtttgggaggttttgaaaccaggtgatttgggttttacatatgacacaaaagcaaacccaatgttgtccggtaaccgggcattgcagaaacggttagaccggattttgtgtcgtctggatgattacaagcttggtggaatcgagatggttgggaaagaggccattcctggtttatcatatgtaaaagagaagaaagtgaggggtgacattaagaagttagagcttccggtgttgcctagtgatcatttcggtctgcttgtaaccctttcgccaaaatgagatcaaactattcagagctcgaagttagtcttccttagtgaagcttttgtgactaggttaaaaaactgtatgaaacaccaaatttggtgcgtagggtttctctgtttcgaactgatgataaacagttcttggtttaagttttttttgttttttggtttgggaacggccttatttcctgattcgaactgaaagatcagtcttattgttcaacaatgcccccaccttttgtaatgaagattctgaaactaatcacatattaatatgatcgttaaaaaccagagagattttggtatcagagggttttgcatcaaacaaccttattcattgatattaactgaaaaaacttgtttaatgtacagaacatattcttaacaaaatgctacatcaattgtatctgtctcaacaatgaagagtttgaagctaaagttctaaaatgagaaaatggtgaaagaagattcttgaagtataccaaagccacaaaccctgttcttctgtttgggtatattcacatgttcttcacggtatggtaacatgaaatcaattgaagagttgctcggttatctgactagatccattggataacacccgaggatacggatgaaacttgcgaattcctgcaaaaccagaaggtaaggatctttagaattggtgagccttaagaccagctataaaagctctggggttacaagattgagacctgtagatggccaagagcgtgctgagcacgtgtatcagccatggaggcttcaaaatcaatgtagaataagtaatcaaagtacctgtcatcatcacaaaacaatcactcaactactttgtcaaaaaagatgtctgcatgttgtgtgttagaaatctacttacttagcgcttccattgttagaaccatcaactactcttaacggtcttcttctctgcggacgactttctatctaaagaagagcaaaagttacgtcatatatttctatttttggaatgaattactgataataggatccaacttttccttggaacttaccttagataagttaatgcttcgtaaagcaaaaacagccaaggccttgaacagcacaccaggaccttcttctagcgagaacacgacccttgtcccagagaaacagaagcattactataaaagttgaacttcaagtatcagccgaa

SEQ ID NO: 29714 - DNA, 1167 bp, Arabidopsis thaliana landsberg
acatgtgattggtcatttcagtaattgacattttaaatttttataaaatctctacattaagatacttataaaaagcaaataactaaataaataaataataaatgaaacaataagaatgtaaacttgtttaaaaataatgtaaaaaacatatcgaaagaagaaagttgtaaataaaatatattcacattgcagagcttcccagtcaaacaaatcacaaataaaacgttacattatttagtcaaaaacggttgcttttttcctcaatagaaaactccctcacgcgcccaattttttaattttaccaaaaacagccattttttgtaggggttagtccacagattttgaggggtggcgtcgacgcgctaattgtgcgagtgggtaagaatttgaatttcgcagttatgttttgggctgatttttatactgcccactgggctacacaagaggaaacccagtttcatataataataggcccacctaatagaaaaagcccttcgtaaaagaaaacatagtggaccataataatttcatttgtacaagaaattttgaaaatgtcatattttcgggaacctgtaaaataaccacaattgcaacaccgggatctactacagtacaagatttgctctaatccatcctaattaattactggtagtagaacctgtataatattattacagattctaatcagctctggtagaaagacagtgtaagtaagtatctaagaaggcttctctgtacaaggaattctctcagggatgtgttctcatgaacatagccactgaagatgaacggggctgccacattagataggatcaaagtcgtaaatggccaattcattaattatggacgtgtacatgtaaaatcgtttttcaacttcgccagctatccaaatcaaaatttctttacttgccaaactacgaagctgtggtggaggccatattacgcttttaaattagcctacaatagccttgcaggaaaaccattgcaaaaccgattcaatattttgaggtacacgaaacgttcattcagaataatcatcctcattaccatcactatattgattggcatcttgttccggctcgtgtttacaagatctaccaaggccgccttcgtcctctaatcttctcatcttggagctcgaagcaccaccctagaagagtaacctac

SEQ ID NO: 29715 - DNA, 5090 bp, Arabidopsis thaliana landsberg
tgaaatgttcgatatatataacccttgttctaggaggaaggccataaacatgtaattgttagtctttttccatttaagctaagcatctctatcaacattaggcagtactcctgagatcggagggtttcttttgaacaagtttgtgaaaaagcttacttgcgggagtagtcatcgaacatcattctcagtttatgggatgtcatccggtgattacaaatgtccaccaaagctcgataaagttcaggattgagaggatacagttgcagtccctctgatatgggcttccaaagttgtgacaaagttagatcgtcctggtgtctctgaagcattctcacataataattgaacaagagttcaagttgatgactttgactttttcttcctgaaaaattcacaatagcccaaattcagatatacagtggatacatgcttttaagagaaattcatatggaaaatagtaagtgaacccaagaatactgatcatggaaataagtaaataacctggaagaacagaactgaacatgtgctctaagatctcaagagcaccaggaaggtcatttgttaactcctcaaatagagctgccgaacaaacaagcgctgctgattgatcatctgtgacaccatgagaccatgttgattgtatcttcttaagcttctctctgaacccctggcgtgctctaagaatttgcatgcttgaagactgggaagtataaggactataagctagaccacttcccaggtagcacagaatatgcatagcacgagatgatgattctgtatccctaccactgccgctactattggctacttccgattcagcataccataaacatagcaaaggagtgttacactgtaattcctgcaatcataggtgaaataaatttagcatggcttttgcaatgtcataaaaatccaaagaaagcacggaaattgggctagatatatccactaggccatgcttccctgtacattaccaagaagagactgttctataacaaactctactatgatccgtccatgagagagattatcttgtccaaactcaagtggcagtgccccagtttttgggaccagtaagcgataatttgaatcagaaataaacacaaaaccagggttactgatccagaagttccttggaattagaaacatacgtggaaacctgaaattttgtatcatatgctaacaagtaacaatataaccgaaagatctgaaactaaccttagggaggccacagatagaagtcagtgccatgtcgaatactcgttttgcatgtttcatatttccagaagcagcttctctctgtgcataaactccacaaagtagtagatcctgtttagagaacgaatcagttcagataaactgaacaaaaaaacacatcaaaaaattggaatggggcttacctgccggtcacttttcaggagacgtttggccaaagcttggcatggcatagttgctacctcacatgttttcatatttgttacaaatagttcttctgcaacaagcacagcttcttcgagaatgtaatttcgcgggaaaacatttagacaaagcaagatggcattgcggagaaacttcatcatctcagtccgcatagataagtcacagctgccacctagaagagatcccaagctgaaacagttggcactatctgatttcgacaaacattcatgaacacttctcaagttttctaacatggaatctgacaatgtttcaaggctacttattttctcactccacgacaaactgttgctggaagtccatggggagatatgtgcaccgaagaaatcaatgaactggtataccagagataagcgggcctcctttgaacgtaaggaaaatagatatccatttatatcttcatatagtacaacacttgagagttgctcttcatcttctccctcacccattccctcaacactggagaattcacctattaaaggatgatggacggttaaccacatgcatgtttacagtcttttagatagattacatgtcaacaataccatcaaacatatctatagagactggaatttatttactaatgactctggaatgacaaagaaggctgagcgactagtcccagttggacaaaattcacccaacagacacatttagacctttgtaagctccaaaagaaaagatgaacaaacaatacagagataatgatggtaaagatagagatagataccagctttccgagtaggcatccattgactgtgatctcgagaaacctcttcttcaaaccatttaacccaagttgatgtatctttaacctcatcactggccgcagtattgacatcaatgcccaataatttcagcatagcttcagtgtcatcttcaggtttgctattctcgtcttccatttcctcatccagacccttccgatcaacatcgacctctccagtgttagctgaagcaatatcatctccatttctacctgagacctgttctgtccaacctgtccaaccacctacttcattgtcatcagaggattcttctttcaaaattttctgcctgttttcctcctctttctccagccacaataaccatccaaaagctccttcttctccaactctagcaccattactgctccaaaagtgctcaaacagtcgtaatttactctgttcagttagcaacaaagatggagaaaagatgctaaattccacttcggcttgaagtaacgctgtggccagctcctggtaaccagcctgccactcaaacctgcagaggctaactagcatatcgactagaacgagttcctgttggatggcagcagaatccaatggttcagatgttgtatccacctgcataatccaataaatagaattagaccttacaatgtcaaactgctattaatgagaatatcaataatgccagcgattaaagatagtggggaaacaccaaacgacttgtgacagtaaacagtacgtaatgaagtgattcatcaacccttatcagttagcaccataaaataagaacctgcctatgtcgcttgctgcaagcagaagaaagagcctggatcgcataagaatacagcctcctcacttctgatactttgaatctggagaactccccttgaacaacacataaaaactccctccataatttgtagcttgcggaattctgcataagtgccttttcccacctactgattagtacatcagcgttgtctctgcttcggtatgccttgagcagagcaagcaacagttcttcgctatctgggttcagctcaaaagccttctcaagtatactaatctttttctctaaagtctgcaggcgaactcctttctgagattgcatacttgaaaccttgtcttgaaaatcagcaaatgccagccatgcctttgcatcatggggacgttctctcgtcactctgttgaactcccgtgttttattcagcacttcatcctcccatgatgctccaatcattgagtcctttgataaaacatcttcttcgtcactttctggaacagtcacgtcttcctccagtggaatgaaattatcaaaggaagaatccacagcttcacttgaagcagataaacgaatacgcttgaaattcttgttgcgttccatggcagcatgttttgcataccagtatcgggtatcagactttgctctcccctccaaagaatcaatatcaatctctgtgtcaagcatagaactacgtcgattccgcaaataaaacctcagagaacctgaccctggaactctctgagaattgtcaagtttataacgaggaacattcatcctgtattatgcaaacagaagcaaaatttcaatatccctacactcttaaaacgccttgcacagaatacagaaaatgaaaccaaccataactagacaaattataagcaaagtacctgtaaatagagccataagccagattatctggatcaggacgagtgtccaagtaataatccttcacaggtttcgaatagtattcatcagatttacgagaacgagattcatccgaagcattatcactcttccgtttcttctttttctctcgcttcctctttaccttgtcgtcatcagactccaaagacccttcttcttcaaccaaattataaaccctagcctgattagctaaaccgatatttccatcagctcctccttcttcatcttcgtcgtctccagcctcgacctcggatgaggaaggagccgtcgaagcggcagcgttgatgacagagagatccgtagtgaagctagcgttgcgaagccattgaggagcattcgaaatagctgagatggagttcgccgaagtagggaagacggggaacaagccgcctgtagttacctgtgctccgtcgccgtcttctggtgtattcgacattacatccaccggaaaaaacaaaaccgattatgtatttttttttgtgccgctatatatttctgccaaggatcgtgaatactgaataggcctaattattgggcctatataaataattaatgggctctattaacagtgaaagaatttactcattgtttaatgttcaacaacattcgaatttgaattcgaaactacataaccggtaaaatatttattgattaattattacgccatatttaattttactcgttaattcgttatgaaaaagtacagcaaaaagtataaaaaccacgtgcaatattgtaaagaataaactaaaatttgtgataaatttaggacagtgtaataaaaattggcaaaagtgtcattttgcttttttatttcccaccaaaactaatgattttccatggatccaaaggtaaacacattttggagaaggtaaacacatttgttttggagaattctttcaggcgtcgattcggctccttacccatggataatttggtatatatggaaagcaagaaatgaaaaaggttttgaaaatgtggataaagatccaatggaaatattgctcttagcggtaaaagaggctcaatcgtggcaggaagctcaagtcgagctccatagtgaaagtcatggttctttgtctatagataatcgaatttgggtcaggccatgtatcacaagatacaactttttctgaacatacggtgttttattgatggatcttggaaagcaagtgaccagttctcgggagcag

SEQ ID NO: 29716 - DNA, 1950 bp, Arabidopsis thaliana landsberg
ctttcctgagattcttacatacacattggtgaatttcgttttgttagcagtggagtctctttcttgtctcctcaggaaaggacccacatacacttgcttgtcattgagcaacatgccgttcagtttctctatagctttctgggcagattcttcattggcgtattgcacaaacccatagccttttgactggcctgaagaatcgacagctaccttgcacgacacaatgtttccaaacgatgaaaaagtatcatgcagtgctttgtggtcgatggactcgtccaaattctgcatattatagccaggtttagcatcagaaagagagaaagaacacccaataaaaaaacgtacataactaaagaaatcaactacttttgccagacttttcaatgaataatacaagatacaaattttttcgcaacaatcatctcgtcttacagcaactcaaatgtcagaaggatagagacaagcgtaccttgataaaaatgttgccagcgccacttcggcgaacactaggatcacgatgagaatacataaccctaataggttttccataaagaggtatgtaattcagttcttggatcgctcttgcagctgcaacaaagacacgagataaagtaccattagaagacagaagtagcattaaaaagattgattaagcaggggataagctttccaacagcaccaaccacattgcatacatacaaacaccataaagtatcaacatttaaaacacacctcattcaaatccagtactggtactatcgagcaaaccctaaaaattggaaattgtaagaagaagtccaaataaaattaaggagactaaccgtcttggggattggtgaagttaacgtatccatagccaagagatcggcgagtgaccaaatccctacagacacgaacggtgaccacagtacccatttggccaaacgcatcgaaaagctgcgagtccgtcacattgaaatcgagatcccccacataaagcgacgtgttaccaaacttgggtcgccgttgctccacctgacgtcgccggagcagaagtgaccgccgcggtcgaaccattcggagtctgaccctgaagttgaacctgcgccattatctttttttggattttcgaaacttttttgactttttttggggttttagttactcttccctcccctctcgttattagactgaaaccaaatcgaaaaccctagaatttgaaagaagaaaaagaaatcgaatcgaatgacaaaatcaacaaaactaaagccaaagtttttatcttttcgttttttttgtgtttttatgggtatatcagaggagagggaagatgaaatagggtaagaaattgccggcggcgaagcctgcgacggcgagtgagatatttgggggccgagagattctaggcgaaacaagcacaattacgatagatgaaaaagaagcattacggtttctccttttctttgcttttatattattaacccaacaaaaaaaagaaacctttaattcccctagaagaaccctaggagtgtgagattgatctcagccgttggatcgagtctgaagtaaatcgtaggattgattttagagttgctggtgaattgataaggtcgtcttccttctcgtcactttcggaaaagtcaaacagatacgcgcgtgtttggcactttcgaatctaattagtaaccaagtttgttaaaattttgtacagtgatgatattttctttgatttatcttaacatttcttaactctgattagcaatattctcactggatcttgatgaattttgattttcctaaagtaaaagttgttaatattaatatttaccgcacgattttatatggtatgcaaaaagtatcttaattaaataaccaatatgttaagatttgacttatcaaaacaattcaacttaatacacgattggccttccagtagaattgtgacacgaaagaacataagatgagaga

SEQ ID NO: 29717 - DNA, 4076 bp, Arabidopsis thaliana landsberg
attgatgtgaacggatctatcaatattaaagcaattatagcaaacctaaaaataatcctgatatttattgtaacaattaattgcatgttctcttggtagcagtttaacgggggaaaacgaagagaagaagcaaaaacaaaagcaatcacaaagaaacaaagaagggcagggattttctggttcaggttctattacatgataacgtaagcaagggacccaaaagtatattctcacactttggtaggcggtgtcttgtcttttggtctcccccgtcgcgagtaagtactacacttaatattggagtataaaaattaatgttttggcaaattatgatcattaagacacattggagcactaattaaacgttaagtcgttaaccaattcaattttgtcatgttatattgaaagttgaaaacccgtctttctccaaaaacattcattcatttagtcatcgggtggtgcacgtgagacccacgggtaaggtgactggggacaattacatttttttgtctacgactgtggacaattacattatacgtaacagtttttgtaaaagaaacggaattattatggggaaattgattaaagtttttgtccaaacgtcctaacacgagtgtccaaatgtgttgatttatttttggtattagtataagattggaatctaatatgtattaattaattagttagtattattgtaatcaaagttgttgatttatattatttgtaagaatcaaatcatttgttcgtggagagccagcaaaaagtatacacgtgtgacataatgcacgtcaaggccaaaaaatgtactctgcatgcaggcataacttgcgtcttgcaatatgaattctcaataattttgatacaaaaagatttctttttaatttcattttcaaaacattatcaacaccaacgtaccatcatcgtgtttgtgctatgattccaatttttgctctcttatgacgaacaaagacgtttcgactgtcactagacaaatgacaaacccgtagaaatttgtatattattaattactttataagtttagtattaaattaattggaaagataatatatatagtcctatagatactaaacaaataatttaaacaaaatatcgttaatgtaaatattataagttagacaaattgattgaaacatgtatttacctaaacgctcatcaaaagcttaaacgaatacgacatgtaactgctattttgatatatgtctccattctatatggaacatcgatgtttgacctttctattgactactgtacatgttgatataccatggatcacgaatattcaagtaacatttagtcaattcttaatgtgtgcaaactgcaaagcctagcataatatacagataataaatttacgtaagaaaaaaagttaaagaacaatacaatgcatggtcgtctaagtaaaaatttatgttgaaatttctttacttctactcgtcattagttgaagagaaaaccttttttggtgatctaactcacatatgtacattaacctatttaaatccggttaataagatgatagcgaaactttatacaagttgtggatctctagactattatcttcgaaaattatatattttaaatgcatatatcaatgtgtgtttatacctatatgaatcatgcatgtcattcatattcaaagtttggtctcggtgggtttcgttagttatatactgattatggaaagcaagtgccgattcgtggatgaaggagtttcgtcttgtggtgaacgtggcaaagtaaaataaattgaaagtcttatcaagttttggtggacgaataaaattggaaggaaattgattgattgcaatggcaataacatcggtaactagcggacaagagagttcacatggaagctctgtaaacaatcaataatggtgtgtgttggttccaactagtatatcgatcattgattgcgaaaagacatcaaacacagacaatatttaacgaacttaactaacaaaagtgaggctgttaaaaattaacttagttcttgcggcatatcaattattcaatatcattttcatgtactgttttggataaattttatatttttagtgtgtgatacttttgattggaaagtgtcacgcaattataagatgtagcacattttttacttaacggtaatcaaattggattggccaaccaagtgattggtcgctttttcaacctaggtctgcaaaaataatcttgattagacgcattttctcattggctactttgtaaattcacatatgtcttcaggatttgaaaaataatagtttcgtatattagagtctccaaatgctccaaagaaaactctagacctaattttagtttggtggactcagcacgaacctagctagactatcaagttaagggtaaaacataatttttaagacatgacaacttcgtgagtcgtggcaagttatgttccaatcaagttgaatcacatcttatggacttttcgtgcattagtgtaccagggtaatgtgttgtcgcaactctattaatcgtcggatttttttttttcgtagatgtagttgggctcagcccatactgatttaaaagtcccattcttcaaattgcttttgaaggaaaacaagaagaaaaaaacttatcgttaggtatatgccaaggttagtttttgtggcgatcgtaaaagaagtcacctgaatctaaagaagcagacgatgaatgacgaacttggctttacacaattaagaggagcgaaagaaatcgccaagcaaacaaaataatgctattttcacgaacctaactaagaaatgtgaggctattaaaaagtgtttcatatatatgcgatcgacatctactagccgtaaaatgtcggtttcatatcatttatcaagctaatgagtaatgttaagtcctatcaatttggctcacacagttgcggacttttcatgtgaagcttagctaatgctaatttgttgcaatactttttttttgtcgacaagaatttgttgtgtatatagaaggatatacacgtatcactcgtaacgcatgttttcaataaaactcaaaacaaattagtgatctaaaaacacggcaatttgatgacataaactattacacgtcacttgtaacgtatcattctcttcattccgttttttaaaaggatagacatatttatacacgtcaaaaaacataatgttgtatctgaacttgaaactgaacttagtagaaatagaattttcgtataaaaggtcttattgtatttgtgaacaagctaattaatagacatagaaaaaatttagtggagaattgtattagtttataaatatttgtgaacaagctaaataatagacatagactccaattgatatttatcattacaatctaaaactctgaatttttttaaactaatacagttctccacaaaaaatatattttgattttgagtatgaagatttaccaaaaatttcagtttttgcccaacttgccaacctgaaatttaggtttataaatataaatattagaaaggaccccatgaaattaggtttatatgagaacatattttaggaatattcgagttttggatttatcattttgaaatttataattatctttaacaaaaaattgataattatctaacccttttttttttcccaataattcttaaccatttttgttattctgtattaaataaatattgactattaatcattgtttcgacttttctagtatgcaaaattttagtttctgacaaaaaaaaaaagactgaaaaaaacaaaaacccaactttaaaattgtggaagtccaatttgctgaagaaggtgaagaggtgagggctcttcacagccattcaatctcataagacatattgccggagaaactctctcggggggtcgcttcttctgcattttctgcttcccaatggcttccagaattgctgattctctcttcgccttcacggtattcctttttcaaattccttatcccaaaaaaggcttcatttttccaactcttgtctattgcccatctctgctacttggatgagtttcccataatgaatttgtttctttgctattggtttctcagggcccacagcaatgtct

SEQ ID NO: 29718 - DNA, 1066 bp, Arabidopsis thaliana landsberg
gtcatctggtcagctattgtatgttcgcattttcctctctgtatctcataatagatctcttcccaagagattaaatatttgagttgcactattaactatattgtaagctgagggtagaaattgaagtcatctaaaaggttattgaatatccactgttgttacatgactagactttccagtcagctatgacgatgctctatttgttgtttagaatgctcagagagttgatctttctttaggaaagatttcctaaaataacaagctatttcatgactgaaatagttacttcggcaactgttagtccctgatcatacttattcccattcttttggtattttccagaatctgccccatgatgcctacaaactacttgcagtaccatctgcgatcggaggtgttcttgtgttgtgtgcaaatacaatccattatcatagtcaggtagttttatattacttagcttttggttgtttcttgtttaaaattcaacaattccagccactccacctcaaagttctacagttactcacacatctggataccatatatatttgtagtcagcctcctgtgctctggcactgaacaattatgcctcctcagctgatagcaggtacagttttctcgcacctccccactcttcaaaacctgcttcatgcttatggatataatcttgttacctcagtcttagtttagaatcctaaagcttagaatcaactttcaacatttgtaaaactctgtttatactgttaaccacatttctatctctgtgtgcgtctgatttctttcagtcaagaactgcctgcatcaaatttcagtgtggagcttgatgctgcccatggaacctgcatatcgaacgatgtggccctattgtcaacaaaatctggggaattgctgctgctgactcttatatatgatgggcggtagtattttgatccttctttaaaaaaaaatcttctgacgcttgtaaagctggctgcaacttattttgtttaaaatatgtgaaactgactgctactttcttttttgaagtgctgtacagagacttgatcttttcaaataaaaagcctct

SEQ ID NO: 29719 - DNA, 2574 bp, Arabidopsis thaliana landsberg
ttctcttaggtcaatacattcttttgtttaattctgaccaattttaattaaatatgttgtttaataaaaatgtaggatattgagagtcgtactataataaaaaaataaaaaaatctcgaactttgatagtataagagatatacgattaaatcttgaacttaatatcctatatttttctcaaactatacttagtttgtatttatacttgtatatattagagtccacacaaagaaaaatggataacaaataatgacatcaatattttgggaacccccaccatgccaaacccaactccatgttacaaaacaaaacaaataaaatttctttataaaatggcatcttctcttcatattttttaaatctctcatctcaataaacaaacactaacaatggtggtcgaagaagattcacgtctcataaatctccaacacaagtacaacccgacaatgcccgaggtactaaattaaatctaaaacttctattcttagtaaacttcttcctcagatagagtctttcaaatatctcctctcttataattattatttttttatttaaaatatttaaaaaggtggtggaggagctgaagagaatttgggacataagttttccggtggccgccatgagcatattaaactacctaaagaacatgacatccgtcgtgtgtatgggacgactcggtagccttgagctcgcaggaggagccttagccatcggtttcaccaacatcaccggttactccgtcctctctggtttagccaccggtatggaaccattatgtggtcaagccatcggttctaaaaacccttctctcgcttccttaaccctcaagcgaaccatcttcctccttctcttagcttctcttcccatatcactcctctggctaaacctcgcgcctctaatgctgatcgtccgccaacaacatgatatcactcgtgtcgcatctctctattgttccttctctttgcctgatcttctcgctaatagtttccttcatcctttacgtatttacttacgttgtaaaggcaccacttggcctttgatgtggtgcacgttagtctccgtccttcttcatcttcccattactgctttcttcacgttttacatctctctcggagttcccggagtcgccgtctcttcttttcttaccaacttcatctctttgtcgcttctcctttgctacatctacttggaaaacaacaacaacgacaaaaccacttccaagtctctttgtcttgatacgccgttgatgctgtatggttcgagagactccggtgaaaatgatgtgtggtcaacgctggttaaattcgctgttccaagctgtatagcggtttgcttggagtggtggtggtacgagttcatgacggtcctcgctggatatctccccgagccgaaggtggcgctagcagcagccgccatcgtgatacaaacaacctcattgatgtatacaatcccaacggccctctcggccgcggtatccacgagggtaagcaacgagttaggagcaggacggccagagaaagcaaaaacagcggcgactgtggctgtcggagccgccgtggcagtgtcagtgtttggacttgtggggaccaccgtggggagagaagcttggggaaaagttttcaccgccgacaaagttgtcctcgagctgacggcggcggttcttccggtgattggagcttgtgagcttgccaactgtcctcagaccattagctgtggaatcttacgtggcagtgcgaggccaggtataggggccaagattaatttctacgccttctatgtagttggagcaccagtggcggttgttttagcgtttgtgtggggtttaggcttcatgggcctatgctatggcttgcttggggcacagctagcttgtgcaatctccattttgaccgttgtttataacacagattggaacaaagagtccttgaaggctcatgacttggtgggcaagaacgtcatttcacctaatgtcgatcaaattattgtcaaatgcgaagaaggcctacactaacagtttttccttctcttttctttttgttcttcatatatactatctccatttatgtctcaatgatttgcttttgttttaaaacttatacatttatgtaagtgtcttcattggacaaggacagaatgtaaaactttatgaaacacaaaactgttgaagattttgcattattgaagggagtggaatcgtggattggatgatgaagacttatatggatgcgatggctaatgaccatgacgtgtaatatatattgggtgcatgagtgtatatagagataccgaaccacatggaaaaacaagagctaattggccggaacacatgtgcaagcatgtgcatgtgtacccatacaaaataggcatcatattagtgtccttgtggcttctcgcttcttttctcccaccttaattatctttcacaacaactaaaagctttaaagctcatactttcagaaacctttaaatggaaatatatgattctcattttcattcaattgaatccaaactaatgtttacatgttggcagtggaataagcagttagtatgtttaatgaggtttaaaatgaaaga

SEQ ID NO: 29720 - DNA, 2253 bp, Arabidopsis thaliana landsberg
ccatgatttggatttgacattaccctcagataagctgattgctgagggtaagactgcaaacattttttccatttttatcaccacaaacagatgaatttaacgagaggggattttctttttctggttccgtgcagaagaagaggaggaaatcgaaatgctcttggagaactatctgcaaaggtcttgacttttgctcttgaagcactctgatatgtttcattgttatgtagtgaaactctatggcttcgtatgtgcagatgtgagtcatgccatggacaagcagaaagacttctggattctgcaaaggaaatggaagactcaattgctgtcaatctaaggtactgaagataacaaaatactcctttctcttaaattcttaggcactcttaccatggtccattgtttgtttccagttctcggaggcttgaggtcagcaggttcgagttgcttcttcaggtcggtacattttgtgttgcagttggtgctctcatcgcaggtatattcacaaacttttgatgatttgtatgcgctttctctgaaacctttgaactatagtagagcctttgcatttaaactaccaactaccaagattgaacggagtgtccacattctccattacatatgtgctatttgaatttgactacaaagaaccatttccctatgaacatgatctcaaagccaacaaatcctttttttcccctgttcattgtaaatggcttataccttttgttttgggtacctgcaggtatattcggcatgaacttgaggtcctatcttgaagaacaagctgtaagtcctcatcaagcaaccacatatttacaactattgtgccatcattttaccattaacatctcgggttttgcagtctgcattctggctaacaacgggtggaatcatcataggcgctgcagtcgccttctttctcatgtattcctatctcagtagacgcaaaatcttttgaaccttcaatcctaaaagacgaaagaagaggtaaacctgtttcttcttcttcccatttccatatcccctttaaatttgataaagagcgctcaaaatatacgtaaatattacaggtttaaaatccgtgaagaaagtgaatttcattcatcacagttacattatggcattaggcccctactagtagttagagcgaggtgagttcatcaaatgtctgataaatatttattgttgtggtctccattgaaccccagtgacttgtgtgctatgtcctcattgcttggtaatgttgtaagatcaatgtatcatttaataaactggttcgaaagcaaatgaaaattcaaatatagggtttatcaaaactgttttcgagagtaaagggataaaaaacaatacagtatctaaatcttcgattcccagagaagaaattcaaagacaaatacaaaactttttcaggcatttatatttgtttcttaagtacgaagatcacgagctgattgacgaccttctcttgctgaggtctttctttccgagccatcaatggcgatatttccaacacctgcctccatggcttccctctcaaccttttccttatctttatcctcatccgacgcttcctcttcttcttctttgggattttgtggactcgatgacggtttcagtgatttaaggaccggattcaaccatgggtgcgttaggcactgagcagccgtcggtctcttctcaggtacaaattgaagaatgggagtgatgaaatcttgcatagcaattgcgtcttcctcgctgaagtcatatttatctgttaagaccttgctaagtggccaaaaccgtaaccgcctgatgtgccgtagttcaccctgtcggttgaagaaatcccgcgaatggcgtccacctaatgcaatctacatttaacaaaatccctttaaaaagctctattcttgatattgataaataagagaacactgtgtttttggatttacctttcgtggcatcatcccgagaagctccatcatcaatgccaagtgatcctgaaaccaaagtccattagtgttacaattgagtacaaacgacatgaaacgattttattttttcacaaagtatgagaaatcacataagagatatatacctcatctcgctcaaagttttcaccactgtgaggatcgaatagaacatctccggtggcaagctcaaaacaaatgcaagcaaatgaccacatatccgctgaggttgagtattttgagccaagaacaacctcaggacaccggtactgtcttgtctgaatatcactcgttaact

SEQ ID NO: 29721 - DNA, 1077 bp, Arabidopsis thaliana landsberg
  unsure (1)..(1077): unsure at all n locations
attttctgattggttaaaccaattatttgccaaaattgtctcataaggaggtttgtaacaaaagaaacacttagggacaaaaaaaaatagatttctaaataaatctagtgagtacttttcgtgaacttttcacttttcaccgatttgtaannnnnnnnnnnnnnnnnnnnnnnnnnnnnnnattgttattgaatatactttcttcccttccaagtaaagatgtggtagtcacaagtgtcttgtcaaaacgatggcgatctctttggaaggaggggaaaacattaaggtatgatggtgaatccataggtagaacttactgaaagtttgtgcaatttattagcaaaagaccaagcgttgagaccatgcagctcaagatgactcctccttgtccaagtagagacatcaaacctttgattaacatcgcagttgctcgatctttgagagagctaaaaatcgagatggtttttaattccttcgatttgcctaatagcttttacatgttttcacaacttgatactgataactttagagaaactaagtttgatggatcctccacctgatgttcatttgccttgcctcaaacgtctccaccttttatcggtcaagttctcgggggacgaatctgtgaaattttttttaagcatatgccccattcttgaagagttggtagtgaaacgaagctcccttaccaatgttatgatatttactatcgatgtgcctacgctgaggatattatctatcgataatacttctgggaaatctcggcctaaaggtgttcatggatttgtgataaataccccttctttgaggtgctttagcattagggacaacttcagcaactattacagtttgaaaacatgcccgaactagtcaaagcgagtgtcaatgttgtttttgacaacccttacaagtttctagcacctcttggctcaacccaatatctttctctgtgctctgtcacttcacatgtttttaataattgtttgtcaaatatctaacatgttttagtgcatggtgtcactgtaatcatactctttgtgtttgcttgaattgcagctacatatcgtntgcggtgtt

SEQ ID NO: 29722 - DNA, 1973 bp, Arabidopsis thaliana landsberg
  unsure (1)..(1973): unsure at all n locations
gaacagaagaatgtggaatctgagaggaagcatgatgaggttacagaaacatatgtatgcagatggaacaaaatggggatattatcctggtatagaaccgagtttgtcgttttcggattttatggattcgttttttagaaaggagaaatgttctatgagagtgtttatggtgtggaattcacctggttggatgtttagtgttagacatcaaagagggcttgagagcttactgtctcagcatcgagatgcttgtgttgtggttttctcagagactgttgagcttgatttcttcaggaacagctttgtgaaagataggttagtgagtaacacataatgctgtctcttaactcctccatttagtaatggtttggttgattcttttctctatgttgcagttataaagttgctgtggcaatgcccaaccttgatgagttgctgcaggatactcctactcatgtatttgcttctgtatggtttgattggagaaaaactaagttctatcctactcactacagtgaactcgttcggcttgccgccctttataagtaaatcttgatcactctctaatcaactaattgatcacttttgttacttgtgaaatgaagcatgattgcgtattgatgcagatatggcggggtttacctcgattctgatgtgatagttttgggttcattatcgtctttgagaaatactattggcatggaggatcaggtagccggtgaatcactgaacggtgctgttatgtcattcgaaaagaaaaggttcataaacacaaaccaatgctttgctacattcaaaacatcgattcccatcttagtaaccgacaatgtttctgtctgatgtttcaacttttaacctctctctgcagcccattcttacttgaatgcttgaacgagtactacttaacttacgatgataagtgtttgcgatgcaacggagcagatctcttgacccgagtagctaaacggtttttaaacgggaagaatcggcgtatgaatcaacaggagctgaacattcgaccgtcctctgttttcttcccaatcaactcacaacagatcacaaagtaaagctctctttatgactttgctcaaagacttcatctttttgcaaagcttttaactttgatcctgttttgattttggtgaagcagctattttgcataccctgcaatagaagatgagagatcgcagcaagacgaatcgttcaagaagatactcaatgagtccttaacgttccatttctggaacagcgtaacttcctcactgatccctgaacctgagagccttgtggctaagttccttgatcatagttgtatcagatgctccgatgtattataaaactatttttttgataaaatcatttatatataaagattacatttttgcaactctgtctcacactcaagaggacgagccattaaagctccaatgttatctcttcttcttcctaagtcgaatcgattccttcttagaacttttgagatgcccaattctctctgttctcttttcttcttcagattgatctcttccgatcatgaatccagtgatttgtctcttccttcttctccatcatcgtcaccttctcaatgtctcgttaaatcggtctgttcattggtttgtacttcctatcttcgtcaaaaccatgtcgtatcatccccacaccgagtcaatctcgacttcgatgctaattctcttacccacgagcaagcgatcactgtggtggcttcactcgcgagcgnnnnnnnnnnnnnnnnnnnnnngtgcttcttctattgggcagtgggtttcgaaaagttccgacatttcatgagattgtatctcgtaaccgctgattctttgcttgctaatgggaatttgcagaaagctcacgaggttatgcgatgcatgcttagaaatttctcggagattgggagattgaatgaggctgttggtatggttatggatatgcagactttagagcacaagactcgagca

SEQ ID NO: 29723 - DNA, 2232 bp, Arabidopsis thaliana landsberg
ctgtttctcaacggctacattctgggggggatctcttttttaatccaacgatccagatctctcctcatcgcctatataaaactcacttctcttacatcaaacaacaacacgcttggttaaactccatcagtactttaaccatcacttcaaagttcaaactctttccaaatttgttttttttgtttgatccaaattttaacaaaattatggatcgcaatttcctcctaacagttacattgatctgcattgtcgtcgccggtgtcggtggccaatctcctatctcttctccgaccaaatctcccaccactccttctgctccaactacttcccctactaaatcccccgccgttacttctcccactacagctccggcaaaaagtccaactgcttcggcttcttcaccggttgagtcaccgaaatctccggctcctgttagcgagtcgtctccaccaccgacacctgttccagagagctctcctccggttcctgcaccaaaggtttcttctccagtgagctctccaccggttccagcaccagtagctgattctcctccagctccggtagccgctccggttgctgatgtaccggctcctgctccaagcaagcataagaagactacaaagaaatcgaaaaagcatcaagctgcacctgctccggctccggaacttctcggtccacctgcaccaccgactgaatctcccggacctaactccgacgctttttctcccggtccttccgccgacgatcaggtacattagctttatatcaacaatgttgatatttatctaccgtcacaagttcgagtatcaatgttaaaaataaccaatgagacatttaataacagtgaacatatattttcaatttttcttatattgattttgtaattacatatttgattaactaacatgaaaatatggaatttaatgcagagcggagcagagagcacaagggtgttgaggaatgtagcggtgggagcggttgcaaccgcatgggccgttctcgttatggcattctaaattatttatcatttcacctctgatattttttagtttttatatttttgaccctaccattgtctctttctttacgaatttggtaatgagtattatttaattgattatacagtttgttttcttttattttatttatatggaaataataagaattcatatctgtcagtgatgaaaatactgttttacacattgatagttcttttcttttgcagacaatagtcctttagtgatgggtccgagttctttattgaaaatgacacattcaattttaatgcagaattatggacatttactctaaaataaaatgtttgtgtaagtaacgtctatgtaacaaaaagcaaagcagttacataatttgttttagtcttttaaatgtttaaagtgttagtaaatcaaatgttgatatttacgtttgaaaccaattacatgtgtttctttaaacaaatatttacaattggagtataattatgcgagaatgaaagtgtcagctacttagttggatcttagtcttttataatgtgaagttggtaaatatttattgaattcatatctgatacccaactcaagtggccaagtggctataaatgaattgtctaaaattaattactaaacatgtatagatccacccaatcatataatacaatgttttttattgtacttttcaaatagctagattcatatttttgtcttgttccttagagaactagatttgaaaaagaaataagttaatggatatctaatatggtaggcaaaaagaaagtgggaatagaggacaagtcatattccccatgcttttattaaaagtacattactcaactgtgaagaaatggctaagattttgtaagtaaatcacaagttatacgacgaaaaaagaagaagcacaagttatacttgaaccaaggtcttgtgtagagattcaagattcttggctttgcaaagacacaaacccaccaagccaagtctctgattccacacaccaatacaaatttgtatatatacataacattttcttctttctaaagactaacttctagacaatatgggtagttcaatgggctttctcggaaaaggttttgcaattctttaacctaacaattatcgacttaaatcgttatataaccgttttggcaaattttcgtcctatatatgtttctaaatagatttcgatatttggcgtaggggtaccaccgacgcagatgatgaatatggtaatgggttc

SEQ ID NO: 29724 - DNA, 1463 bp, Arabidopsis thaliana landsberg
aaattctatttttagctcactttcacgccgtagcagatcatctgtttggttactataaagtgaatcttggactgtcttaatttcaaccatcaacttctctttcttttcctgaatatcaccaaacacctccttgttccatctcctcaaggttgtttgtattccttttaaagcttctggtgttgggatattacccttccaggatgctaaaagcagttccttaaaccccggatgcgacaaccaggcagcctcaaacctaaagggtcttcgaaacctattcttgccaactcccagcgccaattgcaagtacaggggtgcatgatctgacgctagaaagggcaaatgtgttaacgttgcctcctgccattttaatcgagcatgcaaacaacacaataccctatcaagtctcttagccacaaaaaaatctctcctcacgctcccgcttccaactgaattggttacccttgaaacccatgtcaacagtgaggaatcatttatccattctccaaaggcaatagaatcaggagatagtcgcccacttcctcctgatctctcatcaactctgacaatcatattaaaatcccctcctataataaccagtccctttactccccgaatcaccgcacttagcgtgtcccaaagcttactcctccgactcggcgttggaggagcataaacaacgattaggtccacagctgcatctccgtttacaactcttgcgtgaataaactgataagcggactcaacaatcaccacatcgcctatacatgtaccccataacacccatagtcccccactctgcccttcagcatcaacccggaataagttctcaaaatccaacccctggcatatgcgtcctgctttatctcctcccgcatgtgtctcaaaaacagctaagatatccgtattgaatttcttcaatatgtatcggttagaccttcggaaattaggtttatttgcccccgacaattccacattaagcaattcatcatttgattacaaattcgaattagaaaaactggggaaaaccgttatgcagtccgatttcccgtcccactcgccgacggattctcttggataatttgtatatgtttaggtacgtaattgtatattttgtatatgtagttttcgtgtatgtcatcaacatgtaagtgaattataaattttgacaaaaaataattagaaaatgtctttatttatatttaaaactcataataaaaaaaaagtaataaaaaataatagactacataattctccactggtattaaaaaagcttgcattaagaaaattaaccaaagaaatgcttttattaattattccaacctgcaaatataaaaacgactaagttagtatgttatataattttttacaatgatatttattttataataatcaaaataaataaatcatacctgaaaaaataatctattaaaggtttcggaatatttctttgaaaacaacatttg

SEQ ID NO: 29725 - DNA, 933 bp, Arabidopsis thaliana landsberg
agtatgtacttagttgtctctataaataaaatatcccgtatttcactgttgagctactcttcggtggttctgctttagctcatattgataactggtatttggatacttgatgcagtgtgcagttttgcatcttatgagctagatttgtattctcaatcttgtatcgctacactgttttctatgagtatctgtctagtaatatagtgcatggctactttggtttgcctaataactgatgctcctttttacatttctgttgttatcagaaaatggatatgggaccatgcccaaaggtgcactctttgcatcttcggaatgagtatcctttgtttacagtaagtttagtatttaccttatacggttaccatgaaggccgcctacttccatggcctctttcaattgaatttgacatttgaacatacttactaattgggttgatatctgttttttgctcatgtttttgctcttcttcctggtttttgcttgagataatacgttaaatgaatggatagtgcatataagactagcctatgcagattagttacaaaaaaaagttggtgtcattgttatgtttagtttaattctacagtggcatgttgttctctttccactcctgtgttgctttaactcgcccttagataccgagaagcaagggcaaaaggtgttgataactacgacagggaattggaagatgccatagacaggcttatcgttgagtgtgataggaagattggtagggcccttaagcgtcttcaagaagaggacgccaaagctgccattgccatttctgtctctgaagtcactcaggtgattatttgattttgaaatttggtttatgtgtcttctaagtttgcaacactcaggtttgtttatcatcattacattgtttaactgcagtcgcctgaaattttgagttatcgggagaaatcaaag

SEQ ID NO: 29726 - DNA, 417 bp, Arabidopsis thaliana landsberg
  unsure (1)..(417): unsure at all n locations
accggactagttagtttcttactaataataatacaagaagatgaaattgcagttttcatccaaagagacactggcaggggttccacttatagtaaggcccacagtacgtgcaaggtcgctnnnnnnnnnnnnnnnnnnnnnnnaaaacgttgcgtatcatcgccaagtcaacaagacagtcggaaatagattattcagtccaaagcgacaagtagagagtcaacgacttatgatgaatagatgaagaaacaatacttgaaagagttttggaatcctcaagcatcatccatgagttctgtccaaattacaaaccaaagttttccaaatcctcgaacatgtttatgattttaatcgaatctaaattctcatcacagataaacataatcatcttcgcagtccacgaacctctatttcaca

SEQ ID NO: 29727 - DNA, 1726 bp, Arabidopsis thaliana landsberg
catgttttcatcatcaaatgtctttaaaattcatatctcttttgtttgtttgttcatatctaagatagcaattaatatacctctatctgttggggtcaaatgtgatattatatctccgtatttattatgaataatggttgtaagaagctttattgaatttccagcagaaagatgttttgttcatcattgagtactactactatggttcaaaatgaagcaaaaaatttcccgatttataataaaccataattcgtttttcttggatgctatgatcgagttccaacttccaaaccactaaatagcactaaattgttgttgcaacaaatccttgtctgaaataataaattcgagtatcgttttagccgttatttttaaaacacgtgttgtattaaatatcttattatgtggtgccaaattgtataatgacgatacaaaggacaaatgttaataatttcaaatttcccacccagacaactcttggttctatgcttgtaccatctccgcgtcctcgtcttgtcgtgtgtcctacacgaacatactattagactattagtgttacagtactacagcttaattaaaatatgcacatgtcaaaatatttaaggactaactggtcaaatagccccaaaacaattcaagattgattaactaacatgttctctaaaagaattgcttcagtaacctataatgtggtattgaattctcgaaaatgcatttaaaacatctttatatgagcttacatataattgacttaaattgtttgacggaaataccgaattgtatgatgctgtgagaaaaacatgaaatacaaatattcatgtatagagtcgagtttaggatttgatcaagtgtcgagcttaattaggactcgaactgataatacaagaggtacatatacggatgcttcttttttggaccaaacatatatatggttcagttcttaaacacgtatattcataccaatcatatatatattctggaaaatgaattgagttcacaatttccatgtgtttccacgtggtcaatttaggtcgaacttcaaatgttttaggaaacaaccgttaagaaaatcgctctacggatgtattcctgtcagttaaaattatcaaattatgtggcttgtttgcgactttgcgttgtgtgttttttggcattcaagaaaaagaatgctggattatactaaataggaaccaaagtagcatgtagtgtcgtgataaacgacgtgacaaattttctcgcccgcccgtttcctcttggtacgaaaagactccgaagccttggtgattcgaactgtcgaagagttaggttaagtccaaaatgtcaaatgaagcatgcagcttgaagagggcacaatcgtcctttcccctgatatttatcccatatttaatacatgacgctaatggttagcttgagtactgagtaactttaagcgacatttataagtatcaatgaagctcgagtactgatattattaacatcttggaattaaatagctcactatcaggggaaaactgaaaagcgaacaaaaattattggaagaagaaattattgccaaccgtacagttacaagtataaatgtcgatatatcgacacaccaaaaaaaaactattgcattcacatttaaaaaaaaaaaaaaaaaaaaaaagatgtatactagtataatagtatatctgtcacaaacacatatcaggagaacatctatcacgaaccccatgactcatttaag

SEQ ID NO: 29728 - DNA, 2350 bp, Arabidopsis thaliana landsberg
  unsure (1)..(2350): unsure at all n locations
ttttcttgtctttgatcaatgaagggagcgattatggctgtcggagcatctcaaccttcagtggttgcaactaaagacggccgcattggcatgaaaaaccagatgcaggtaaatgttattatcaaccatcgttagaacttgttcctcttctcctttttgtcttcatgaaaacgtctcgagttttcctgggaacttgttaatgatgactggtcacttgcaaacccacaggtgaatgtgacggcagatcatcgtgtcatctatggtgctgatcttgcacagttcttgcaaacattggcaagcattattgaggacccaaaggaccttacattctaggccaaattactgcttttcgcatcccagtcttctctgcttttgattccatgggagcttgtatttctgcggtaatcagtttctttgatagaacaaaccttttaagattaaacataatcatttctttgtttgagatatatcttctgcaacattttctgcatggaaaggccgtcccacatgattttgctactgacttcatatatatccacttcatgcgatgaatcttatatgaactgataactttagcatgattaataacatgaatcttatatggactgataattttcaaactacaactgtgaatgcattacatctttcctgtttctctcagcatctcaaaaatggagatgcagatgatagtctgtcagaggaaagaaacctctctaatctctatgctgcttatacatacagatacagtaacaagcaaaaatttacatatcatgcatctgacacttttaattagagtcttgtgagcatccgtagaacagtcttcatctttggtcttgccccaggagagatgtttatgcaggcaagagcaacaccgagggcacggagcatctgctttgttgctacagtagatgttttgctcactctgagatcaagaatgttgttctgctgctcttgatggctcgaatggctctgcacccacttagccaaatgtcttccttcacttacagctggccttccagttatcaactctaaaagaatcaccccaaagctgtagacgttcccagccattgtcaccctcatcgtgtaagcatactctgatgaagtgatcaaaagtgaaagattaagagagctgttgtttctcagacaagcccatataagttttgtataatgtgttcacctggtggaatgtagccgatggtgcctgcaactgctgagaggctgctgttgcttttggaaggatcgattaccttgaacagttcaatgtcccctactagaggctcagtgagcgacttgagtagtatttttttactagacagatctggtagaaggattggatcacgaccgctggattcggatccatgcaagtaagagattccctgagctatgccaaccgcaatactatacctgcttgtccaatcaaccacaccactgctatggttgtgtagaatctcgtaaagtgtacatgtgtgagaaaagtcatagatgagtaagcatccttctgaatagaggacataagctagtggaaccattacgtttgtgtgatgtagcttgcccaacatctctagctctacctctagttgctcactactcgcttgctggaaaaccctgtctcttgtgttaagttttttgatgaagtaactcgaaccagagggcatgacaactctgtagtaactccagaacattgtctgatgcagaccatgttctggatgcgcaacagcttccacagctttggcgaagttgatgtttgatctatgtagagcgtttgaagtgagaagctttccatgaattacctcagggagaacagttgacccttcttcnnnnnnnnnnnnnnnnnnnntgttaatccccttgcagcgccttgaaaatttcagcacggtgacagttatgatccctgtaagcagagcaagaactccaagggagacaaatatttcaatcataactagtttgcttttccctgatggatttctctggatagagacttcgttctcagttttcaacttaaccccagggtttcctctgacatcgactgaaacattatgggtgaaccttggaatatttccggtaagctgattgttggagagtatgagctgtgtaagggacattaatctgctcaggaaattaggtatttcgccggagaagttgttatttgacagatcaagaacttccaagcggtcaagttcagacaatgtagtagggatagatccttcaaacaagttgtagctgagatttaaggaaatttgcaactttcgtggcattactgggatcctccctcgtagctggttttgtcccagctgaagttctatcaaatcctccagattttgaatgttatcaggtatggctccattcagat

SEQ ID NO: 29729 - DNA, 3091 bp, Arabidopsis thaliana landsberg
ccggtcatcatttcactatcttaactctatatttaagtaacatatgcttatcattatatttcacataccaggctgctataataagtggatgttaaaggagcacattgcacacagttacaaggaatccaaagtagattacttccagtatctaaagccacaagaaacgatacacttggagtccctatgtcgatccatgtatagtgtagcctgagtaaaacatcaaacacaaaactcatataaggcaacaaatcactactaatctataaaattcaagaacttagcataattatccaaaaaagaagtaaacccaaaggaaaagactatgtagcagattgagttagtcaaaacacgacttttcttcggaatcgaatctaaaggtacaaaatttagaaacttgaagaaaaaaagaggaattttttttctttctaattttagagtgaaaatgaaagaaacaatgtaccatccaaagtcatttccagaagatatagttttgcttccttcagatggaacaagagactgaaccttagcaccaagattcattctctgtcttcggaaatcactttcagccagtaaccgataattctctaagctctgtttattcggcaacgaatccgacgaactcggagtcttaatcgacgctcttccttcgtcggagaagcgatgaatcagccttgatgagaataaggaagctagagtctcctctgtagctagaaatagcacacagaagagtaaaaaagcagatcgtgacaccattttttcgagctagggttttgctgaaacaggaaacaattctcagattaacacgacctagcacagctaatgtacagtaaacaagcaaacaatctagagaaattggattcttaatcgaaggatatttgtagaagagagatattatatcgagagagtgtgaatgttggtcggagagttatgactgactgttagagtgagagtgagagagaagaagaagaagcttaacgggaagaaatcgaggttgtaaaatgacgtaaataccccaagcggtgtactttacacgtgtactcaatcatatgtccggttttggttttgggaattacggttttgtcttaaatcatttattaaaattacgtaattaccctgaatgaaaggtgtgatatatgacacgtgtactcaattgttcgattcggtttggtttaacatcgttccgtcggctaccattagaaaacctaatttacatataaaaccctaagccgatcaaaaaatacctttgcatttgtcgggaaaatcgccggaaaaatgggttacgggaagcataatcgatctaaaggaggtaattcaagtcgtggtcggactgataatcttgcaaggtaaaatttatctttgcgaattgaggtttagctctgttttcgatttgtcgtagttgagtaattgtgatctcgttgaaatagcagggaagatgaatcgcttcctcttgatcaaggtactgaaaagttggatttttatgttgtgtggtggtcatgtgatctgctttaattgttttagtattacgaccagtaccagtaatgctcttattgggtgattttttatgtagaacctcaggatatagcaccagttccaaaagttcaattggcaatgtgggtatgcatagtttcctttatgttttattcaaagccaatgaaacttcgaagaacaaattgttgcttcagtactcacccctgctcctttttttgtttaggattttggtcaatgtgatgcaaagaggtgcacaggtcgtaagcttgctagattggacttgttaaaagtaagtatcttgagctagtaaaaatatatatgtcctcttttttctaagtgtttcagctgaaaaattcttctgtgatgattttgtaggaattacgggttaacactggattcgggggtgttgttttaaggtatacctctttttactgtatcctagggtcatttgttatgacattggatgatgtttttagtatcgtattttgagtctcatgatattggcagtccagttggtagacaatgtgtttcaagggaagactatgatctgattaaaaggaaaggattagctgttgttgattgttcttgggcacgtctaactgatgtcccgtttgcaaagctgcgttgtactgcacctcgtctttgtaagaacttacgacttaactgataaatatgtatccagatctctaggaaatgtttctaatttcttttatggttgcagtaccatggttagtagcagctaatccagtaaattatggaagaccatgtgagttatcatgtgtggaggctttatctgccgctttaatactatggtgagtccataacatcttctcctaaaacccatccgtctcttctattcgtcatacattatccggtattctaatgtcttactctatctgttttccaatcagtggggagaaggaaactgcagaacttttgttaggaaaattcaaatggggtcatgcctttttatctttgaacaagtaacaaaaccgaagaagttcaacatcgtcacatcatttttgctttttgatcggtgaatacaattgagctatgtgtcttttaacaaggtctcgctatatcgcagggatattctaaaggagtactcaaaatgtgagaatagcgctgagatcatctcagttcaaaattcttggcttactcagcaaactcagatcccaaaacaaccacctgcgctcgaagaacgtaaaggcacatctttttctaatctctctgtcattaccacatacctaacataagctgaaatctcacttgcttcctgttatttcttgttttgggtttagatgttaagaaagatggtgaatctggtgatgaatcagaggaggatgatgaagatggcctccctcctctagagaggaacatgaaccatatcaaattagaagacagtgaggaggaagatagcgagtgaaaagccattggagaaatcctatttgatctaaaaaagtttccatctttggcttacactacttgaaagcaatgtttttcaagttttcaccagattcttctggtgtattaataccatgtagaataatgtttatttagttttattaataaaaaatctactatacattcttagatttttaaa

SEQ ID NO: 29730 - DNA, 1086 bp, Arabidopsis thaliana landsberg
atttttttgtttaaaacccaaaaatgatgattcttgaaaccaaaaattcaaatacgccacaagtgaagacaaagatgcaaaagaagtagagcaagtccaagaacaatggagattaagaaatttcgttgggaaaaatttggctcagcaattttggaaactgtttttgacttctcgtcttcgcttggcgtcttataaggtcgaactatctggattctcaatgatctttgcaaaggtttggagaaaagcagccaagtcagctccatacacaatgcgatgatctgcagtcacattcacctgccaacataacaacaaagcgacaatgttactgttagcatagccaaaagctatagctaatcgtattttaaactttctaagtcgaagtgattcaccaaacccatcaggaagtttcttaagtcaaaataaaacttaccagcattgtgttttttacactgaagaatccatccttatcagcaactacagttggctttgacgctccaacagccataatagcaccctagagatttgagtattacaattaagtaaattccttttaatcactattcatagaagaggcaatgaaaggttcttggatatacctgtcctggcggaagaatagcgtcaaatctatccactccaaacataccgagattcgataaagtaaaagttcctgcattccatagatatatcccttaaatcaaaatccttaaacacacttcacatgtttgtcatctaaacaattcgttaagaatagtaccagagttgtattcatggggttgaagttgcttgcttctagctttccccaccagctctttccatttttgagataacaagtacaaatccaactatcaaaacaaccaacacgactcacacattcagttaaagaaaccagcctaataaaccaagtgtgtgtgttaattcactcacacgctagctattttctacaactttattgcttattcttaccttatctgcatcttgtagaacaggcgtaatcaggccaccattgatagcaaccgccactgcaatgttaatgctactattgtaactaaaactcttcccgtctttgcagctagcgttcaccacagg

SEQ ID NO: 29731 - DNA, 3095 bp, Arabidopsis thaliana landsberg
  unsure (1)..(3095): unsure at all n locations
gggatacataaaacaatgtcggaacaaaaagataatgttgttaataaagccatgaattttgccatgattgattcaaaactatgattcataaaatactgccacagaatccaaacctcgtatgtatcccccttctccagaatcttcacgtaatggacctgtaaaacaccaccctcagacagaattgtccgtgcagtacttccagcagatccttctggaatggcagaattcattgcagcttctgacaccttgaggctaaaatttggggtggagtttgaaggtgacagggccttcattctagcttgaagagattcatattgaggtcgaggctcacccattccattacggcttcttactccagaccttttatcacttgccatcagttctgctaatgatctcagatccagagttcctttcaagtaaaattcttccacatgaatgtctgaaaagctcggtaagtttaatgatgcctccagtttgtcataacttggggggattttgtagatgacaccatcaccaatgtccaaatacgaaggttcatatgctatcctgcaaatgatgcaaaattcaacgtgtcaatctaggaaacccaacaccgtaagttatctaagcggattacacagggttacacggatcccatggaacatgaaaaaacatatgatcaacatacttgggtgtaatatcacgatcatggtagcttcctcgcctatgtggggtcacatcagctgcaaaatttggagagttgtccatgtcatagaacctcccatggtaatcattccctggtttcctacctctgtaactgcccacattgctctttagcaccggaacacccatcagatgaggaggattcccttgagtctccttggacctatttttgaatttttgtacatgctccccaagcattgatcggtagtgctcctcagtaacatgttgattgtagagatcatcatcgtcctctgcatcctcagcttctgtccaccgctttctcttcttggagctcgcattcattctcgatttagacccattgctgtagtttgccactaccccacctttaaccattaccaaccatatagacagaacacagataaacgtcacttaaaactatcacagtaggtggcaaaagtaattccataaaaccaattaaaaactgtaccttgagtgcttctactttcatcctggctactactcccataataatcaacttcatcttcaggtttcggaattctaaacttcatcaacggctgcaagagtgaagaatttagccacaaaacccacactgaatttcaacagtaaaacaaaaacacactgtagaaacaaggagaagctatacaattgcaagatttccaatcaccaaaactacattcatcacagtcacatgatcatcatccaacaagtacaaaccatcaatttcaaggaaatcacaaaaaaattgagacctaacagacctcgagatcgaatagattcgcgtaaggagagtccttcggtggtcgtcttgaaggatccatgagagacgggaagagaataacacggcgtcaaaattttggagagtcttaatccttaaaagcttctagacagaaacattcgtcacgagaaagaaaaagagttcgtctcgaagaagaaccctaatccagtatgatagaggaagagggcgaaaggttaaagacgaacatgcgcaagttagtggacacaggcggtacagaaagaagtccagacttactanaaaccccaaatacgccaaacgaataaagcttcttaccgtgcgcctctccacaaaaaacgggtaattattattttttcttaacccctccggtaccggccgatcagataacgacggctaagttatcgttttggagataaaaataccttgtggggtaaacatccatatataccacgtaaaggggcgaatttataaatattgaaagctcatattcgagaaaaccctaatttcaatatacaggattttttacctcgtcgtctctgaaacttcatctctgccgtcttaagaagattttgccagtgcgggaagcggcggagattgagagattagcgacgatggaggaaagcaaacagaactatgacctgacgccactaatagcgcctaacctggacagacacttggtgtttcctatattcgagttccttcaagagcgtcagctttaccctgatgagcagatcctgaagtctaaaatccagcttttgaaccagacgaacatggttgattacgccatggatattcacaagagtctctaccacactgaagacgctcctcaaggtattcttgtgtattcctctctggatatgtctgtgaatttgcgtttttgtgtactggtttgtttgtttgatgatgaatgttgaaatttgtggtgatagaaatggtggagagaagaacagaggttgtcgctaggctcaaatctttggaggaggctgctgcaccactcgtgtcttttcttttgaaccctaacgctgtgcaggagctaagagctgacaagcagtacaatctccaaatgctcaaggaacgctaccaggttgtgatttggatgattaagttgtttaattttgtgaaatgttatccagatttggttttgtttgtgtattgtggaacacaaatcttatatggcttggtgtcttatcagattggtccagaccagattgaggctttgtaccagtacgccaagtttcagtttgaatgtggcaactattctggtgctgctgattatctttaccagtacaggaccctgtgctctaaccttgagaggagtttgagtgccttgtggggaaagctcgcatctgaaatattgatgcaaaactgggatattgctcttgaagagcttaaccgtctcaaagagattattgactcaaaggttagtatttaaaacttcttctagtttgcgacctttgaaatcaatatagatgtgagagtatatatgctaactaccatttgttttttcagagtttttcatcgccgttaaaccaggtgcagaacaggatttggttgatgcattggggtctgtatatcttttttaaccatgaaaatggaaggacacagatcattgatctttttaaccaagacaagtaagcctctacctctctgttatccg

SEQ ID NO: 29732 - DNA, 8770 bp, Arabidopsis thaliana landsberg
  unsure (1)..(8770): unsure at all n locations
caagcttatacaatttattttactattcaatttgatagtcccctttctttattcgttatattatttataacataatttcttggcgaattatgacaaaaacaaaaaaacaaaaacaaaaaattatcggcgagatgttaagagttgagtggtcaaagtttcacaattctctgcaacatgtggaagcataacgtacttatcgtgggccacacgtgagcggtagacttctcaatttgagtaaccaattaaaatgggctttacttaacggcccagtatgaatttataagcagaagtgtccatgttgatatgtcgcatgtacttacatcagcaactatgtatttatattgtgcttcaattattattggtcatagtttaacacaaaaaggcccgcacagatacaaatcttaaacagtttgttcaaaaagacaaaaacaaacaagaaaaaaacaatttctcattgatcatcaaagatcagatctcttgaccacacattatatattttcaaaagtactagttgtttgtttttaattttgatgtaataattctcacattctcaacaagatcgatcaaagtaagcaaccatggcggattcgttggcaccattgttgcccacccacattgaagaagatgacgacacttcttcacctctgactttcgacaagatcctcgagaaaagcttgtctgatttcggattctcgcagttcttacagatagttctcgttgggctcgcgctaacctttgactctcagcagatattcatcaccgtcttcacagatgcatatcccacgtggcactgtcttgaccacacgatctgcaatccggcaactaccgatatctgtaagattccccggtcagcttgggattgggacggtggtttcaaaggtaaatcagtcatttcagagttcgatctcgagtgctccagctccttcctcagaagtctacctagttcaactttttatgtgggttctatcgttggtgcagtcgttttggctatgataccctgacggttccttgggacggaagcaactgctttttttctcgagtttcgcaccgtcactcactggaatctctattttcttatcctccaacatatggatctactccttcttaaagtacgggatcggattcgcgcgtactcagaccgggacatacgcgttagttctgataagtgagcgaatttccaccaaatggagaccgcgagctactatggttccgtttactctgtttgtgttagggttcatgtcgttgtctggaatcgcttaccttgtccgacacgcttcttggaaagttctctatctatgcacatccattcctgcaggaatccacagtattttcatctatttctttgccctagagtcaccgcgttggctccatttggaagggaagaacaaagaagccattgaagtgctcaaacggatttcacctgcaaatagaggttacttggaatccgtatcttcgaggttacgtccaaaagaaacactagagcaaacttcaagctactcaatcaaagacttgttcattagaaaatgggcttttcgaagagtcacacttgttatgatcataatgtttgggttgggaatgtcgtattatggagttccattagcggttagagacataaaagtgaacatttatatgagcgaagccctaaacgccatggtggagttaccaacatttgttgttacaccgatcttgctcgagcaattcagcaggagaagctctgtgcttgtaaattgcttaattggaggagcatcaggagtgctctgtttcgtaatgagcctttacggaagaacaaaaatcgcttttgctctcgaactcggttctttcttctgcgctaggattggattcaatttaatggcgatttatttggttgagttatttcctacatgcgtgaggaatagtgcaacaatgatgcttagacaagcgcttgtggttggaggagcttgttgcccactcattgcttcgcttggaagaaatgtgccgtcactctcttttgcagttttcggatttgcaatgtcgggtctcgggttattcgctttgcttcttcctgagaccaaagggttaagtctttgtgatacaatggaagagcaagagcaaagagaccaagccttgaagactagccatagttgctgaaagcagagttttttgaaaaacctctgttcttttattgaactttcgtataaaacctctgtttagctccggttaatcaagccatatgttgattttccgagtaattaatatgcgaaacctacaatggcatgtattttttataaactgaaccatttcattttcttgattacaaaaatctgcataaactaggaaacgtttgctaatcatctataaagctatcatgtgaatgtctctgtctttgaactactaatacagaagcatttacatctaaagacgaagccaagaaatcaccgacagttccaagctccggacactcttcccaatctttcattctcaccgtcatagggcaatctcctgtgctctttccgaccacaaacagtgaatacatctctccaatctctcttagaatagtcagcgtatgcggtccattgctcactagcttctctatgaaccccacttgtcccgttgttacaaatctgttgcacagtggaaaataatgtcaaaagtagtttctttgatggaaactgaactttccctagcttagataagaaacaaagaaacagagtagcggcgggaaacagagctcttctcagaaacagagtatacacaaaacagagcagtgataaaaacagggtataagtaaggtacctgttatagaattcttctaagaagctccgatctgtttcttgttcagtttgattccttcccagaacttccatgaaaacctcattattatctcgtgtcatagcatttccaacaggggtctctgcctttgattcctcggagacaaactgtataactgtgagatgaatcatagtattattcgcgagccatctgcacagagcaagagcctcacgatcatccggaccaccaaagaacaatgtcgcgacgtgttgtacagaatcaaacccgtgcggctgctgaaatccggttatgttacggtccacaaaaatgccaatggaacacggaccgtgccttagaacattacggttcatctgtctgaacagttccccatcgtttgtagtcttcccatcgattctctggtgtttatgaaacggaagaaatacaatggaaactcgaagatcctctgttgcgttacagatctcttcgtgcatattaagcatctgagtcacgagcttcacttgttggatcaagattttgctgtctttagcaaacgaatcaatcgaatcgttgatctctaaaccttcgttggtcccgaattcgtcatctccattcgcattgcctccatcttcgtcgtgctcatgatacatcagttccgattttcgtttcttggggaggggtacaaggtgcataagcagaggtgtaaacggatcagaggctccacgagaaccgctcaaggccgagacaagagagatcgcaccgcgagcatgacggactccataggcgcacgataaaatgcgtaattcctcgttcgtgttatgagactcaagcgaagtcttctcgtaagcaaagtccttctctcttgttttaagcaagaaagatgccagaacaccacttactagcgtcgttatcaccaaagcagccaccatcatatcatgaatagttgtggtccaccatttctacaggtagattcagacaaagaatgggaaaaaaagaaccataagtttttgttattatatatgttaattgttcgtctgttcttgaccaaaatataccagaccctaaaacatgtgtaacattttttgttgttttgttgtgggtgtgcaataacagacactctacaattgaacaagacttaatgtgaatggtataaaagtagcggaatcatataagtaaacgtaccttttcggaatagttggagtctagaagaagaagaccgacatggcctttaacagagagaatggtgggtaagaaaagccaatatttcttagggatcttcaggtacatacaagcgcttattacaccaataaatttcccagctatggttacaatcacgataataactataccaaggtaaaagcgtttggttaacgcgatgatgctgaatctgaatccaatgtaaccaaagtaaaccggaagaacaaactcgtgaatcgggtaactaagccgttgtatcaacgttctgtgagtctttccttgtcgtggaaacattatgccaatggcgaaaacagaaaccgaggaatttacatcgtaggattcgatagttataccgatgatgagaaggaagatgaagaaaactaaagtttcagcctttgataggtacttctctttagggttcctctttggaagccatggagctaagaccatgttgatcaatattagggctacggttgccaaaagaaacaagaagagttcaagtatgatagttccagagatgaacgccatgattatagtgtagagaaccacgtttgttaattcgatgaacaacgcacatgagattgtcagccgtccgatctcacatgtgttgagtttccaatcagcgattgaacggactacgacaggagatgccgtgttagacaaggtaacgagaagaaccaagaaaaacgtaaagtaatcttctttgatcccaaacaaagggatgaataacattaaggaagcgaaactgaggaggccggaaaccacgaatgagctcaaggttatcaccgcagctttcttgaaatttcttctcatgaaatgtagatccacttcaagaccgatcaagaacatgaaagatgtccgtaaagcgaaggagaagaaggagtaataatctgctgcatttttctggaggaagaattccttaactttaggtattcttgagagcaaaacaggactcaacacaatcccagcctaaaaaatatccaatatggataacaaaacaaaaacttgttagacattttccactacaaaaaaccgggtgattcttgtaacgcaagaaagaaatttccttacaagaatctgggcaacgggaccagcttggccgcagggtttaagaaggagataaaacaattgagagaagacgagaatgcaagccatttgaataaacatggtattaaggggattaaacagttcatctccttgaggtaagcaaagcaacaactttggatccatcttcttcttcttgattcgatgatcatgagcattcttcaagcgtgatggtgatgatacgcttatgaaaattaaacgttatgttaaaaaaagaaactgaaaatgctttctaaaacaagaatttataattttcacaagtaatttagaaattaaaaaaactaattagtttacatttggttggagttgatagatgtgtttacaattatttgaccgtccttcaattactctacgcctctatttcaacccttggagaacggattaagttgactgtaatcagaaattttacccaaaaagtttactaatgattaggttattatctggtcaataatcaacagatttaacaccataagtccataacatatttcttatcttttgtatatatatgggaagttaatttttgtgttttgtaaacaagtaaaacataatacagatgctagtaaaaatgacaatttgtttttgcaattacacaaattacctcttaacattttaccttacagggtgttgtttaaccaaaagaaaactagagtgttcatggcataataaaaaacaaactataggggctgaactataatacacatactgttcaggatacaaacgaaacatgagaataatatggggtccaaaaagtaaataaataatcaaataggagttctttgcaattaacgctaaagtgcgaacctgtaagtcaaatcatgaaccctaaaaaccccaggtgagaagaacggagagagagagagagagatgtcgttcatgtatgagaagagcaatacatggagatggctagtgatgaagacgcgagattcgagatccttcttcttcacgttcgctgctttatgtggtgtcattcctggcgttattggctatggagttatgcaggtcaccaattccagtaaccctgagctcgaagcccgcctccgtaaatctgctcgcccagatactctcgtatgtagttggttttcttctattgatgctaatcggtgttgaacttgatggttacaatttgttcgtacatagttcctatagttgtcttgcttgatgtgtggaacttttcttggaggatgagtagaactttgcttgatgatgattctttctgctactttgcaaagctcctatgggattgggtacctagaggttagaggtgtttaggcctcgatatgttgaattgagcatttgcattttcttgttgctaatacaccaatccattgttctgtgttaacaaggaatttcatgtatctgagttcttgctctgcttcacaatgtcgattcaattggaagtttattgatcacagccgtatgttaaccttaggcttattgttaatcttcaatctttttgtgttatgatgaacaatacatttctgtttttgtattgttagatgatgggtaaagtaaaccaagagaggctagctgaatatcttggtgagttgaaacagaagcaggatacaaacgacagatacgttgctgctcttaggggagagactcttaccaggaagccttatcaaagaatccaaccaatgccaaagccagatgacacggtgacaaccaaaactcagtaaggatgaattattttaagagtcagtgttagtgaatgcctctcactcgaatcttttgtcgatacaaaaatggcgtgtttcctggccgtaatatcttttgtttttgaaaccggcatccagcgacacaacttttgtgctatgcaaacggctacaatgtcaatcacttcaaaccttttgttatgatgaataaaatgtaaaacttatgttttgtaatttgtacattgcttcttcattcttgtttgcaaagttaatgttttacagtacatacagaattacatggtacacgctgattgtggaacattgtcagaaacacttggcaaaccaaattgtagattctacaaaagagatggctatgtgcaagcgatttgttatgtgcagagataaagtttgttggcattgatcacgtgtaaagccgtggtcagaaaaaaagttcgtggccattgatcatgtgtaaagctttagccggttcgtgatccttactcgacagatcgggcaatttgatattttggatccgcaatctccacaagtctgcaaaaggaaaattgcaaaggtaagttaaaactggttgttgattaatgaatgggtttgagtaaactaaaagcaatcggtgaaacttaccatgtggccacagctgaaagccacgtcttttcggttagtcagacaaatcgggcaactctgttaaacggaaaaccatatgagattggagttgattcgacaaggcagaaaaatagtaaagtatacaaattatgagacctgggtttgttcaggtgatgcaggtgatgcagttgatggtagttcagcattagttggaggtgtgtacgggattggtggtggcctcggaactattgtcttcgctaagcccgtctgcttcctttatagacgggtgcagaagtggacagggaccagcagaagcaattagacaaaaaaaaaaaaaaaagagcagaaagacggtagttctgttatgctgagaacttatggaagtacccgagtaagcggagttcgatggctgcttgatactgaaagggaatctccattagagcagctagagcaaaagcagtttctttggcagactctggtgagttcctcgtcataatctctgtgaaattcacaaactatgcatagaccaaagatcaagaagaagcncaaagcagagaatatagatggaaaatagcacagaaactgggaagatacctgaaagttgtcgaattcacgctcagggatcttatcatcgaacttcctcatgtcttcccatggtccgtctccaacaccgactaaaacaatcgacaaagcatacgagctgtagataataaaggaatttcgaaaatggcttgtttagataccgcaaatcgagttgcgaaaaatgaaaaactgaatctgcatttttttaccttgcatttacaatcgcgtcgatggttgttttctcttgttgactgagttctccctcggccatatccgtacctctcgttaccttaacattcaaaaggtagccttttaagttttggtatcatactttgtttctcttaactgcttgtaactttacctgtccatctgcaacaatcaccagaacatggaattgtccgttgttcttctccacaatgtcgacagcagcatcgatgagcggtccatacgacgttggcccttttgaacacggaaggttgtgatttggtgataaagctatggaaggtagtatttagattttcaaagaaagacctgatagacgcaagttgggtgcaattctcctgtaacatgctaagacctcttcgaagccatgacatggagaattgtcgctatggaaaccgaacacttcctcgtcatgagttgttgctggatagtgcaagaaaacagagtcttagaaacagagagtgaactgaagatgatatttttgggaaagaaaaacttacaatcgccaaagccgaaacaagggatgagattgtcttcatcaaaaggagccaacgtttggccgattacaaaaatcgccttttcatatggattcgaagtttcgccgagcgcgtgcagacattttccatcgaaagaagttttccctgaaacag

SEQ ID NO: 29733 - DNA, 944 bp, Arabidopsis thaliana landsberg
agatcaatatatacacttagattctatatacacatagtctactgtagcaagagataaactcagattcttcatgaacattctcctattgtttcttaatgatattggccttcacgttgatgtatttcataaagagttttgtgttgagagcgtttgaacaatattagtaataaataaatatctgatacatgtaggtagcagcagaagtagccaaaaaggctaactaaaacaaaaatgttatggaattgagcccacatgaaaattttacatcttaagttttcactttctctgtcgctgtttcttggctaaagcagcaccggtggcaagtcggagagcttggccggagttcttgatgactgaagacgatctggggacttgcgctctcctcatcttcaagaaatctaacccggttttcaagcattctggtggtggaatctccttgtaaataaccgtttcgatcctgcacccaccagagagacttcagtaaagcaaatctgagagtgatcctaaaatatgtaagccaagaatagacgatcataccctgagcttttttgctttttctttcttgggagttcgtctatgatctcttcttcttcagaatctgactcagctttttgtctgtgaaatgtaacatatcaaccaatcttagacatactttctcgcttaaaagtgtttatgtatcaagaaataaggatataaagtatttaatacttttctcgctccgcaagaaagtctatgatgtctttggaaaggaatcccttgtttgcaagagcttcagagttttcctcaggttcttcttcttctactacatcctcaattatttcaatctttcgagattttcggagagttacttgctctgccataagcttgcgcctctctttcttctcacgggaaaccaaacataaaaaaaaccaatctcattaaaaaaaaaccacacattccagctt

SEQ ID NO: 29734 - DNA, 2245 bp, Arabidopsis thaliana landsberg
gcttcctatacataaatcttggctgtcgcttcactggccatcttcttggtttaaacaattaatggcaagattgaggtggcaaatttgttcgcaaactaacaagttatgactttaatttgtaggatgggactataatacgcggacagaacgaaatttctcacccgaccactgggactacgcagacagttgacaaggtgttctatttgaatatcttacattggtgttttttgatgatcacgagaactaagtttactatatacttgtatcaattaaaaatgtcaattttgccatatgtagaatttattttcttacattgtctttctatgtttctagtagagacattgttctacttccgctctcccatcgaagataaagagagtgttttacatgtcaagtgaaggcaataatctgcttcatgaggttaactactctgcttttatatatacagaatgtcctagatatcttcaatgttatctctaatgattctgattccctttaagaaactctatcgttttagttctctacttcatttctttgttttgcgcggtgtatttgacattgcaaatgtttggtgttatgtccattaaacaggtcttcccaccagttaacccaactgtcctagagcagttgagaagcgtggactgtatcgtttacgcaatgggatccctgttcacttccatttgcccatcactggttagcacccgcaataaatatgttgtgcaaaaatggtggattactaaatttgtgataactgttatagacaagtctttctgttcatcaggttttgcttggtgttggggagattatctcttccaggtcatgtcgtaaggtatgctgaagcttgtcaaaaatactaatgatggtaaaaatcaatctgatttcttctctctgtcacaggtacttcttttgaacggtagccaagaccgagaaacaagcaggttcaccgcttcctgctttgtgactgctatcgctgacgctctcaacagaactcatggagatactaatattcggctcaagaatcccgcgagtggatctttacaatccacactctttcgatgtcttctttatcagacatatatcgatatccaagaacatcatttttgtgtgcagcctggatattacatcaacactctcttggtccctaaagatggagaaatagcagtagatctcaaacaattgtctgaacaagggatatatgatgttgtcagtatctctttccttcacttgtttccaagtttatgtgcacaacaaacactcgctgttacctccactctattgcagagagtcgtggagagtgttggtgacccaaagcacggtatcttgttcaacccgagctcactgataaacacactggccggtttggtggagtaaatagtgattctttaggccagagctagtttcttcttctacgcaattgggaccatgatttttttgttactgtttagtttgatcctttagtgaattgatatgaaaggttatgaatggtcaatgatcatattcttagctaaggaaagacaaacgcctctctttctctcggagttgtatcatatgttttttcttacacgttttacatataactactgtacagatgaatacagttcactttccaatgaaaccaaatgatgacatttctacataactatgtgtgcttttcattcccaaacaagcaaaggcatctttgtttctcactgtgtattaacatgtgtgcttttactaaaaagatgtattaaagcaaagcaaatgatgccagcaacaaacagagcgtgccctgagattggtagggccctaagcccatacaactttgttggccctttcagttaagtttagaaaagaatcacttgttcaataaccaatgttaattgttgaaagatgaatttaaccgaagatttctttacaagtttttgacacagtgatcataattttataatgctcacaagtagcagtacgtgactcttgtaagtcaagtagagagacataaatataccaaaatattaaacttgtatgatgacaatgacgcatccatttgagcccatgcttcattgctcctccattcagtgattgggcagacatataatatgtattgttttagacactttgtttctagtcattcgttgcggaaatgacaaacaaatcaactttttaacagaatttattacaaaaatatgtaaagtacacgacaaaaggaaaaagtgtactactttcataatttaacataaactatgctatttttgactaaaccttaagt

SEQ ID NO: 29735 - DNA, 2167 bp, Arabidopsis thaliana landsberg
tattgaaactaattcaatcatatcgttaatcattataaacaaaattacagaaagtcaatatatatgagctcattttttaaaattatatgttatatttgccaagttatatttatgcttgattattttgttatatatgtaactcttaccaaccaaactattcttaccaaaatctagattacgatttgggcgatgattttatactttgttgggttaaaaaatggtctttaacctaaaactacttaaagataaattgtgacattcagcgtaaaataactaaaagaaacaaaaaaaatggcatgcttagaagattcggataatatatgtttgaagtaaaaatacactaaaaaaacaaaatcagcaacaaatataaatggaattatggaagtaataaagaaactttcaactaatggcatgtgattgccggagcagttgacggagaaagagacgctggagctgtcggattattatgctatatagaattatagaatatcaatacatgtatcccaaatttgacatcttactatcttagtaacaatgttaaaattgtaacatttgttcaaatatgacaaaagtatcacaaatacattttgcataatgctctgtttctacacgtcatcacgcactctgtccaaaatcttacaccaagaaagtcttgttcttggattggcctaaatgtgtaatgtgaaagtttcttcatgtaggtttaaggactcctggagagatgatgtggctcttgtctgcaaaatctgaaaagagagttatacaatataaagcagtcctgaaaaatagagacataacttatagtcttatactaccaaaaagaagaaataaaactagtttaagctctcttacatcttcttcactgagaagtccttggtgagcattaacaacatgatgtaccatgagatcagaagctggctcaacaggattaataaacatatccctacaattaaaaagcaggataagcaaataagtaagaagcttttgtgtgattagaaatccttgaatgtcatttcaatttcaaggaccattgttttctttttgttacctcgaagagcactaacagggtctagaacttgagatctggataggaagctgatgaaaatcgccaaaatagagcagttgcaccagcatcagttcttttttagcaaatgataaatcagtaagattgtgaacctgcagaatcctcacacataagaaaacaaacatgaacgttgaggaggagttcacagatactcttgtctatagatgcatgttgcgtttttggcagagcagcaaaatcctcctgaactgctgccggtagctgtttaatgcacaaaaaggatcatctgctaacagattgatcggaagcttattcttggtgtcaatccaaagagctccttaacgacctgatgcttctactactcggaaacaggcatcaatgtttcctcgaaaaccacattcattctcactaagattaacttctgagttctgacctaccaccagctaattggctccccttagttgctcatctacaaggtaattctctattatttcatcaataggatctacaattgtatctggcctcttgcccttgtattttgtatcactgaaaaagtcaaaaatttctttatccgcagctaatccttctcttctcatttggtcaaacacttctcttgcctccaagaatttcttccttttcaaaaaacctttaatgagaacgctatatgtgctgacagagacactaaatcctttccctttcatttcttggaataaaaaccatgcttccttcatgttcctagccttgcaatggcctttaactaaattctcatacgtcttaccatcaggtcctactcctcgcgaacacatgtccttataaattgcagttgctgccttcaggttatttctaatacaatattgcttcacgagagaattaaatgtggttgcattaggcgctataccctttgccaacatccaatttaatagcttctcaccatcttccaacatcccatgcaaacaaaagccattcattaggacgttgaatgtgacaatagtgggttgaagccctttgccgagcatctccttcaaaatctcttgagccttatccatctcccctgatttacagtaggcatccattaaggttgtataagttacagtgtctgcattaagcccccgcagcttcaaattc

SEQ ID NO: 29736 - DNA, 2425 bp, Arabidopsis thaliana landsberg
tctataatgggaaagaagaagatgataataaccaaaaaacaacagcgaattcgaaattttctctactctaaacaaaatcgaatctctacttaattcgctctaaaattggaaagaagacgatgataataaccaaaaaacaacagcgaattactctaaacgattcaaccattttcttcatcgcgcattactctaattccaaagaacaacacagaaaaatgcagagaaagtgaaaaattaaggggaagagagagtagcgaaacatactctgaagcatcagtgggatagtggtaagcgaaatgagtgagaagccatgaagataatcgctgctttttccgggaaagtgatgggaaaatctcaggtggtggagagaaaaaagagagattcaaaagcagagagcgagaagagagatgatttttgttttagcagagaaaagagacggagttcgaggagagaggcgcgtgtgagtcagtttcttttgattcgcgtgttgttgattttgatttttgaatctcgcgctcgttgcgaggtttttcgaattttgttttgtggggtacactgagatttggaaatttaaacacaaaagaggaaaaaaagtttgaccgtaataactaatttttttttttatctatctgacatgaagcatgttttcagagatcactgggccttttatgggccggatattttgtagtaaccgtaagttttgttttatccatttaattttgttaactatatctagtcctgggtttccgggtattcggttcggttatcggatatttcggttactaagtttactttctttttttttcatcaacatcaatcttattattgaactgtagagacaaagtctcgatggagtatgtctgtaattacatgtggagtaaaactagaaaaatgataagaattatgtgaaggtagtgcatgtttagctaatgtgtctgctgccatgttggaatttcgtcgaacccatgtgaagcgacaatcctcaaatcttgttttccaagccacaacctctcttagccaattaaaaaccgcaaagtttggattcctgtcattgattgtatcggctacctctttgttacctccttcaaaataaaccttcttatggcctttactccaacaattttgcattgccaagaccagagcttgtaactcgcttctcaagagagtttgttgttgttatccccaccgcttggtcgctgctcctaagaacgttcctctgtcattttctgataatccaagcagctttacttggcaagtctcttgttgaaaggtaccatcatagttgcattttgtccagccgctaggtgggagtgtccaatttttctgaataccaacttttttattgtccacgcccccttctgcctggagcgctacacaagtacaaatcatacattatcatctatacgtaaaaccaagataagaattattgctgtgaaataatatcatgtattttaagataattaaacccgaaaaatcacaaaagcccccaaattcaaagagaaagaatataaaaaaagcagaaccaaactgtttttttctttttttcttattgataccataatctttttaagctctaagcagtagatcccttgagcttcttggtgatgctggcaatgtactggccttggtgaaatgcttgctgtagctccagctctgttggctgccttgaaccgtctcctgcaaatgttccagctccatatgggcttccacctttcacattctccatttcgaacattcccgcgccaaatgtgtaaccgattgggacaaataacatcccgtggtgaaccagctgagttattgccgtcaatctatagattaacacaaaatgttttcaataagtaaatatagtggcaagagatgatgtgaagtgtttgttcctgatgagaacttacgctgtggtttcttggccaccaccttgagagccagtgctgtagaagataccagctggtttaccggcgagtgcctgagccctccagagtccaccggttgcatccaaaaaggctttgaactgagcagccatcataccaaatcttgttgggaaaccaaagacaaacccatcagcttcagctagctcattcggggttatgattggggattcactctttggtggtgcgctcatcttagagagtgcctcttcgtgaagcgtctctggtacctgtggataacaaattcatcaggttcaatgattcacatggatatctatagcaaagcctaatggtaatgtgtgatttggaatatcttgtgctaagcaaacagaaactaaaatgcaagacacccgaaatctcgagtagcagagtccaaaacagaaacatgccttttcagccaaatcaaatcagtgaagcagagcatgtaatgccatagtaataccaaccaaaccacgcagacaaaagtaatggagctctatgagtcaagtaactggcaaagc

SEQ ID NO: 29737 - DNA, 2383 bp, Arabidopsis thaliana landsberg
ctttttctacttttgttattttgtccgatacttctttagtaacttcaatacctctttcggtaatgtgtgatgagaaaaatatacacaatcttaatccgtatttaagtttttttctatgtcgacgacgagaaaaaaataatctgcgttagatcatagatgctaatctttacttgattatgaatttatatatataactttctgttgctatttgcacatgtatgccaccacaattttacatgtctaattgttgatggataaacaaatcatgttttttttttctgcacgaggagcttgtaatttgtttgactaaacagcatcacggcgaggcggcaccggaaaaagttcagaaatctcatgggactttggcttgtttgaagcttcactcctctgcttttccatctttatatttccttgttttttacctttttttggcaagggtctatttcttatggtaatcaaaatgtaaatccaaaactatctttcatttatatgatattaaccttttagcaaaaaaaaaaaaagagcactttgagctgtgatccaattagatattgtcaataatctcaataaagcaaaaggactctacttttgttttcttttctcttactattatgatatcacacgtaaactttatttgagtattcaccagtttaattggttatgcagaatattatttatttcaacagaccggttaacattataccaattgtatatatactatactgtgtacagattgttttatcaaataagatgagaaattgtctaacaaacttttctctctcgatcttcaatctcaccatcgctataaataacttcttccaaactggtaacacagacgcgtccccgcccgtttctagtgacttgggatgaaccttggccatttccttgatgctatatattctttatgatgcgtgtttgagttgctgtcgaaagagagatcaagtagacgagcttaccaaacaacatagcaagaagtacctacctaccgttccttttctatatcatctcaccaagatcccgtagggaccctaaacaaaccctttcatctctctttcggctactctttcttcttgtcgccatgatccccacatgatggtatttattcttcaagctgcgttccattgggttataaactttatggatataatgggcctagtatccactaaaaaggcccatattagaaaatggcccaattggttccggcaacatggagtggactgtgaatttcctgcctgtaaaactgtaaagacagagagaagagcactccccagtctcagtggtgcggtgaggagagcttcgttgtcttccccattgcaattaggggttttcaaaacgggtaatcgaattcggaggagctcgtttttgaaacggaggatgagatcctttccacttccttctacctgctgacaatgggcaactgcggttctagagacgaggctgccgtcttcactcctcaagctcaaggtttctctttctctctatctctgtctctcgccgtttcttttttcctgatctctctcctctttggttcacctcgcagcccaacagctccagaagaagcactcccgatccgtctcagatctgagcgatccatccactcctcgcttccgagacgactctcgcactcctatttcgtatgcccaagtcatcccctttactttgtttgagcttgagaccatcaccaagagcttccgcccagattatatactcggagaaggtggtttcggtaccgtctacaagggttacattgatgacaatctccgcgtcggcctcaagtctctccctgttgccgtcaaggtccttaacaaggagggactccagggtcaccgtgaatggcttacagaggtcaacttcctcggccaactccgtcatcccaacctcgtcaagcttattggttactgctgcgaggacgatcaccgattacttgtttatgagttcatgctgcgaggcagtcttgagaatcacctatttcgaagtaatccccgcacccttctccattttttgaagtctctgttcattcctacatatacaagcttattctgccttttagtcttgtcatactcgtctcttatttaaccaagtcaccatgggctctctcttcagaaaccacagctccgctatcttggtctagaaggatgatgattgctcttggagctgcgaaaggccttgctttcctccacaatgctgaaagaccggttatttatagggatttcaagacttccaatatactgcttgactccgtaagcagttattcttttctttctgctttgccaaagttgctccaagatattgggcatacctttccacaactaatatatccttgaataggctgatgaaccttcaggactacaccgccaagctttcagatcttgggttagctaaa

SEQ ID NO: 29738 - DNA, 2204 bp, Arabidopsis thaliana landsberg
ccgcaacttccaataaatagttctacataattccaagttggattgcaattagggaaccaaatgggtattgtacataatggatgattgattgagacgtttacgctacaaataaaccaaaggcctctgaccataccggttcaagaagtcttccctctctcgcgccaactttgaccaaagactaacggtgaccacacgtcgtctttcctttagtcatccaaactccaaaaccaaacaaaaccgaatattttgttaacctactagttcataaaattctacaacaaaaaccaaatttcaataatcgaaatgaaaataatccacttaaaagttcgtaataatggtctaattttcagaaatttgtattaaatcacattaaatacagtgtaaaagtaataccaatcaaaccgaaccaacccaaaccggatgattttgacgaggtcaacactaacggcttttcacattagagttgaccaagagagagcattgacctgagagagttcaaataattgagtgagtctgtatattaaatacgcaaatcatcatcttcccaatttcgaatctcacacaccgaaagttattttcgaatccactaacgaatcttccacagcaaacacttttgtgttcctctgtaatttctcagtatatatagataccaacacaggcagtgaaaaatggctatggcgagtttatatcggcgatttctatcttctcctccggccattgacttttcttgcgccttatgcaaggtacgtacggatcaagcttcgatttcatggattgcgattataaactaggtttttggttacgcgaatttttctgtggttctgatgaatcacgatctccagactccaatctcgatttcgtttttgtttttgtcttcaatactcatgagatcttacaattcgttcagaacttgaatcaaacgcgttttgtaaaattagatactggatttggatttgaattgtgaaaacacataatgtagtcgttgacagtgatcatcacttgtgaaccttctaaggtcagtgacagtgatcacagagatctgaatatatctccaagtaatttcagtgatagtgtttctggaagtagtacgcttggtggttatatttactggagatgtacttgttaatgttagctgtgttgatgtctaaaaagtatttttgatcatttgtggcagctaatcttcaatgaagcgcttcagaaaggaactatggaaggatttttcaggttgatttcgtattttcagacacaatccgaacctgcgtattgtggtttggctagtctctcagtggtgttgaatgctctttctatcgatcctggacgtaaatggaaaggtatgcaagattgaagcaaattatgtccacactaaataaatgatggttttttataaaaagtttcctctcttccaatagggccttggaggtggtttgatgaatcaatgttggattgctgcgaacctctggaagtagtgaaggaaaaaggcatttcatttggaaaagttgtctgtttggctcattgttcaggagcaaaagttgaggctttccgtacaagtcagagcaccattgatgatttccgcaaatttgtcgtcaaatgcacgagttctgagaattgtcatatgatctcaacatatcaccgaggtgtatttaagcaggtaaagcataactttgtacacactgttttgctaaggctcagtcatattttcaagttttaaaacgtctggtggctataattgcagactgggactggtcacttttcacctattggtggctataatgctgagagagatatggctttgattcttgatgttgctcgtttcaagtatccccctcactgggttcctcttaaacttctttgggaagccatggacagtattgatcagtcaacagggaaacgtagagggtacataatcttttcttatctttcgcttaggttcttactgtatcatggatgtaatgtttctatataatatggtctgatttttttctgtgttgttctcaggttcatgctcatatctagaccacacagagaacccggattgctctatactctggtatgttcgatgcaatataggttctctttaagtttgctaatatctttttcttcaattttgctattctattaatgcaattttctcactcacaatctcttccacatgtattgaatgaacttgagatccttatgagcattttggtaagacacaccgtgtg

SEQ ID NO: 29739 - DNA, 2087 bp, Arabidopsis thaliana landsberg
tgaatatgacatgtccgctaactctagtgggggttggcttcgaatcttagcttggcagtgacacgttactttggagttgtctcacattccagtcctctgattaatatctctccaacatgtgcttcaagtttcatctctttgcttttgggctgaaacctacgaccgcttcccttgccttgtaagttaatgttttttatttaaataatcaagtccatgttttattgactctgtggatatgaatatatacctaaacatgcaaccaaatgaagaggaatctgttctcatccataaaccaacgaaaaatgaaggaccaacttggattcagaatcgtgctctgttctacggttttcataattctgactcaaaacagagctctcgcagacttggacagcgagtcccatgagtactaacattacgattatttggtcacggaattatttacttgcagagaagaatgacagattgaggctgcttttgcagggttaactcagaatcggtaggagaagaacaatgggagatggtgcagaggaaagggatgcaattcactctaaatggacaaccattctatgtgaatggcttcaacacatactggatgatgactcttgcagctgacaattccacgagaggcaaagtgacggaagtgttccaacaagcctctgcggttggaatgacggtaggcaggacatgggctttcaacgatggccaatggagagctctccagaaatctccctctgtttacgatgaagaggtcttcaaggtatatctctacgcctaaagcttcttccttgaagacttttctactacttaaaaggtttgagcaattgggcaggccctcgacttcgtgctgagcgaggccagaaagtacaaaatcaggcttatactgtcattggtcaacaactgggacgcctatggcggcaaagctcagtacgttaaatggggaaacgcctccggccttaatctcacttccgatgacgacttcttcaccaaccccaccctcagaaaattctaccaatcccatgtccgggtgattattccatccatctcagcgaaaactcattgcttatttacccatcagggacaaattgtaacttcaacgtgttgcattgcagacagtgctgaatagagtgaacaccttcacaaacataacttacaagaacgaccccacaatcttcgcctgggaacttatgaatgagcctcgttgcccctctgatccttccggcgacaaactccagtcttggatacaagaaatggcggtgtttgtgaagagcttagacgctaaacacttggtggagatcggacttgaaggcttctatggtccctctgcccctgcgagaaccagattcaaccccaacccctacgctgcacaagtcggaactgacttcatcagaaataatcaggttcttggcattgattttgcctcggttcacgtctatccagattcctggtatgttttttaatgcaaaatacctagaaacagagactgccctgaatctgaaaacagagaacagctgaaaaatgcagtaaataatttgtgaactgtaggatatctccggcagtatcaaattctttcctggaattcacaagctcttggatgcaagctcatgttgaggacgcagagatgtacttgggaatgccggttctgttcacagagtttggtgtgtctgcacatgaccctggtttcaacacgtctttccgtgacatgatgttgaacacagtgtacaagatgaccctcaactcaacaaggaaaggaggggctggtgccgggagtctggtctggcaggtcttccctcagggggcagagttcatggatgacggctatgcggtttacctcacaagagctcacacagcttcaaaaatcatatctctgcagtcaaagcgactagccatcttcaactccttgtgtagctggagatgcagatggggatgcaagaaaaagaatcagattgctcttgatgccctcctctcgcacgacgagctttaagtatcacaatcttttgtgaattacaactgcgtgaatacaaagatcagtgtatacaagtttttaacaaatattatatatgtaaagaatcaagatgattgtttaaaca

SEQ ID NO: 29740 - DNA, 2056 bp, Arabidopsis thaliana landsberg
acttatgtaaaacttcatttgtatcgttagtgtgtacatggctaatttgcaggaaatgtgggactcaatggctcttgatacactcaaacaggcctcaggtatgctgctccatttattcctccttttaattgtcacataactgggaaggtgtctgtgttgattggttgacacaatatccaagatctgtctccgtgtcatctagtgtagatatcaaatccaaggcattagttaacaaaattttttacatgcaatattccagaactcctcttctgtctccagtttatctcttaggcctgcatgtcagtttagtttagttcctatttatacgtggctgttgagacgaaaatgcattttttttataagattttcaagtctctaagacccttgtgtatccatcaacaagccttaacacgcctttgataaaccctccagccaatcatgcacaaacatgatttgtgacccgttaaggctttttcattttaaatagctaatgtttcagtatgtcatattgtcatgtgcttttgatctcatgttatcttccattttttcttccgggttcaaatttattgcacttgtcttatgcacagatcccgctgctagtgctgatctagctgtagttctaatgcaagaaggactggcacaaatcttccttgtgggcagaaggtactgattgcagtgacaaggtccattgtctgtgaaatttgttatttcctagtttttgttttgacaacatgtagttctcttatttcacctgggtggttttggctgaacaagtatgaaacgggtcaaagaaattcatccaattctgttcttgtttactttattgtcttgtttggcagtgtgacaagtagccgtgcacgaatagaaacatccattcctaggaagcatggacctgcaattgctggttacgagtctgtatgttccttcactgtttcgtcatatatgtgcccaaaattcgtttacatatttatcctttcaatttatgtcattttttgcttctctgtaggctttgaagaaattttttgagaatgttctgcaggtttgtcttttctcagaatgttgatgttttctttttgttgttttctaaaacataccacaaaaaagcggaaagagtttcacatatctaaaagtctattgcaatatcacaggcctttgtgaaacatgttgacttcagtgtcgttcgctgtgcagtagttgcaagtcccggcttcacaaaggttttttttttggtcactcaaagactttctaaatttacgtggtttattatttttcaaattgcagctggaccaggcttacaaatttcccatacatatatgacacagaccgtttgattgtttcatgtctccaggatcagtttcatcgccacttattgttggaagcagaaagaagacaactgagacctattattgagaataaatcacgtataatattggtgcacacaaactctggatataggtagtatttctgtgaaattgttcatgaagcctgtcaaaattttgttctgccatgctaaaatacattgagtgctcagagtcaaatgatataacatgcaatttatttattaaagttgtggaacactgatttgagatttatactgtcgatctgagttgatatctgctggataaacctaataatttctttagcaggaaacatacactttttttttaatttttgtataacaatgtccgaattgaccaggttacctactttagtaatgttatgattcatgttcatggtggctatcagtgttaacggttcactctactttgtttgtatttttttttgcttattcacttctaaactaaacagcctgagattctctgctcatgcaaattttcttcgatttctgacataatattttggtgcacagacatagcctgggtgaggttctccatgcccccaacgtgatgaatatgataaaagatacaaaagcagcaaaagaggtgatttagaatgttgcctatatttttgaattgctcattcgaaactgggttagcttgaaagtcacaattcacacgaacttaaataagtcctcactggtttggggcttttgatc

SEQ ID NO: 29741 - DNA, 2529 bp, Arabidopsis thaliana landsberg
aagcagtgttaagatagtgcatgatatgcacgagcttgtccggaaaaaaaatagtcttcctcaactctcttgcactgcctaataatctatatatgttgtaactctattcattcaaattcaatcactctaatctcctttcttagacaagagtgtaataaaaatcacaatattgtagtaatttttttgccctaaatgcaataatcagggccgattactaccaactctttttaataatgataaataagtatcccaattaaattagtttattataactccaaagaacgacattgtttcatgggacttaaaaaaaaaacagcaataaagaaaaaaaacaaagagacacaaaaagggttttgagtattgaccttcttctctcggccgctcgctgaggtttatcaagtgagagccttttctttcggagttttcaacgcaattcttcaggtaaaaatccgatcttttggtctttcaagtctatggatttgtcgattttccttagatctaagttcgtcagcttgtcgttgttcttctgattgtctgattgagtgattagttcatgttttaaggttttgtttttgtctgttgtcagagaagcagaagagatgttgtacattatagggttaggtctaggagatgaaaaagatataacctgagaggactcgaggctgttaagaaatcacagaaagtatacatggaagcttacacttctcttttgtcctttggtctctctgctgatggactttccaatcttgtaagactctcaaagcctcgttgatttagtagattcattactttcccacccagttttctgattaaagttctttgattggtttctcaggaaaagttctatgggaaaccaattatacttgctgatagagaaatggtggaagaaaaggctggtgatatgattgatgaagccattgataatgatgtcgcttttctcgttgttggtgatcctttcgggtacatacacctttctcatcctatcttggtattcgattttatacctaatgtagttagttagataatagatacaatacagtttagattgggattgatgtttgaaatggttttgttggaaatgcaatttgcagagctacaacgcatagtgatcttgttgttcgagctaagacactcggtgtaaaagtagaggtagtgcacaatgcatcggtgatgaatgctgttgggatttgtggattgcagctttatcattatggagagactgtttcgatcccattctttaccgagacttggagacctgatagtttttatgagaagatcaagaagaaccgctctcttggacttcacactctctgtttgctagatatccgagtgaaggagcctacttttgaatctctatgcagaggagggaagaaacagtatgaaccgccgaggtatatgagtgttaatacagcaatcgagcagcttctggaagttgagcaaaagcatggagattctgtttatggtgaagacacacagtgtgtgggctttgcccggcttggctctgaggaccagacgatagttgcagggacgatgaagcaactcgaaagcgttgattttggagcaccgttgcattgtcttgtgatagtaggcgagactcatcccgtggaagaagagatgttagagttttacaaatacaaaagtggaaactaaaagaccacaaaactaaagaagactcttcttatcattactcgcaaagcttcaaggcagagcaggaggaggaagagattgaaactaggaactgataggtgaaatactcttcttcatttctattgactttcgaggttttggtagtgaattttgtataagcatagttatggtgtgacttcgaattggaaaggtggatattgaaatattcatttggctatagattgaggtggattttgtatcaaagctttgtttcagagataattttattttggcttggtttggtttggtttgaggatttgaaaccaaactagaggtcgtttcggtttgtttttgttcggtctggttcttgagggttgattacccttcaaaagatctttgtttagtttatgattgtctccttaaaccaccacacgtccaaagattgtattttattattgcccctaagttagaactgagaaaactttgtaacgttcaaatataatgatgtttatagaaatggaaacgtcgggttaatcagaatttctatgaaggaaacgtaaaataaaaatctaacacatggaaatatccgacttagttttagatgaatcaaaatccgagtcttacttttttcaaagctgggataaagctctggtcctaattgagaccacaatttagaaaatcatgacttcttttttaacaataattccactcaaaagtcatttaattttttgacaagtaagccttttaaggaggctgatgaatgatagatgatgcacaaacgatgacgtaggattatttacgtaacgaggctgatgaatcatgaacgtaacgtagttcaccaccattcagaaaagagaacatacataaggaataatatgtctggctaaattgtcgcatgacttg

SEQ ID NO: 29742 - DNA, 1343 bp, Arabidopsis thaliana landsberg
gaatggtaaataaaaaaagagtagaaattagagtgaggaatggatgtgtatggttctgagattttaaatagaagtaggaaaagcagaattttacctaggatcctctcttgtctttcaataggatctgcgttgaatccgggtttcgctgttgtatgatgctggaaaatccaaagatttacatttacgtaagtacagagaaactcaaaaaccatgagggtaaaaacacaagtataagatttttaataatcacccttgttcgtgaactagaaccagagctggatccgatttgaggatactttaagactgtccagtcaaatacataatcgaattgataacctgtaagagtttcaacaatatgaaaaagataagatgagagtggcttgaaacagtaagcgaataaaatttctcggaataatgatgttaagataagaaccttctcggataaacaagtcacggaaaagcctcttgaggtaagagtaatcaggtttgtcatcaaaccgtaaagatcggcagtaatgaaagtatgaaacgaactcggacggttggtttttacacaatacctacatcgaaacattccaagctcagttagaaaagctagattacctaccaatgccaaaatgaaaatcctttcggtttgtcaagttgttgtaacctaacctctataggagttgacactttcttctcgctgattctgtcatacttctgcttttttgtcccagcttttaatccctgccaaggtaagctgatagcccaaaaaaacatatggtttaaactctgttcaagaaaatatacagaattttacagactcaggtagagaagctgtagacgctaaccttcctttgaggaaatacataaggatgtaaccaagagactcaagatcatcccttcgactttgttcttcaggttcgcaatgccagaaaacaaataacagctgatgagtgtcaaaccttataactcaaacacataaggagagtgactggaacaaattaacatgaagcaggtcttgtcgagcttaccaattcccaagtgagtgttcatactagcatatctcgcagttcctgtcaggtttttattttccctgcaaatgagaatcatgggaaaaattagcgtttccagtcatcacataacaacggaatcatgctcaagggaagaacattcaagagctgatacaatgatcgcctcacctgtagggaatgtgctgatgtgttgtactatccctatacttcttagcaagaccaaagtcaatgatgtataccttagagaaggattaaactcggtcaatacaatgatgtctccaaaagtaaaataagacccaaaggatatagttaagacaataagatgat

SEQ ID NO: 29743 - DNA, 1723 bp, Arabidopsis thaliana landsberg
gaggagtttgttgatatcttaagccagtcatcttggtacctgtcacaggaaaaagatgaatacataatgagagctctaaatctccagcaatacagtatgtaatcaaattctcagatatattaacaaaaggaaatcatgaatacttcatgaaataacccgatcacaagggcatcttgatcaagaccaaattattttgaaggaagactgctaatagaacagacagatatacatacccgacaagtatagcaggtgatggaagaacaaaaagtgtcggtcggagtaattctgaactgtatatgtcttggctctgagccgtctcatctcctttcccaccatctattgcatttgagactgcttgtttgccaaaatatttatcaataataaaatcatcagagatattgacaccattcactcttgtgtagcaattaaaaccagtggaaacagtagagttcaaggcaatgaaaagcaagcgtgagactgagaaataatcagaataagcgatctaccttcactcagggctgactcagcagtaaatccctcagaaatagatcctccatcccccgattgatttcggcccttgcaccaatctgtaacagataatggaccatctgactgaccaaatgcagatttcagagctgttttgatgtcagattgcagaagagtaatgacagacgaaggaaaaacctgaaataaaaaaagaaagcttcataaccaggtttaaactgacataatgtatcattgtctataaccaacagtcgcccagaaaagaaaagacgtagaagcaagagaaatatcaataagctcaaacttttatacgacaaatctgtgaccacttaatatttctagcccaaactaacaattaagaacgtcaaacattggatagcctcatttacatgcatcttacaccattttcaaagcttacctcagcagagagtggatcaacaagcttgacaccagcaatgtccagagaatggcaggaagccaaagttcccccacaacctgcatggccagcagagggaccacacgacaattcccgtctccataactcttccaatgcaagccagccataaggtccatctccacaatctgaatccagagctaaatcaacaaaagaggtagcttgctgtacaagtagcgctattccatctaggagatcctgcagtggttgcctttgaccataagaaagtaagctgtcttcgctaaatgaactatggggcaaggatgaccctgcttcaatatttggcgaactagcaggttttgctgtttttgggactgaaacagtccgccatacgccaactggtgcactcatgtggctatccaacattcctccgtcaaaatctccagctattctggtaggtatatctttcttatatatctcgttccttgcagatatgttgtctgtcagagtactaggctcatttggcagctggttaaggaaaaagtttccgctaagcctagtcagactaacaggtgaactgtgctttgaagaagtgattatgtgccgcatcctacacatgaaagcttggaacataacacttcccacgtctgttgccagcagggtctttgaagataataaggtactaacaacagcagatataccatcagtttttttcccctgtacgaccttaacagcattcgcagcactatgttttgagtgtattgattgagagacaccctcctttgtactacttgtgtcacttgatactgtaagtagcttatcatg

SEQ ID NO: 29744 - DNA, 2008 bp, Arabidopsis thaliana landsberg
aatactaatcagcttggagatacgttcacttggaatcagattttgcaaatccaatccagagtctattctatccataagcaattgaaggcattcatccatgaagaactgaacaagagtaaacacaaataacgaaacttaagaatagaaccaccaaaatccaagctttcaaagctcaaaatctacagaatttactgattcccgagacgccattacctcaacaagagcagcttctttcctggagaaagacccaacaatcgaaggagacacaccaacatcccttgaaccagccatcatcgcttcttccgtccaacctaacctcggctacacaaaactccaaatacagaaatgaatcactaaaaggacgaaactttgaggtgaatctatgaaatttatacacaccacgtgacggagagacgcagagagaacacgagcctgctcttcttggaactcagctctcggctttctgctctcatgtcggcgttgtccttcccctgtacccgtagaagacgacgccgttggacccgattgattagggttcacagactgattacccattggtgattcagtattaccaccaatcgacgaagtgcagagaccggaagtgtaagaggaagggatgattgtagacctgagcttcggtaatcggaggagacgggtggtagtgattccaccaccggcgagaagacgcttcgccgccgttcggtacatcgttcgccggagtaagagatttgagttttcgtgacacgtagatgagatcgttgccacgagaatgtaaaagagcttcctttcttcgtaaccgaccccgctaacgaagtgaattgggcgttttcttaatttattaattattttattggcccactatttctcatattttcttaaatgaccaaaacaaatttaaattttataaagaaccccattaccattggagaattcagaatcagcatgttaatattatccttcacatcgaaccgtacacgtgtcacgtaacactggcttcacaaaattcttctggataacaaagcccataacatacgagttccatacaatcaaagatgacactagctagacattttcgttttcatctccccacgaatcaaagatggcttttgccattgcttctgctctcacttccacactcacattatccacgagcagagtccaaaatcctacccagagaagaccacatgtagcgtccacatcatccaccggtggaagattaatgagagagcgcttggtggtggttcgtgccggcaaagaagtttctagcgtctgtgaaccacttcctccggaccgtcctttatggttccctggtagctctccacctgaatggctcgatggcagcttacctggtgatttcggtttcgatcctctcggtttaggtacatatacacggaatttgtcgcattcgactcataaaactctaaccaagtgttttatagactaaccagtttttatttcatagggtctgatccggacaccctcaaatggtttgcacaagctgagcttatacatagccggtgggcaatgctggccgtgaccggtatcataataccagaatgtctcgagcggttaggtttcattgaaaatttctcatggtatgacgcagggtctcgtgagtacttcgcggattccactacgctgtttgtggctcaaatggttttaatgggctgggcagaaggtagaagatgggctgatttgattaaaccggggtctgttgacatagaaccaaagtacccgcataaagtaaatcctaaaccggatgttggttaccctggaggtttgtggttcgattttatgatgtgggggagaggttctcctgaaccggtaatggttttgaggactaaagagattaagaacggacggctcgcgatgcttgctttccttgggttctgtttccaagctacctacactagccaagatccaattgagaatctcatggctcatctggctgatcctggtcattgcaacgtcttttcggtgagttaaaattgttatgatcatttatcat

SEQ ID NO: 29745 - DNA, 3257 bp, Arabidopsis thaliana landsberg
  unsure (1)..(3257): unsure at all n locations
cctcacattcctcttcgccggaattgtctcagctcgtgactggaacatcctgagccagctcaaaggaaccacaaccaccacgaagactagccaaaccggcgtcacatctttgaaagctcccaacctaaacggatactgtgagagctggagagtcaacgtggagcttaacaacataagggactttaaggtggttccacaggaatgtgtatggttcgtccaaaagtacatgacctcatctcaatacgaagatgacgtggagagagccgtcgatgaagccatcctctacctcggaaaaacttgttgcgagaagaagacatgcgatggcatggatgcttggatctttgacattgatgacactcttctctcaaccattccttaccacaagagcaacggttgtttcgggtaaataaactaaacttaaccatatacattagccttgattcggtttggtttggtttttggctcgatttatggatattaaagatccgaattatatttgaacaaaaaaaaatgattatgtcacataaaaaaaaattggcttgaattttggtttagatgggtttaaatgtctacctctaatcatttcatttgttttctggttagctttaattcggtttagaatgaaaccgggattgacatgttacattgatttgaaacagtggtgagcaactgaacacgaccaagttcgaggaatggcaaaattcgggcaaggcaccagcggttccacacatggtgaagttgtaccatgagattagagagagaggtttcaagatctttttgatctcttctcgtaaagagtatctcagatctgccaccgtcgaaaatcttattgaagccggttaccacagctggtctaacctccttctgaggttcgaatcatatttaataaccgcattaaaccgaaatttaaattctaatttcaccaaatcaaaaagtaaaactagaacacttcagataaattttgtcgttctgttgacttcatttattctctaaacacaaagaactatagaccataatcgaaataaaaaccctaaaaaccaaatttatctatttaaaacaaacattagctatttgagtttcttttaggtaagttatttaaggttttggagactttaagatgttttcagcatttatggttgtgtcattaatttgtttagtttagtaaagaaagaaaagatagtaattaaagagttggttgtgaaatcatatttaaaacatcaataggtatttatgtctaatttggggacaaaatagtggaattctttatcatatctagctagttcttatcgagtttgaactcgggttatgattatgttacatgcattggtccatataaatctatgagcaatcaatataattcgagcattttggtataacataatgagccaagtataacaaaattatcaaacctatgcaggggagaagatgatgaaaagaagagtgtgagccaatacaaagcagatttgaggacatggcttacaagtcttgggtacagagtttggggagtgatgggtgaccaatggagtagctttgcaggctgtcctcttcccaggagaaccttcaagctccctaactccatctactatgtcgcctgatcaaatcttatttactaacaaaacaataagatcagagtttcattctgattcttgagtcttttttgtctctctccctcttttcatttctggtttatataaccaattcaaatgcttatgatccatgcatgaaccatgatcatctttgtgtttctttttcttctgtattaccattttgggcctttgtgaaattgattttgggcttttgttatataatctcctctttctctttctctacctgattggattcaagaacatagccagatttggtaaagtttataagatacaaaatattaagtaagactaaagtagaaatacataataacttgaaagctactctaagttatacaaattctaaagaactcaaaagaataacaaacagtagaagttggaagctcaagcaattaaattatataaaaacactaactacactgagctgtctccttcttccaccaaatcttgttgctgtctcttgaagctttcttatgacacaaaccttagacccaatttcactcacagtttggtacaacctcagttttcttcacaacaaattcaaacatcttacccttatattacctctttatctcttcaatcatcaaaacacatagtcacatacatttctctacctcaccttctgctctgcttccgagctcagtgtacctcgccatggaaccaaacaccatggccagcttcgacgatgaggtaagagaaaacaaaaccgaaacttgtttcctaggttttgttctttaccaaattctttcatttggattcacattaaaatctcaacgtaatnnnnnnnnnnnnnnnnnnnnatcgtcattcctcattctcggctaagatttgcaaagtctgtggcgatgaggtcaaagacgatgacaatggtcagacttttgtggcgtgtcacgtgtgcgtttacccggtttgcaaaccttgctatgaatatgagcgtagcaacggtaacaaatgttgccctcaatgcaacactctttacaaacgccacaaaggtagattaacttaaaccctgttttcctctcaaaactatatctagcttgactctcatactggtgaattgttttgcttgaaggctctccaaaaatcgccggagatgaagaaaacaatggtcctgatgattcagatgatgagttgaatatcaaatatcgccaggatggttcctccattcaccagaattttgcctatggatcggtactatttgactttgattcatgttttttctttatagtctctctttcccatttggatcaaattctgagtattttctcggtaatacaggaaaatggagactacaatagtaagcagcaatgccgtccannnnnnnnnnnnnnnnnnnnnnnnnnnngtggtataaatagaaaatataagtgagatatatacataatctaaacgcaaattttgagacctgtttctgtgtgatttgatttgaagtgttgggaaaagactttgaagctgagagagatggctacacagatgcagagtggaaagaacgtgtagataaatggaaagcgaggcaagagaagagaggtttagtgactaaaggagaacaaacaaacgaagacaaagaagatgatgaagaagaagaattactgtaataaacaaaaattttttttttttttatctcaagtactaaagacttgagatgtagtaact

SEQ ID NO: 29746 - DNA, 2312 bp, Arabidopsis thaliana landsberg
  unsure (1)..(2312): unsure at all n locations
ccattttcttaccctttctttgaaaagtctgatcattgtttagattcataccaattggtctgagtagcagtagctgatgatgatgtacattattaactttgtggttactgttgtttggctcagggactcaactgttgagcaccacattgggtgtgaaagagtatgtggagaatgaattcttgaaactggaacaagagatattactgcctaacaaagatctcttctcatcccgcataacacttgatgacttcatatgggcgtttgggatcctcaagtcgagggctttttctcgtctccgtggccaaaaccttgtcttgatccctcttgcagacttggcaagctatcttcttgtttcagatattgtctagtgaaaacttcagaaaataatcttcatcattgatgcttggctcagcagagaatctctgacttcaatgtttgaatttgaacagataaaccataaccccgcgataaagacagaagattatgcatacgagatcaaaggagccggccttttctctagagatctcttattttccttgaagtcacctgtttatgttaaagcaggtgagcaggtatgctccaaacactgtctacttagttttctccctcaagagtgtaagaacaagccctttaatactgtttggatgatctcttccataggtatacattcagtacgatctgaacaaaagcaatgcagaacttgctctcgactatggttttgtggaatcaaaccctaaacggaactcatatactttaacaatagagataccagaatcagacccattctttggggataagttggatattgctgagagtaacaagatgggtgagaccggatactttgacatagtagacggccagactcttcccgctggtatgcttcagtaccttcggcttgtggctcttggcggtccagatgctttcttattagaatctatcttcaataannnnnnnnnnnnnnnnnnnnaattgcctgtaagtcgtacaaacgaggaactcatatgccgtgttgtcagagatgcctgcaaatctgctctgtctggttttgatacgaccattgaagaggtatatatgttcgagctcttacttgtactgtctttgcagcttaagactcatttcttactcgtcttcatcgtctgttgtaggatgagaagcttctggacaaaggaaagcttgagcctaggttggaaatggctctcaagataaggattggtgagaagagagtgcttctgcaaatcgaccaaatcttcaaggatagagagcttgaacttgacattttagagtattaccaagagagaaggctcaaagatcttgggttggttggcgaacaaggggatattatcttctgggaaaccaagtgagaattagcttagcttgtatagcttatcctgcagaacaaactcaaggctagaaagaaaatctttactggtttggtctcagaccacatagacttgaatcaacctcaagacatcagagttgagagaccacaatttgtatgttaggctattgccaaaagcaggctttttgaaattctataagacgagacataatcttcttttagttacatcttaatttacgtaaaactaaataaatcaagatcagcaactatgcaggaaaattgaaaaaattacaaacaaaaatggaaaaactcagggaaggaactatgcagctcccgttcaagtgtttgacatgccgtcctcttgcggaagcaatgagatataatatgctaaaaacatgacttcaatgtgttaaatttctatggccaaacaggtcgtggcaatttgtaccttcacaaagacattcttgaggatttgcgtagaagtaatcttcctccttaggtttgtcagagattactcttcgatgagtaggtgctcctgctcgtctctcatgggcttccttgactgctactgtaaactgatcccacgtgagggtcttgttgtgatgtaagtctagtagctccacgagtctcttacggtcaagcaggattgtcttcttatatccaaggtatctgcaaattcaaatcagatatagaccaataatggttatatagaatcacaggtttggttattcttaacaccacctttttagttgtcatgaaattgaatgcattcgacaccacaaataatttacctacgatgaccttccacgacttttgccatgtttccatcatacgtaggaataaaagtgttgctggccacagataccatgaaatctagagcagccatttgagacgaatggttctgaaactgttgcagctctgctgactccaatagcatttccttctttacctataaccacaggtgagtaaaact

SEQ ID NO: 29747 - DNA, 1200 bp, Arabidopsis thaliana landsberg
  unsure (1)..(1200): unsure at all n locations
ccccaggttttccctttgaggggacttgaagataaccaaggaccagggccttttcgcaagttgcttgtgctccaggctagtattgcttctgcctcacctgtagaacatcatcaaggataatataagaaaaagccagtgggagatagcaaccatattgtgcattagcagtaacgaaaatagttcctcatgcaccaagcattcatcagtgtacagtggaaaaataagcaaatgaaaactaactttttcttctagtgaaactaactaacaatggacataacatgcaactctgatgtgttctcgatcttaatggctcactaaccttgtgctcgattcacctggtccatctttgctgcttcagatgccaagattacagaacttttcttaccatcagcaatgttgatatgggattgcctttctcctgtcaaatttagtaaagcaatgattagaaacatgctaagcaggcctcttcttttccaaatgcaaaaaacgaaactcaaaaggaataacagatagattttagccaagaataacattatgagccgtagcaagcactgctcagtctcgaagatgagttctcaaagacaagtcagtcaaggttaccttcagactcaagaatctgggctctctttttacgctcagcttcagcttgcatttccatagcagctcgcactccatgagggggcataatatcccctggaaaaacatgaattagaaataggaaaaaacagatatgtaactatcaccggaaaagaaaaaacacgaacaacttacttatctcataacgaaggcactgaagnnnnnnnnnnnnnnnnnnnacattgatggcttcctgcaagaatatatatacatctcaaaaatccatcatatattttcttcttcaatggatatacttcctctaaccatcatgtctccttatgatttgaaaaagagacgcaaataagttcggatatccaacaaatacaacatgactaaatcccccagctgaatctaaattccatatacccaacttgtggtatacaaacacactgccagatgtgactaatttttccaactaaacagctcaagccgcaatgctcagtagggagtaacaccaacagcaatattcaagctaacgtgacttgactntgaaattgatcaacttagcggattctaaattctttgaaatgcacaggagnctaagtacggtgagtcctaacactt

SEQ ID NO: 29748 - DNA, 3644 bp, Arabidopsis thaliana landsberg
gagtgttggctagagaacaattcttccttaagcatttatcatcgtttaaaactcagaattttcatatttgagtatgttgtgattttttttgtttttttttcgtattgatggattgattttgttattaaaattcgtctaaagttgatgaaattgatggtttataagagaaaaatcatataacaaagttgtttaactgacatttatttggataagctatataaaaataagtgatctaattggcaaattagaattgacttttgcataagctaaataagcttacataagcatgtaagcaaattactataataccctcaagagccaagtcagcagatgttaagattgtaaaattggtaagaacgctaattgggtcaaatcgacaattgattgatttgggtttgttcattacattacccgctttgctaggaagcctgcgatccagtgttcctcatctctgcgggtgcaccgattcttaacgtacacccacttccccaggtttccaagatcccttcttcttcttcatcctaattcctacaagtctgggtcctgtctcaattcaattcccacgtttttgactttaaacggctttctggttttgataacggatcgtgttctatcttggtcaaaatcatggagattcctcgccggacctttgttttcttcttctctctttgtctcttgtcgtcaacgtctctctccatcgataattttcaccaagcgtaagtctaatttcttcttctcttcttgccattccctcagatttgtattcttctaattggcaaattatcacaatttggctttaaagtcttgatttttatctttgtttctggactattatagtaccgcatcttgtagttgtagtaatggcaatgggaaataaatacacaacattgtagcaatggatctgatatttgattgaaagacaggttttttgtttttgtctacatgagaacctatgaatcttcttgataatgtattgtctattgccagttgtttctcaagtcttaggtttgttataagccacattgttgctagagaatgttaccactgtataccagtagcaatttcctgtcatcaactgtagcaaacagctcctgatgattgatcagttgtgatgggcaaacactttttggaaatcatttgtgcttgttttttatgcagttttcctattgttgaacctgctccgggtcatacaaagcttcagcttagcagagaaggtctggaagcaattagcagaattacaactcctatttctgctgttgcggtatgtgacagtgatgtttgactcattatcaattcttcgtatgttctttctatctgaacctggttttctcggaccaagatatttgttactttgtttctcacgatttgcttgttatttcctttggtgttgaaatactaggtgattggcccatatcgttctggaaaatcatttctactcaatcagcttctttctctttcttgttatgaaggtgcttcttatctcatatactcgggctctgcggtttacttactttttgctactcaacattgacttccaatattttcaaattcatcaggttttggtgttggacacatgcgtgataccaaaacaaaaggtatagcaacaatgtctagaggacactaccatctttcaactgcatatatatatttctagctaataaaggtttaactttttggttcggaatccacttcattgttgcatacaggtatttgggtctggggaacaccattagagctggagattgatggagtaaaaacttccgtaatttacctcgacactgagggattcgaaagtgttggaaagtcaaatgtttatgatgaccggtacccagacagttgcaacatatgcacatttaaacttttctttgcggaagctctgaatatctaatcaatttctgtgtaaatattcaggatttttgccctggcaacggttatgagttctgtgcttatctataatctgcctgaaactgtaagttgtcctacctctttgtttgcccagattgcttatgcttctagatacattatacttataatcaaagagagtaaatccttacaggggtttctttatatcaatatcaactatcaagtcattagtaaaaccaaagaccaaagtgttttcgaagacctaggtagttcagacctaggtagttcatatggtatcaaacaatcccttgtgatgtttagttagaagtatacaaatatggatgtgtaacagagtagctagtatttaaaagaacttcatctacaatttctctctctgatatgagctctcatcagatccgtgaagctgatatttctcggctctcctttgctgttgagcttgcggaagaattttatggaaggtttgcccaattgtactctgcatttctgtcttgtttaatatgattgcctgcctctatgaatactgactgggttctgtttgattggctcatgcaactcaattgacagagtaaaggtataccctaacggaatggctgttattcttgatccatggcatccttcaaaacttcgtttctgatttttatatatcctgtagggtgaagatgttgcttttgaaccgtcaaagcttctgtggcttatccagcgtgattttctgcgtaagtgcatggtgcttttgactacaacattcataatagttccatttaaacagtgcttatattctatgtaatctctgcctgttttgaaatgcttttctttctcttctctgatataacaagcagtatttttgtgtgctcctggtcctgtgtgatccatttcaatgttccagttttctctgtgttttatgcaagtgatctggtcatgattaacactattccaagtttccaactttatgcagaagggaaatcggtgaagcaaatggtggatgaagctctcagacatgtccctaatgaagatggttagcgctcctttttgttcttcaactaatgtctcctagacctttgttaattgtgttttcttgtttcttatgttttcaggtaacaaaaatattgaccaggtatgttctcttgtgttctgcatcgtacaggtaatcatcattattatctcagaaatcattcttgttgtctcctttttcaggttaaccagattcgggactccttggctataatgggtgacaacagcacagcctttagcttaccgcaggtaaggcatttgtgtgttctactttgcatattttccagcctttctttcagaaagaaaatacagagcatgaaactttaatcaaaatggctatctttgtgcatgaacatttatggttatctttgaatatctttgctgaatcatgcgcgaatacaaaactttcttagtgtggttgtggtggttacctttaactttaagtcatcctgaagtgtgcacaaaatccttagatttcagtgcttgtgtatccttgaagtatagcttttccaaagttcttgggaggaaattttattttttctccatgtggaacattatgaaatgattgtctgatctgactcagacgtggaatctttgttgctgccttgatagggtggtcttcgttttgataactttgttcttgtttttgttatatagcctcatctcatgcgtacgaagctgtgtgatcttgaaggatgagaacctggattctacatatgttgcaaggcgtgaccaattgaaaaagctcgttg

SEQ ID NO: 29749 - DNA, 2204 bp, Arabidopsis thaliana landsberg
gaagacggacgaaaatagtcaacccaccatgcaaacgctaccgtttctaattggttttaattataaatcaccggcgatctacgctaccggtaacaagatatccaattccgtggcgtctcgccggaaaaaccataaacaaaaggctacacataaccccaacacccaccggaacaatgtccaagacatgtttcgtctctgcctccggcgacggataaaagcaatcagttatatacttgtctctcaacgcaaccgctccaaacactaaaaccgacaacgtagcgtggatccaatcaacgaaccgcatccgatatttggctaaatcgggtaaacctaacccggacgggtcaggatagtcaacgacccacatgcctttgaacgttacgaaaccgaagtagatagttccatcgtcggctttaacgctatcggtaaaggagctgacgaagcaagacgcggctaagaggaaaaggagaacggcggttaggaaacgcgttgcgtggtcgcaaacgccgtttgaagtgaaaaccggcgttaggagttgaaacgcgaggagtgttcccgttgggagtaggtttgagagattggctgctgacgtcagggtgtttgacatggctcgctgagacattgacatctgtctcttgagcacccgggattctgacggtgtctgatcggataactcgtcgagctccggagccggagtgtttgcgtttcttagccgaagggcagacatctttttagttttgattcttttcaggtttcgatcgttggattgatattggtgaagataatgatgatgatgtttttttatagatgctacgatatagaaacagctaatgataacttagtttacgcatagtggactgtctgtatttaagtaatctctctgttcagttaacttgtacgataaacaacattatacacgacaaataatacacgactttttaaagcttttaacaagatagaacataatgctgaaaacagtgattgagctagatataactgtgtcatattctgcttgttcttcgcacgctagtccttctctgttctcacgatttagggtttctttcccaatgctctgttttgttcattttctttctttggataaattgcatacaaaccctcaaagtttccagtcttttgcaaagttgtagttatttttatattaaatatcataaacaactgattgccaaaacgtcgtcgctcttgcaaaagtccacagatactagtagtaagtaaagtataggaaaagtggaccaaagaaacaaaacccatacaaaaaaagtcgaatccaaatctctctctccggcgatctcatccatggcggaaggcggcgaagattcccagcggttgaagaaaattgcggcggctgccttcgactacgaaaacgacgctcgatgggccgattactggtccaatatcctcatccctcctcacatggcttctcgtcccgaggtcgtcgaccatttcaagcgcaaattctaccaacgctacatcgtacttactactatcttccctactcttgaatttgcttatccattttcttcattactttgagtttcgagtttgactttgtgttgtgtgcgctactgatttgggggatttagtgtggactttgaatcttaggttttacaagtgtggttgttgatgttctttctgctaaattgcttagtccttgggtccgaatctcctcgtgattaggttattaagcggagggtagggcttttcattgaatattcgttaggtcctgtttataatatgtgaagccttcgtgttgttcatctttgctcttccctatcaagatgtaatctgcatttgtttctaaatctagggtgcttgccatgtccttcttttttgcaggatcctgatcttgttgtggagcctatgtcgacttcatcttcgtcttcacaatctgccaggccaactgctacatctgcatcttcaactgcatcttataatgcaaatgaacaagttcgttcacggaactcaggtcaactttctttgtctgatatattcttgaactcaaatgagcttttcttattactaccaaaaacttacctaattgtgtgcctcaggatcggttcctcaaacctctgggccatctgatacgactggtgcaaccccaagttcaatgcgctgggatgagcagacgattcagttttcagtcaatgcttgggtaagatacagtttatcagtcacagtaacttctt

SEQ ID NO: 29750 - DNA, 2216 bp, Arabidopsis thaliana landsberg
gcaacctctattgtagtgtcaaattcgtttgcctacattcttttctttcaccagaaaaaggacgtgtcggagggaattatcactcttctgctaatctaataaacacgttctttattattacagattttaggaaaagctctaggaattccagagaatagtgtcaagacctatacagaagcagagattcgtgctgggtaagttaggcctttacttcctagtacttagcttaaaccatacaagcaatctgattgaatcatttgggaatatttgctgattcttttcttgattattttactcatcatcctctttctgtaattttctctaaccatacttaaggttctgtcttacagaattattttccagatctcaaagctctgcactgttcttctaaaagctgtaagaaattcacttggttctgagggctgggatgtcgttgtacctggatcgacgtctgggacattagttcaggtgcgtgtagaagggaaatgaatacatagctgagattttgaatttactacaccgacatatttcgtttattagaaggaattgtcatttcaaaggcaggtgttaactaaaaagtatatggtttcggtgctacagaaatgtacagtttaaaagacgatatgtgttaactgttacaacttttactgatagtagcaaatcactaataatacaggctggagatggaacaattactgtctttgtgttctagattggctgttactgcaccattacttggttgaaaaatttcgacttatgcctcaggctttgtaactttgatgagaattcgcatttgtagatcatttttctggctcttgtgactgtaggttgagagcattgttccgggatcattgccagcaacttctggtggtcctattattctcttggtcaataaagctgatggcgatgaagaggttttgacctacattcaacctcaccatgattcataacatcatactaaagattaccttataacttgctttggcaggtaagtgctgctaatgggaacatagctggagtcatgcttctgcaggagctgcctcacttgtctcaccttggcgttagagcgcggcaggcactaaccttattcccactttttttactccctaaagttttactagagaagtgcattgttgaaaaatcttcatttcgcatacatttttacaggagaaaattgtctttgtgacatgtgatgatgatgacaaggttgctgatatacgacgacttgtgggaaaatttgtgaggtgatttgtccaatgttgtcattttattgattttttccaatctcccgtttaaccagaaaactcatttctctccttaaaggttggaagcatctccaagtcatgtgaatctgatactttcaactgagggtaggagtcgcacttccaaatccagtgcgaccaaaaaaacggataagaacagcttatctaagaaaaaaacagataagaagagcttatctatcgatgatgaagaatcaaagcctggttcctcatcttccaatagcctcctttactcttccaaggtaatcttttgatatctctgtgattccgtacaattgacatttagactgcttgctgatatataactttgatccctaggatatccctagtggaggaatcatagcacttgctgatgcagatgtaccaacttctggttcaaaatctgctgcatgtggtcttcttgcatctttagcagaagcctctagtaaaggtaaatgtgaggggacaaaattgactggtaccaaatcttatgtctttctaaattactgtctggtttctgatgaatatgcagtgcacagcgaacacggagttccggcatcatttaaggttccaactggagttgtcataccttttggatcgatggaattagctttaaagcaaaataattcggaagaaaagtttgcgtctttgctagaaaaactagaaaccgccagacctgagggtggtgagctagacgacatatgtgaccagatccatgaagtgatgaaaacgttgcaagtgcctaaagaaacaatcaacagcataagcaaagcgtttctcaaagatgctcgtctcattgttcgttcaagtgctaacgtcgaggacttagccggaatgtcagctgcaggactctatgaatcaatccctaacgtgagtccctcggatcctttggtgtaaacagattcgaaatgccaagtttgggcttctctctacacaagaagagctgttcttagccgt

SEQ ID NO: 29751 - DNA, 1783 bp, Arabidopsis thaliana landsberg
  unsure (1)..(1783): unsure at all n locations
ctttatagcctgaacttgcaaaaactatgttgtcgaacaagttaagtttctttgtcaaatcaaaggcaagacctgaggctgttaaacttgtcggctccaaaggacttgtctttatcgaaggtgctgattgggttcgccatagaagaatcttgaaccctgctttctccatcgataggctcaaggtattttaatccttctttcttagcttgacttgagaaattaaaccttagagccgaataacttaattttggttgtaaatttctcattttgttgatcagatcatgacgaccgtgatggttgattgtacgctcaagatgttagaggagtggagaaaagagagcactaaggaagaaacagagcacccgaagattaaaaaggaaatgaacgaagagttccaaagactaacagctgatataatagcaacctctgcgtttggaagcagttacgtcgaaggaatcgaagtgtttagatcacaaatggagcttaaaaggtgttatacaacttctctcaaccaagtctctatccctggaactcagtaagttaatcattctcctactttcagttctcaaacaagattcttaggttttgacatatattggtcttgtttcttgtattctaaggtaccttcctacgccttcgaacattcgggtatggaagctggagaggaaaatggataactcaattaagagaattataagttcgagactacagtcaaagtcagattatggagacgatcttctcggaatcttgttgaaagcttacaacactgaagggaaggaacggaagatgagcatcgaagagatcatacatgaatgcaggactttcttcttcggaggtcacgaaactacttcgaatttattggcatggacaacgatgttgctgagcttgcaccaagattggcaggagaaactcagagaagagatattcaaagaatgcggtaaagaaaaaannnnnnnnnnnnnnnnnnnnnnnnnnnnnnagctggtaatgttcatttttttcaaagggtctcttgtgagacaatgtttcttgcggttgaagaaacctgtttatttcttgcagatgttcatggtgatctttgagtcgcttcgactttgcggaccagtgtgagctttggcccgagaagcatcagtaaatataaagttaggtgacctagagattcccaagggcacaaccgtagtcatcccgcttctgaagatgcatagcgacaagaccctttggggatccgacgccgacaaattcaacccaatgcggtttgcaaacggcgtttcccgagccgccaatcacccaaacgctcttctagcattctccgtcggaccaagagcttgcattggccaaaactttgtcatgatcgaagccaagactgtgctcaccatgattcttcaacggtttcggtttattagcctctgtgacgagtataagcacacccctgtggataacgtcactattcagcctcagtacggcttacccgtaatgcttcagcctctggaagactgaagtaaaatgcccaaataaatcggatgtcttaatgaatatacctcacgtgtgtgacaagtctcctccatataggccggcttattgctgatggtgggggcttaacaaatcatccttgttaagttattgggcttttactatctcagtttggaacccttgatgggctaaatagttattaataatttaatatattgtgacattgcatgtataattgaaaagtggaagggagtgtgtaacggttatgaattcaaaagccaggctaaagcaacttgaaaacatgagtaatcga

SEQ ID NO: 29752 - DNA, 3057 bp, Arabidopsis thaliana landsberg
gcggaccatgccctccactgtcgaaccatgaccaagaagatatccttgacgatgtgtttatcgatggagattccccaaacctcgatgaatgctgctccgaagagttcatactcgaccgaaacgactcactgcttcccagctccggtcctgcctcttcctctggttgaatctgactctttgtagcggctttcttaggcattggaggtaaccctgattttttattccggttagatgtagttggtccagtcgccgaggtttcttcttttgttggtgagcttatggtggatgaaggctggcttgaagtagatatgcgctttgagtggcgtttagagtgaatctgaactggtggtggctcacctctaacatgaccatgccaaggaacagcggctgagacatctttgcaatgaaaatgttcgtgagattgtgtcgtgagtgttgatcttgttcggtgaaagtcattcttccataagtaaacttgagagtcttcactcgcacatattatgtatttcccatcttggctatacgaagcagagagttggctacatgtgtttctaaagcctgtcaataaaaagtatcagtttttgtttttgttcatcttggctctagtgcttgtagagaatttacctttgaatttgtgaataacttcagaaccgtctagtattcgaatccgtgaatcagcggatgtgacaagaacttcagatggattcaccggggaaaactatataatggcatcaacaacttgttaacattttagtttactaaagtcttaagaaggattttggcttttaaagaaaggaacctgaaaactagtgatcttccttttcgcttgtgatttcttgttgctctgaacatcaatctgattagtttggctcagcttacaatctgttctacagaagaaaaaagcgcgtcgcaatgaaaagaagtattcaactggtaaacatgatgtttgatacagaaagagcttaggaagaaccttctgtatcgtaagcacgacaaattcctttatgtgacccgataagtgcacccttcaaccgaaaaaaccaaaacttccatcattataaaaacaccataatggatggattttgtagactactccaagaaacagagcaaaaaacagagcaaaaaaacagagcaaatacctgaccgtctggtgtgtagcaagcagcagtaaccatttcatgaagatcactccattccacaacatgtcgatcttgtatgctccatatccttattttagcgtcaagtgaaccacttaagaaataattttcatccactggactgaactgaatacatgtcactgttgaatcaatgagacaatatagtcaaaagtgcatgcagaaaattaatagctagatgtgaagataggatacaaaagatttgtcttaccatagtcattatgggcaaacagtttgagacatgttttggtttctatatcccatagcctgactgttttgtccatagaagatgaaagaagaagctgagatttggaccatgaaagatccaaaatagcatccagatgacctttcaaagagcatacaggcttatcagaaaacgagaagactgtttcaggaacatgtacgtaatccggaatatgattgtgtcgtctcccggatgatccctttcctttctttttcttctctaccacagttatctcatttccagaagagtcacaaagtgaaggatgaataggagtgagacttccttcattcatagacattagttcacattcttgaacctcccacacatgaatgactctatccgctcctccgctcgctagataatgagcatcttgactaaacttgatagtccaaaccgcaccctcatgagcttgaatctcttgacacatatgtaaagcacttaactccttgtaagatttccctgttggtctaactttcacccactcattagctttaccatgtttatgatctttcccctttttcggactatcagtgattccatcgcttacatctttatccgcaacgcgtaaactcatggaatgagctacacctttaatgttcttcaacaatgcagctcctcttctcttacttaacctcacactcttggaaagatacgaattaaacttgcgaagatccattaacggttcgtagttaatcctattcacattctctctacgcataagctctttaaccacaggtgaataaccaacacatttctcaaactcctccaaagttaattgcttccctgtttgcagatcactaagcctattccacattccatcttcatcatactcattcactataaactctttccctgtatcaagattctttatcaagaaaaacgcgccaaccctcgcattcgacattaccgatgtcaacgcctctccaccaccgcgcaaagcttttccatttccacaaaccgcaggtgtttgtctgatcggagtttggtactgacaaatccttgtccttgtaggacaaatagtagaatacgttcttgtaagacgctgctttgagattttccctaaaatctcttcttttcttcgtttctcaatcaagaacctctcaatatctgattccgatcttgacctcgcaagcataaccggaacatgatcatgatcttgttcatcaacctcatgattcatcttcttcttcatcttcttttcttcaccgttactaacaacaggcgcattagaaacaacgcgacgaatggaaacagcactaaccatatctttattactagcaagtcccatcccatggagaagacgacgacgacgctcagatatagatcccggagcagccatccaaatatcgtaatcaggagacatcgccggcgtacgaaatttcctagaggcggtggttaaggaagagacggctgaagaaaacgagagtcgacaatcgtcgaaatcttcatcttcatcggaagaagaagcattagccatgtcgaaagttaaagcagaagagagacgatcatgagtttcgaagaatctatcatcatcttcatcttcaaaatctcctaatccttcccagttcatcgtcattgtcttcttccgatccaatttgtttccatcttccatcatgggccaactagctacaccgaatt

SEQ ID NO: 29753 - DNA, 3599 bp, Arabidopsis thaliana landsberg
ggaagagaattctctgagatatttcactcctcttggtttcagtagtggttctcgtttaggagataggaagaaagggaaagtcctttcctttcaggagaaggagagagttgtgagagaagttaaatccagtttggtggttagtacttctagggacagagttgcagcacatgtgaagttcagggatttatcttcttctggtttcatttccaaggtaacttcattgatctcattataaccattccaaagtttgactgtatggaggaatcagagcatttctaattgtttcctttaccttgtgttccttaactgacatatttagcattccgttttgagtcatattgccccctcgcaacttcttatgttatgcatattactgaactcttgaagcttatgttgatgtttactaaaccgcaggatataaatgctgagtcagtagattgctcccatggatctccggaatgtcagacgaattcggaagatgctcatcaacctagtcctgtttctgttctggagccaatgttttatgaagataacttagacgatagtgaagatattttagacgacagtgaagatcttccttatcccaattttctaagtaaggaacaagttttgtagctgtaaaaatatttgttgttgcatgcaatgtaaaaaactttaataaactacttgtgttaatctcattaggtctagagaatcagctggaaaccctgaaatctgaatctgagagttattcagatgggagtgggatggaagtatcaagcgatgaggagtctgcacttgattctgcaatcaaagaaagcacggaaagtgaaccaattgggttcttggatacccaagaaagcagggattcttcttacattgatgatatcttggctgaagctttactcggggaccagaattgcgttcctggctaacgggatttagtcatcaccccccagatcttcgagaaactggctaagaagtattacacagagacatcttggcatagatctgacagaaagattttgtttgacagagtcaatcaagtcttgtagagattctagaatcctttcagctacaccaacatggaagaaacccgtttctaggaggctaggcactgcgctaagcacatgtggactgaaacaagaactctggaaagtactttctaggcaagagaagcgatccaagaaaaaatcattggccaaagtgccagtcatagacattgatgagtggttagaactcgaagctgatgatgagtcagtggtttgtgaattagaaagtatgatagtggatgagttgttgtctgaggttgtcagcttcatgtagggtatatagagtgattcttttcattctttttttgtttcacattgcattcttacattttgattgagaatagaaacagagtagtggttgcatttggcttgcatcatcaaagggagatgtatagcatttgagaaagttttgtatacaaatagtttctttgtcaggtctaggattggcctcttagcaagtcagtcacattgcttcaaaagcttattgtgtgacttgtacccatttgtcaaagtgtttcaacaaagttttttgtgtgaatgaaacaagattttgattgaaacagtctcatttaaataaatttctttagaaatcaaatttgcgcaacaaaggaaaaaggccccaagcggaagctagtgagcaagaacatataaaaaagcaatcatttcttgttttaacactcattttctcttcaagctttgtaggtaaggtatacactgaaatggaggatggtgtcttgaccatcagtgatatgctggttgtcctggttatgcagagtttccactatggcataccctttggcgtgttcaaacttcccggtcccgcctataaccgcgatctgggaggcatgagaggcggttctgtgaaccccaaagaaactaatggcatcgtctaaagtgtcatgctggtcatgctcaccatgtagcaatacagtcagagaaagagtctgacttgttccgtccagggaactggccaagtaaaagccttgagctctccctataacggctgagccaagctcgtggctttcggttagctcatcatctacaacggttatggttccgaacatgagatgctggagggcagcaccgggaggaaggttcccggcagttacaaaagggagactgttggcgctaagggcatcgttggaatttccgttagtgttttggatgacggtggaggtttgagcaccgccaagtccggtgagaagtggagctgtgtttgggttaatgacactgttgatgttgtttgagttgaccagtgggactccattgtcaaccgggaaaatgctgttactggcctttgagaatggtattccgttcacttcagtttgagctactatacctgtaaccacacgagctgatgggtgagatccgcctagcacgtcatgcataaagaactctagtaatggctctgtagcctctgctggaccggctgggactgtaactgctgatgcagttgtggttgtggttgctagtcctgggttgtcatcggttccatcctcctcctcagcttcggttggagccacagtggggatttggccggtagggactaactgaggctgaggttggatctcgtcaagaagtctggcggagttgataaatgcgaggagattggaggatatgaggaagagaaagatggttatgtgaagagctttggccatttttagtctttggtttggttactcaagttgtctttggtttgtgtttgatgtttattgatggaaggtgtaatgagtttatataaagaggcattggagaatttggtttaaggtggtgagaatggagtggagttgttgtttatttgctttagttgagttagaaattcaactgatcctatattttcttattttgattagctaatgatttgctacttactaacaaatgcatgtaaagatggttttgttcgataacggaaccaatactagaagtgccaatattctactcgtgtcaaagaatgtctcatgcaccttgttgacttatggatcgtctcttaaccatattttgtacacgtccacacataatcaaacaatttctttcaaatattttcttgtgaaatcaaacccataaattattaaatagtattacactaagtcagagagtgacaaacatggtaacaactaattaacataaacagaattcaggaaaagagagaaaaacaaacagacaaacagattttaactatcctttatttgtttatgttaaagtgataactaccctttcaaaggaataccatcatttttacgtttaagctcggattcaaagcctccactttcatcagcaactttcttatccaaccagccaatgatgtcagcaaaaacagtctcgatattctctggtgtctctccatagagtaaaccatgccacatcccagggtacaacttgaaagtcttgtccgaactagatgcaacttcatacagttgtcgactcaccgctttatctgtgcctttatcgtcttcaccgtgcaaaactatgaacggtaatgaaacctgctccattacgtgaaattactcacatgactaacctctttcataaatatcgtcttcttaagtaatgaaatgatcaatgaatacc

SEQ ID NO: 29754 - DNA, 4680 bp, Arabidopsis thaliana landsberg
agaagcttcttaaaatctcatcagcatcaaattcatcatcacagaaaccgttgaatccgttgtttcttctcgcagctcgacatgattgataagcaggctcatcggaaccactgacgtcgtactttcggctagtgtctttgttgctttaagcattggaaagctttagagacgaatttaaaagcttcttcagaagcaggagctttattcttatcgggatgaactttcaacgagagtttccgataagatttcctcaaatcttccactgaacagtttcttttcaatccaaggatctcatagtaatccttcttcgactttatctccctcacgatcgttcgttgttcttccgtggaagacgaagatgatgacgatcccgcggctgatgacgaagatccacgttgacgaagagaaggtcgatccgacggcttagaagactcgttggcgccagatccaggcgaatcctcctccgccgctggttcatccgattgcttcttcagatccgaaacaagatcatcgatcagaagatttggatcaagacgacaagctttctcaagaaatttcaaagcgcgagatctatctcctgcttttatagcatccttgccgatttttaggcatttcaacgcgtcatctttgttaccatccattgttcaacgggaaaacaatttctcgatgatgctatcgaaaactcccgaggaattagagtttctcgaagcgattggagttcatctgagatgtgaggaatttcccaaacgagcgacgattgaaaaatatcgcctcctcttctacaatccctacacagctttcaagcctttctagagaatgaacgactttcacaaggactgcgcgcaaacatgcgtggcgtttttgtatattaagtagagaacctagtgtcgtttaaatcaaagaacatgtatgccgtttttattatcaagaaggggcagtcgtgtcggcaaaaactggggataatcgggctttggttttattcaggcacggttctttgcatttgcaccaggtccaatatatttaagaccttatatatataaagcccaattgtttaattttaaggcccaaaatctatccttactacataaacgtgtcgtttgagatattaagaaagaaactacatgtcgttctaagaaaagaaaaacgacaaggcgttattcttggaaagagctcctccaacggataaatgaaagatcctctctcctccaacgataagagaaccacgagaggacacagcatctgaaatcgtacaagtatctgaagaacataaattaaaattctttactttgtaataatggcatcagagttttgatcggagaatctaaaagtctcgacttttcgaattttgttggccgccttcttaaggacatgaatctcgcggtggctagttttcgcggcaatttcggcgtcttgtcgcaatgcagctcatgttgtagtcttcagtttcagccttttgtagctgctacttccagtctcaattttgggcaaacaggaacatctcgaaggaagaaggatctgaagcttgaaaggtatattgttttattcatcttcttcttttgttaatccgtgaggcgtgagcactgctacttctttgtctacttattctggtggctttgaatttagagttttcagaaagagagagactttggttagagtgaccgagacgcaaacggaaccagaaggcaatgatgatgaggtatttgcttttgtaccaatgtggcttcttcttctagagactatgattctgtttatgatttttcctatgtggaaactttttcgtggtccattagaagtgttagtacatatacgcgtctgagttcgtaagttcttctttgcaggataataaagaaggcaaagagagctctgcagatgatcctcctacagaaattcctactgagttgaattcactgtcaacggttgtgaatgaagcgccgagcaatgaggaggaaaacaaagctcagttcagttctcaggtattgtcttcttacttggaaactaatgcatccatagtgaagttaaagcgcaatttgtaagtttaagtttgggtagtctagtaatttaaacttgaaagtaattgaatctaatttgaaaacattgcataacgtcattacacagctcaatagctagcattgtccatatgcgttgtttcttggttttgtttctgaatgtgttgtactctactgcatttggaataggacggtgataaattagaagttagcagtgggtctcctcttcctggtgtgaatgtaagtattatcatccatgttatttacaaagacgacagcataatgtaatctggttgtttatcttttcacaaaaagttgttgtgaacagccattacaattggacgattccatgagactccccaaggaaaccattgatattctcaggggccaagtatttggatttgacaccttcttcgtaactagccaagaaccatatgaggtgagtcagtgagaaactcatcagtcttttttcctaacgttattaccaactttgcttttaatgaaacataaatacgaggttctgaaattctcttattgttggatctcctgacgtttttgtccaatgttggtagggtggggtattgttcaaaggaaatctaagaggcaagcctgctacaagttacgagaagataaagacgaggatggaggtaacaattctgctttttgggtttcctttcttaactatgatcgttgacaagcacatgttgtgacaaagagtaatagtgtattgctcatcaatctgcagaataattttggtgaccagtacaagcttttccttctcacgaatcctgaggatgataaacctgtggccgttgttgttccaagaaggtccttagaacctgagacaacaggtatattgctatatacttccatgttaataaggatctctctctcagattattaagttttagctggatactacatataatttgcagctgttcctgaatggtttgctgctggttcttttggattggtggcattgtttacattgtttcttcgtaatgtgcctgccttgcaatccgacttactgtaagaacatcttgaacatgttttctctagaacatgttatgcttccaaatcatctaactgaataaaaaatttcctcccatacatgaatttaattgcagatcggcatttgacaaccttgaactgttgaaagatggcttaccaggagctcttgtcaccgctcttgtccttggagtacatgaactgggacacattttagttgcaaatagcttaggaataaagcttggtgttccattctttgttccaagttggcaggtgaagatgcgatgttctatttgaaagaaaaggaaaaagctttcagctgaaatttggttttttagacatttgatgaacatgttttagatggcagataggctctttcggtgctataacgagaatcaaaaatatcgtagccaagcgagaagatcttttgaaggttgcagctgcaggacctttggctggcttttctctaggcttgattctgtttcttatagggttactcgtgcctcccagtgacggcattggcgttgtagttgacgcatcagtgtttcacgagtccttccttgctggtggtattggtaagctttagctctcaatcaaatatgataaagtgttgcaggctgaagctggagagttaatcaatgtttaaattttgtttctttttctcttatagcaaagctcctactaggtgatgcactcaaagaaggaacttcaatatctcttaacccacttgtgatctgggcatgggctggacttctcatcaacggcattaacagtatccctgcgggggagctcgatgggggcaaaatagctttctccatttggggaagaaaggtaacactaattagaatgacttaaaaagcttaacaatgtcttatactattcgtctttgtgttcgagtccatttcccatagtagattgattaggtagtaatcagaattatatatgtctcctaatgatttcagaccgcaacacggctcacgggtgcatccatagcgcttttgggcttatcgccgttgtacagcgacgtggcattctcggggggggttctggatattcttcctgcagcgtggaccgattgccccgttggctgaagaaatcacggtgcctgatgataagtatgtgtctctaggaatcctagttttgtttctctccttgcttgtgtgtttgccttacccatttgctttcacgggcaatgaagccatgatgattggcttgtgaagtgactcatatcattacaccgcactataagaaatcagagttatagttgtaactttttgttttggtctctatgctctactttgacatctaaagttatgtttttgttcttgctctatatttttactctcatggagcagtttaggaaacaaaccaaatttctcacagaaatgtgaactaatattttgctaatcaagttattaattacgtgtgggattgtcaatctaggttttgaaaaagagactttcactggttggaaaaacagaaaagaccaactttgtttatggggtagtgataatcatattgttaacaacattgtatatatatatatatatatatatatcagacgaattaatagaaatttaaactacattgtagacatgcgagagtatgtgacaaatttgatgctataacgacgttaaattctctattcaagaaaaacaattcaaaa

SEQ ID NO: 29755 - DNA, 2828 bp, Arabidopsis thaliana landsberg
  unsure (1)..(2828): unsure at all n locations
tccacaacagctagaatcttggtatgatcacagaaccaatttcttctacttacaagcaacaccatcgatgaacatcagggggttgctctaattcagtctcagagctaaacatcttcggtgataagtcatcagaaaaagccaaaagctttgatggttttgctatctctaatgttactttatctgatggattctccattgaatcatttgtcactacactgtcaaggctaaaatctcttagggttcttactctggcttctctagggatttggggtcgtctccctgagaaacttcatcgtttatcttcacttgagtatttggatttgagcaataactttctgtttggttcagtaccacctaagttgtctacaatggtaaagcttgaaactttcagatttgatcataacttcttcaatggcacattacctagctggtttgattcgtattggtatctcaaagttcttagctttaaaagtaataagctatcaggagagctacattcttcattactctcgttgtcaacaatcgagtatatcgatttgagagcaaattctctgagtggttcacttccggatgatctgaaatgtggaagcaaactctggtttatcgacatttccgacaataagttaaccggaaaacttcctcgttgcttaagcagcaagcaagatattgcgttgagattcaatggaaactgtttatctctagagaaacagcaacatccagaatctttttgtgttaaagaagttcgcgctgcggctaaagctgaagcaaaagcagaagcagaggctgcaaatgaatcaggaaaaagaaaatggaagaaaggagctttaatcggcttaatcgttggtatatcaatggcggtattggttttagtctgctgtgtatttatcttgctcagaagaaaaggagtaacaaagaagcatgtccaccataatactgtccaagataatcatccaactattggattttcttccgagatactctcaaacgcaagtaagacttttttcctaaaaaaaccgcaagtcttaaatattgtgaaaaagatcgacttactattatcctttttttgtgtgattgtgatttagggtacatttctgaaacatccaagtttggttcagaggatttaccggtatgtagacagtttagcttagaagagatagttaaagctacaaagaacttcgataagactatgatactcggtgaaagctccttatatggcacggtaaagttcatgaaaaccatttgtgttttcacttttcagcatcatcatctcctttaaagagattctgacatttgcttaacatctttcagctttacaaaggaaatcttgagaatggaacaaaagtggcaataagatgcttaccttcatcgaagaaatactcgataaggaatcttaaactgcggttggatttgctcgcaaagcttagacacccgaatcttgtctgcttgttgggtcattgcatagattgtggaggaaaagatgattacagcgttgagaaagtctttttgatttatgagtacattccaaatggaaacttccaatcttgtctctcaggttaaatcttgtttaaagctcaaatctttgcagttttttctacaaaatatatctgaagaatactaaaatccttctttcgtgcggtttttggttttgcgcagataatagttcaggtaagggtatgaattggtcagagaggcttaatgttctcacaggtgttgcaaaagctgttcattttcttcacactggagttattcctggattcttcagcaatagactcaagactaacaacgttttgcttaacnnnnnnnnnnnnnnnnncgtgagtgattatggtttgtccattgtctctgaagcaaccagacataacacagttaagctcgtttctttaatgttctgtttctgtttcacatgatatagcattgttttcataaacgtttttaaagtgcttagacagaaacatagacttatagctacattgtgtgtgtccgatgattctgatcctaacattgactaacaatgtcaaagccagctcaaacactcatagttacacttttgtatcaggaaatcgcaaaatcatggcaaatgtcaaggctagaagacgatgtttacagctttggattgattcttctacaatcaatcgttggaccatctgtatccgcaagagaagaagcatttctacgagacgaactggtacggctttggcaatatcacattcacaaaccagagttaaatcattgtacttattaaaagtgtttttcttatataatcaggcatcgttggagagcgaagaagggaggagaagaatggtgaatccgacagtacaagccacttgtcgaaacggatcactgataagagtgataactctgatgaacaaatgtgtttcacctgaatctttaagccgaccgtccttcgaagatatcttgtggaatttacagtatgcttctcagttgcaagctgcttctgatggtgaccagtgttaatatattcatagcttcttcttctcttagtaaaaaattcaaacgaactttttaatgctttaaagattcgtgtaatgtgtgtgtacgaaaatcccctgttatttatgtaacgattgggaaaaatggaaattaatacattaactccttacttaatcccaaaagtgagtggcaataaatgtaaattaatgtaagtttcagggtaaagtttgtccacgagatcaaaaaagctccgacccaaattaagagacccgagtttatgaaacccgacccggtcaccgctaccccctttgactaatgagaataaaaatttttagagaaaacgaagttttctagctactagatcagctgtgcgccgg

SEQ ID NO: 29756 - DNA, 711 bp, Arabidopsis thaliana landsberg
aaacttttgttttaaaagattatgttaattcacatactcaacaacggaagatgaagaaatgttggaattcaactaagcattatattagttatgcgtaatctgtagctgtagagaacatgatgttattgaattttgtctcttttgttaatgttttaacttctaattaggaagattgtaatctggttatgatatttttccttaaattaagtgttttactcgtttcgagtttttgttttctgctgattatggccattacaagacgcaacaatggagaaagaaaaagtgtttggataatgatgttactgatatggtcactttattcacaatattcatagtttttttttttttcttcttatagatttggatgcgggctcctcgctgcagaacaggacagaaagagcataatatgttaatgtgcaaactcgaatacaagcaaccgaagaaaatagcagatgtgtttttcatccaatgaaaggtaaggctactgatgttattgagactgtgaaccttcaatttcttatatgacttgcaagttagattatgaaattctattagaataaatttggtgcatcctaggaatgttaggaatttgatatgaggatttaataatggggtggatttgacatagccaacaaagattaggaaggatggtggaaatttccatgaagcgtgggggaaataaacatttctgagtttttttaagggtgggag

SEQ ID NO: 29757 - DNA, 1094 bp, Arabidopsis thaliana landsberg
aaaaatattgtaaattaaccccatcttgtatctctggttttggaaataaccagaaaagttgtgttgccaattgagcattcccgaggaaagaatcaggaagaaagcgtttgtcaccgtttctcgatgtccaggtaactttattagttacatttttcgaaatttataacatgatatattgtttggaaaatgaacttatattcatgtttttttcttttgtctaaataggtgttacttcgataacaatggatgacaaaaccgggaaaatgacagtagttggtgaagttgatgtaccggttatcgtgatgaagctaaggaagctatgtaacacagagcttgtttcggttgaagttgttaaaccacctgagaaaaagcctgaaccagagaaaccggctccacctaaaccagctccagctccagctaaaccggctgaaattgttgcctggccggttcagatgaacaacccttaccaatacaatcctgcctatgcaaattcttactatcaaccatatgggaactctagatttgtaacggacgaatcaaattgtgtgattatgtgataacttatttcaaataatgtgttaagttagttttgatggaagagtgtaattttttagctactgtaatatacatttctcatatgagcttattcagaaaaatttatgttactgtatgataaatttgatctttatacgttttgttaactttaacttttaatcatttagtaatagttgatctttttcctatacagaatattattctctatactttgtcttttgcttatatactaatcaaatggatacaaaaatatcacacacacacacacacatagttaagtcgctctcaacttatttatgaatatcaagtaccaagatcgttcacgtaatacattcaattgtccaaaactaaaataattttgaaacaattagagaatgagatattagtaaagatgtgatgtagagagtcaagatctgaaagtctcctttagcaaaacaaatactaatcaataaaattcctacttggagggatccacatgtaaactgaggctttcgaggacatttcctttcttgactatgaaatagcagtattatccgagt

SEQ ID NO: 29758 - DNA, 1578 bp, Arabidopsis thaliana landsberg
aatttttgagagacaggaacaagacgaaagagtctataacgggaaaccaaaacagacaccactcctgtttttaaaggtaagaaagatcaagaagaaaccatagaaaattacacagcaccaagaaaagatcagttcttaagagaaggaaagtatgaaacgggtcatattgttagatagagagaggaagcgaagaaaaagagtcgcagtgttctttttccactgcgtgtgagcagagatagtgacagtagatctcgaaaaaatctattttggaccttgcttttgtttttggctttatagcaatcaaagatccatggggcgggtgggtgtatcaaagctcagatttgtgtagatttatgggttatgtacattggagctttgtgctgtgacttttatttttttctattaaattttttattttattttatttttgggattagggttttggtataatcagctgtggctacaacgaggaggcataatctaccgacgtcggattccggtgcgttcaccgactgggcggccacgacgacgacaccttcccgtgccaccgaggatctctctcttggtttcaatgctggttcctccgtcatccacggtggtttaggctcagcttcagtcgccgccggcgttccatcatggcctccgggatcttctgtccgttacggcctaccttcttcggcggctgcgacggagatgggcatggttggtctaagagatgttttccttgttgctccggcttatcaccaccagaacgccggagtgatatctggatccgatcatatgaacagtaatgcagctgcggcggcggcgctcggtgtcggagtgattcctctactcacggcgggtccaccgcagcaaaacgtggaagactccgacattaacttcctcggaaacaaccggagatggcagaataacaacaacaaccacgaaacgcagtatcttcacttcaagagtactaaccagacaacggtcggaacgagctcgaacaactcggggtctggctcaggcgcatcaggaaccgccacgtgtcaagactgtggaaatcaggcgaagaaagagtgtaagcagaggcggtgtaggacttgctgcaagagccgtggctttgattgttctactcacgtgaagagcacgtgggtctctgctgctcggcggagagagaggcaggtcatgcctaccggcgctaatccaacggctggctcgtctctttcgacctcctccgggacgaagaagccgaggatcgtagggtctcaacaacaacaacaacaacaagccacttctcatacttcaacttctaacacaccacctcaaagtttcgagaccagctccagccgacaaggtagttttacattttcattagtatacatagctacatgattttatgtatgtatatacatgcatataacactattagcccttcttgaatattattgttatggtaatcaatcaaagtttggtgtctttctaaccaaaataaaacttaccatcgtttggatcgatataatacggttttagttaaagaaatttatcaataattttatgaccatttgaagttgaaatcagtctcccattccgcttcag

SEQ ID NO: 29759 - DNA, 3094 bp, Arabidopsis thaliana landsberg
  unsure (1)..(3094): unsure at all n locations
aaacccgaattacgaaactacgattgattcatgggattatcatacaatagtaaagaaagacaaaatctgattattaagaaaaaagaaaggcttatgcgataattaaaaggctgaaacttatattaaaaccaaagacaaaaaaaagcgatattaattagaagaggcgttcccatggtgatctttgctaacattgtcgtcattgttgctacggttagccggaggagctgcaggagacggcggagggatctggtgacgtggcgggttagtaggaacggtggaaggaggatttgctgcgagagagatatcggagagatcgtcaagggagatcggaaaaacgctctgagaaggtcttctctggtgacggcttggtctctccgacatggttagctacagattcagacaacaaggattgggaagagagaaaagagagataagaagagagagattgttgtgtgtgagagtgatgagatcgggagatagagagagactgtttatataaagaaggtgaaaaagaaaaatgtgttaggtagacagtgattatccgaattgagagcatgtatattgtaattttgtaaattctagtatattacaagaataaaaaagttaattttaataactaaaacatgaaagaaaagtaagaaaaacaaatgaaacatgagtttggatgtcaaataattctcttcttttttttttaaagttgtcttataattcactatttttaaaaaattagcatagactaaatcatttagtaaaataaagtcatttagtacaatagattttaggcaatgtggatttggtgttagtttatcaatcaaatgctctttaagaaaaactgtattaccatctattttgtactgtttttctttatataccattacatcttcaattatcatgtcatctataactatgttttaatatatatgaactacgaagaacataattcttcttatcatattttttgaaaaaaatgtgtgaaaagtattgttttctgtagaagctggttctaagtagcaagactaacatctctatgcatggtcaaatggttcagtaaatgttctgtgcatggtcaaatggttcagatacaaaattatgaattgtacctttttaacaagtaaatttaccccacagttccttaaaagtttatcttttgttaggtaagtaattaagattgaccaaaattttgtattttaagtatgatttgttttaggtcaataagttactannnnnnnnnnnnnnnnnnnnnnnnnnnnnnnnnngagggagatacagaatttaataatcaccattaactgtatttgaatagtctttactttctgcaaagtcataatgttgaaaaagttaattgcaattaaatgtaaatcttctccaataaccatcatagttcattgcatttagtggaaacaaaattgttcattgcatttgatgagaatatagataattggtctgacagatcttatatatattgataatatgaacaaacttccgataagctttgtcaacataaataaattaagaacccaaattattgtaatttgttttagtttttttttgtctagaagacaaacatttctcccccatgtgaggagatgtcagtctcgttggaatttaatgttgttatacgttccatagagccatacgacacgaatacaaacatgtattcaattttctgtgtctgatttttcttgttgataagatagatttaaatgtgacacacagatggtgatttcatatgggattgctgattaaaaaactcaagtaattttacaaaagtactagtgctagtgctagatattatatctagctagtaacttcgatagatcatcagtgtccagtgacactgatttagtgtccaatagaaagcatccaagtttttgccaaaaaaaaaaaaagaaagcatccaagcaatacatataagtttcatttgcattatattcaacagtaccattttcatatcttgtttcaaaaaatacatcaaattattttccaaaccttcacatataatttgagaagaaatattacaaatttaatataggttcagcataatttagaaaatattattcaatgtttaaaacttctcctaaattttggagtattgctattaatccttttaatgtgaacaaaacattgaagcgaaggttgccagatcagcaaatcatagcccgtgattcactttcaatccaaaagctaacattcatcaactgacaaaaccaaccatatcttccaacttctttcgctatcttacgccaaagctttcttaattcctccgtttgcatattttccggtcagatcaaaatcagaatcagaatcaaatttctcgtcgtgtcggagtaaatcaagccatggattccggaaccaaagtgaagaaaggagccgctggaagaagaagtggtggaggtcctaagaagaaaccggtttcccgttcggttaaatccggtctacagtttcctgtcggtaggatcggtcggtatcttaagaaaggtcgttattcgaagcgtgtcggaaccggagctccggtctatctcgccgccgtcctcgagtatcttgctgctgaggtaataaagttctgaattcagatcagctaatcatttcatcggaattatcgcagtttcatcgatttcactagaattcttgtgggttttgttctgttgcttcgttgaccatctataggtgtagaatgtcttcttctgattttagggtaaattgataatcatctgaggttgtaaaattgaatttgttagatactatatcacgagtagatcaacctcaagacatggtttcactttcaattaggtttaacatctttgctttgcaaatctcacaatcttagatagagatatattagcgttacataaaaactaaagttgcatagtcaataaaacctaaataaaacatctgcaggtaaacttcattgagaatctatcatcatgtaacaccgttttgagaatctgaataccttggactgatgtgcatgttacatgtaactcttgtcaacaaatctctgagtaactaggatatgcaaatattgcatactaatctttttgatcgaatgtgacaaaaccccattttaactttagaggcacattggctcgagcat

SEQ ID NO: 29760 - DNA, 2345 bp, Arabidopsis thaliana landsberg
agtatataggtattcggctatggcctgcacttgctattatccccattgtctttctgtgaagcccaaagaggatgataagaataactaactggatattgtctaaaagaagaagaaagaggaattccaagagaagaacatactcgtcgagcttaaaatttatatcgagtgaaaagatgtgagagactggtgtcattgcgtctttagcacttttctgtgacatgtccagagctcctgatatgattgttgtttcatcgtgagttagttccccgccttttcctgcctaattttcagattaaggacacggagaaaggagaagaaaaagacatgcattcacctcaaatattgacaaaacaattaaagcatctcaagttcttgaaacgaacctcgtttccgtgcatatacacaagtgacttgagctctgctcgtcctaagagtgtggaatgtctttttccaagcaacaaatcaagtagctaaagcattgaaagaagaaaacttaattattgttttaacttcactcaattgattccactaaaagttccattgatgttaagctgattgaattaccttgctgattggataagataatgggaagaagactataataatcaaccgaaccaaaaatgatagctttgccccgatgctcagtccgtatctagagcatacagcttgaggtataatctacaacaatggaaagagaacaataagctattgggcgatgttaaaaatcagatcagcagagaaagctaactcaaattccattcacctcgccaaaggcaagtatgagagtgacggatatcagaatagcaccccaggctggaagcagggaatcgacaaagatcgggagagcctttcaaattttgtcattgaaaacagcgtcagtaaaaactgcatcataagttctaaaaagccaaagtgtgcacaacacaaataagtatccaaatatatatgcataagcttgatacctccattgccaaagcattgcctataaggagtgtacacaagagaaggtgctggtttttaacgaggggcagaatcttctctggccattttgttacaatttttttaaaatggcgttagtatgaatatgaagtattaaagtatgagtatgtcaatgggttcatgaaactgacctgcatttttgcggtcatggggttcaccggctttgatcatgacctcgagctcgacaatactaagggacatgagcccaagagtcagtcctgacatcaaacctgcgaaaaccactagagcaacacatacgagtaggtacacccagaacatagtctcacagcaagggacatcatttgcagccatttcttaagtaatttagaaggtagagactaaagactatgaatgccgagactgtgagagaatgagtttgggaatcataggagcttaaatagtagcagcggatgacatagtataccaactgctacaccaagagaacagaatccaagaaccaccatccaagaggttattacataagagtaaaaacaaaatgccttttgcaagaacctttgcattcacaatcggattttggtcatcggcccacaaaaactagttttgatgtccaccgtttctctctaatcattgtcaaattattatgccctagtgacctgctatcagacagaataaccagaaagacttatgcagtgaagctgcgaatcaacacttagtcgatatttcaattcaattatgttgtgcggttcttatacaaaaggtgtgaggagaagaacaacatgcaaccacttgcattgccaactcagagtgactgaaaactactcactatagtcgaccaacccaaagaacaccaaatgatgttgtggtctttagtaccaaaacagtgacgttacgaaaaatctattttaaagtgtttttggatattcagaaacgctaatacaacaaagtaacttccaaaggagcaggtgataaaagatcaaaaacttgatgatacccaacccagatagcaatcgattcataaagaagcaaacgacggttcaaaggaccacaacaataataatatacgtaagggtcaagataagaaatgacctccaaaccaaaacaagccttaaagaaaagatttaaaatagttcagaagaacaaaaccaagaagctcttttaaataaaatggccaactccaacaactaatggaagcaagacacataaagattaatcaatatataatgtgtttagcatcactatcttgttcaggtttttctgctaaacaactcctctatatatgaattcatcattctccactagcaaatactttattcactttgtcactttgatgagaattacataatgaaattttatttttttatcaatgcaccctactaattcactag

SEQ ID NO: 29761 - DNA, 1935 bp, Arabidopsis thaliana landsberg
  unsure (1)..(1935): unsure at all n locations
cactaaattatttgatatccagcttcaacccattactcacagaaactcttaacgataaccgaatagagcaagatagtttagaaactcttaatcgtcttccacccaattcacgaactggatattttcttctacccaattacgctgactaagagattaaaagaactgaaaatcaccttgatggacaccttggtcttcacttggctctccagagcttcagtcatggactacaacaagcatacagatatcaaaaagaggaaagaaaaaaaaaaccacaaaaacgaatcaagacgccaagatcagtcaaataaaagttaaattgaaaccttgtcaaattgaacaaggacttggatagctagctcagggctcagcgtaccgctctgaaccatctcgtccaaagtctccgtcagacacatcccgatcgtcgatctcctgtacagctcaaacgtcgccattctctacttccccaacgatctgttgattcaaattcgagcaacaaatcgtcgaatcaaaattcgcaactaattacaaatcgggaatctgaaagtttcgacgccaaaaaaaaggtgctagatgaatctaagacctcaataagagatgaatacgggatgaagaaccggtttaccgatctccggcgacgttagaagagatttggacggtggatgcaggagcttccgttgctcgattgcgaaggatttttgtctcttgggcggagaaaaaattaggggcttttataccctagattttgcaggtaactgtatatataggcagcgatagatcgagtcggcgaaaaattacattcttaccctttcgtttgtaataaagtcaaatctgagattagaaagaaggcccaacacaaggcccatataatgtctttttttatattagtaaagtaacccgcaatacaaaattgcgtatacaataatgtgactaaaagtcctagtgagagtatgaatctaaaggaggtccttcgaggcggatatagtcatacatgagaccattaaaggctccagtggtggtcatggtttgtgtcaagaacaaagtgttgtctccttccacaagcttctcacttggtacatccacattataaagcctatagattccatgtatcccatgtcttgcaatcgcgttatcgtgcccgattacacccgttgtgaatataggagtagtcttttctgtgtcatcatcattcatcctcacctgtaattctgctacatttgcagttgctagcgcgatccggattttgtatgtgcaacttttctgtacattctctagcttgaacttgatttgccatgttgttttctgatatgtatcatctcccattttcctatcatcatttaaagtaaatgtgaggcttctttgttttactcttcttagaaaatgtgaaatatttgttacctggtaacgtgtgcaaagaaccaatcttttttgtaannnnnnnnnnnnnnnnnnnnnnnnnnnnnnnnnnnaggatatagttctgtgtatctttcccatagcccgtattgcctaaacctgcttacgtacaaccatactttagctctctactgttttaacaatctgaaaccttaatgttgtgatatctttgatcatggacatacctatcaggatgaccaatatatagtttgttgatgtatttgggatttgggtctggaacaaagaactcagctgcagaccggtcaggtatccctatttcccacactgttggcccatctcggggcggttcatacacgatattgccaacgtcaatgtcgcagcctggtttttgtgtgcagagtgtagctaatgttaagttaacttgcacttcttgatacagcctaatataaatcttgattacattgtaagttaaagaaaatataacctgcagtaatggtaatcaattgttcgtattgatagtctcctatccatcctgtcacataaccattgagattatactcg

SEQ ID NO: 29762 - DNA, 670 bp, Arabidopsis thaliana landsberg
tttacgctttgcagaaatataaggtgccattctaggattccatttcctcgtaccatgtccaaaatgaactcctgctctcatcatctcttccaaatcgatgttccaatatctttttgtcatttcttttcacacttaaaaaggggggcaccccaaactaaaataaaattttgttccgatggaaccttctcttgtaccggggatggccatttatgcatgaaccaagccattattttgtattgattattatctttattagtgttaacaaattacgaaagcaaatgactacagcaaacaacaaaaactaaaattttaaatagtccgctattagaaatcattaaatcctagaaaagtcagatttggaaatagaagagtcacaaaattccctgtggtagaataaaatatctctcatatctccctcgaataaagctaaattctttgtttttttttctaaaataatgttggtatgttgccgtgaacaatgcaccaatcctttgttgaatccggtcccggcggggatcaccccccctagaacaacattttctttcaggcctttcaaccaatcgatgcgaccccgaagagcagcttttgctaaaactcgagcagtctcttgacaactcgctatggatctaaaactgtgaggattcacagatgctcgagttattcctaataa

SEQ ID NO: 29763 - DNA, 2363 bp, Arabidopsis thaliana landsberg
aatcaacgtcgtgaccatgttggcccacacgcaccggtcggaggcaaaaaacacaaccagcagcgagttgtagagagaaagaagagagaattaataataaggatacatgtttggtcataaatatttaattaattagactatcaattttattttatttgtaattttaaatgttggttagaaaaaaaaaaaagacaaaaaaagtctaggagattgtttttttttatctttttatgctaaagtatttttatatgtctttttccaacaaattgactactatatatatgtggaacaagttgcatcatccaacaatgggaaatcattttggagaggcttgttacaaggagagaaactttttacggaccaaagaaacaagataaaagagtactgataaagaactacaaattacagagtaaagaaatacagataggggtacattgtatttgtctgccaattgtggaaggcctgcaaagtgagtagtttgtgataagcagaacatcatgactcttcaataaaaccagaccacggaaaacaaagttcccaatctgatcttagagcttccatcttatgcaaatgtcataattgcttcatactcaccaacatagtaggataacaaccattagtggcaggattattgaagataacatgattatcttcaatcttaacccaaaaagctgcaacactgacaactaaacggtaatagatccttgcagctccaaaatagtatcatacagcaaacaccaacttgaagtaaagaaccagtagtcattgtataaacaaaacataaccttaccccaaaaagtttaagtctcagagtataagggtatgttatactctgaggatcccaaaacctgtgagatatggaggctgagatggacttgagtaaaatctgactccatgtgctgacctacatcgtctcatgcttcgtttagtagtgacttcaacctgtttgtcttttttacgtttagagctctcaccatgctcaaacttccctttatccttgcgatcactagaagtagaaggatcatcagatgcatgtttgccatgagtatggttgcaaagatgcgcctgatgttccgaaaccaacatattcaaatctaaggctggtgatgtaggatttggtggttgagaaataggactgtcagaagaaatatctgaactagatgattccttctcaggaggtggtggacttggattgttagaacctgctccctcttcccaaacagggactgccaagacatcagcttcatcatcatcaccattatcaggattcacctgatgagctaagtaaggacagtgatcaagatcatgtgtaatacgacagcagttagagcaaatccttctaagcctttcatattcaaatccaatcatcgctctctccctggattcaaaacagactcgtcgaaagaacctcaaacgatctgtaatactgaggcggatcttaacacggataaactctacctgtgttgttgtttcttcatcaaaatcaagtcccataactggtcccagagtacttgctataaatctaacagtcattgtagacagatacaggacaggaattcctcttacttgaacccaaaggtcaatgaaagtaaggaaatcaggacgtggaaagtcttcccatcgttgtaaagcaacaaaccagtgattaaacagccatggtcctcttaacatcaccgaagctagatcaactgcagactgaaaccgaaactggatccgcctgtcatcaagtatacgtgcatgaacccgagtagctagtccccagctgcgaggtaaggctctcataaaccttcgaagatgttgtgcatgtgtgttgagaggtctcccaatgacactcagtctgttaccagcaacaacacgagcatatgctgcttggggaacaaacagttcaggatcatcacgtcccaacaccatgtattgtagatcatgccaaatttcatttgccattagaaaaagaaagaaagagaactaaacacgaaaaggctccaaagaaaagaagtgtaagaaaggttgtagtggtttgagccaaaaccaagtaatatataagaaggtaaaagaagaggcggtaagagtagagaaataatgaacaaaaggatttaaaaagaaaaataggacaaatattggcaatcagaccaaggaaaataatgattactgaagataatcactgtaaaagttcaaaatatcaggttttggactttctgaactatagtaaaaaactctcgcctcttgactaaagttgacttatctaaacagtaaacacctaatagtcaagcttgctgtggcggtaattttccagaacccaatgaaagatgagacaaggaatcagcccaaaatatctccttctcaaagaaggtcttagacaagga
